United States Patent Application Publication US 2012/0159672 A1 - sequence listing, part 4

SEQ ID NO: 6499 - DNA, 945 bp, Glycine max
  misc_feature (1)..(945): Ceres Seq. ID no. 12607767
aatatagatttaacttcgttaataatttaaagatattacatgtttctgttacatgttggcttttatataaacaagatatataagaggattcttttagcttattttttttaaagaagaataaacatatttaaagataatcttacatcacaatttaatttattcaccataaatctaatatgtaatttatatatctaaatatattcatttgttataaatatcaattgtaatacaatttatatttatatatttagaaaattttaattatacgaaaataaacatttatgtggtataatatatattctaaaatgttaatattatcattgaaatatatttattataacgaaaaatactttatttaattgtataagaatatatttatcaaaaagaaaatattagaatttgatttgattcgtctttctctctctctgactcgaaattttgcagatctggaaatggcgacggcaacgtaccctccaccgccaccttattacagactttacaaagattacttgcaaaaccctaagtctgctcccgaccctccaccgcctattgaaggcacttatctttgttttggagccaattacaccactagtgatgttctaccaaccttggaagaacaaggggtgcgccagctctattctaagggccctaatgttggtaagctttaacctttcaatgcttctgctgatccttgcttcctaatgttggtaagctttgtctgctctttgttgccataggttcggaattttatattatcattattatgttgcaaaatactcggtcacattttcatccttttttggaaattccattatgggaaagtggaatcactgaggcacgaacctagaacagaaacaaatcaattacagctttgcatgctctgctttttcaaattgggtattcattcccttactttgtaggttgggatattacatggtgagctac

SEQ ID NO: 6500 - protein, 71 aa, Glycine max
  peptide (1)..(71): Ceres Seq. ID no. 12607768
  misc_feature (1)..(68): Pfam Name: Pfam Description:  MED7 protein
  misc_feature (1)..(68): NCBI GI NO: 15242681 NR Description: putative protein; protein id: At5g03220
  misc_feature (1)..(68): NCBI GI NO: 21618057 NR Description: transcription co-activator-like protein
  misc_feature (1)..(68): NCBI GI NO: 11282322 NR Description: transcription co-activator-like protein
  misc_feature (1)..(68): NCBI GI NO: 15242771 NR Description: putative protein; protein id: At5g03500.1
  misc_feature (1)..(68): NCBI GI NO: 32489035 NR Description: OSJNBa0084K01.4
MATATYPPPPPYYRLYKDYLQNPKSAPDPPPPIEGTYLCFGANYTTSDVLPTLEEQGVRQLYSKGPNVGKL

SEQ ID NO: 6501 - protein, 35 aa, Glycine max
  peptide (1)..(35): Ceres Seq. ID no. 12607769
MFYQPWKNKGCASSILRALMLVSFNLSMLLLILAS

SEQ ID NO: 6502 - DNA, 1411 bp, Glycine max
  misc_feature (1)..(1411): Ceres Seq. ID no. 14313429
aacacacaaccaaaccctcttgaccttgtgatatctctctcttttaatttctaggatcaaaccaaaaaatggtcttagaagagagtgtagtgcatgatgtgaggctatcctcagttgggccgggccgggccaccgggtcggacgtattccacaacccgggtggcttggacttggccatgaagcttcactaccttagagtggtgtacttctttgatagtgaggctgcacaagacctaaccatcatgaaaattaaggatggcatgttcactttgttcaaccattacttcatcacctgtggccggttccggcgatcggattccggtcgacccttaatcaagtgcaatgattgtggagcaaggttcattgaggccaagtgcaacaaaaccctagatgagtggctagccatgaaggattggcccttgtacaagttgctcgtctctcaccaagtcattggcccagaactatctttttctcctcctgttttgttccaggtgactaaatttaagtgcggcggaatttcattgggtcttagttgggcccacgtattgggggatcctctttcggcttcagaattcattaactcttggggtctaatattgaaaaatatgggcctaaaaatgctttttaacatcccaagatccatcccaacacccggacagcccggacctgaaaaggatccagtttcagcaaaacggatcgacccggtgggagatcattggattccagccaacaacaaaaaaatggagacattctccttccacctaactagctcccagttgaactacttgcaagcacaaatttggggtacaagtcttgaccaaacccctccttttgaatcactatgtgccatgatttggcgttgcatggcccgaattcgaccaggatccgaacccaaaaccgtaactgtgtgtagaagcaacccctataagaggggcaatcatatcattggtaacaaccaagtgatatgcaaggttgatgctgcaagtgaatcctcaattcttgacactgatttgacagttttagctagcatgcttgtggatcaaggtgtggatgagaggaagcaaattgaggaagcagttgagagagaccaaggtgtgagtgatttcttcgtctatggtgtcaacttgacatttctagacttacaagaaaccaatgtgtatgacttgcaattgaagggacacacaccaaagtttgtttactacacccttcaaggtgttggagatgaaggggttgttttggtgtatccattgcccaaaggttctatggagaatggtgttgatgggaagtttctgaccatgatttttccggaggatgaaatggtgaagcttaaatctgagctcaagataattggtcttttgcttgagaataattaagttttaatgagattaaaagcatgtttgactttccgttc

SEQ ID NO: 6503 - protein, 434 aa, Glycine max
  peptide (1)..(434): Ceres Seq. ID no. 14313430
  misc_feature (8)..(425): Pfam Name: Pfam Description:  Transferase family
  misc_feature (1)..(430): NCBI GI NO: 15236357 NR Description: transferase family [Arabidopsis thaliana]
  misc_feature (1)..(393): NCBI GI NO: 21593424 NR Description: fatty acid elongase-like protein (cer2-like)
  misc_feature (1)..(393): NCBI GI NO: 18403923 NR Description: transferase family [Arabidopsis thaliana]
  misc_feature (6)..(433): NCBI GI NO: 38345799 NR Description: OSJNBa0085I10.16
  misc_feature (3)..(424): NCBI GI NO: 15233851 NR Description: CER2 [Arabidopsis thaliana]
  misc_feature (1)..(424): NCBI GI NO: 2130139 NR Description: hypothetical protein - maize
  misc_feature (150)..(433): NCBI GI NO: 38568010 NR Description: OSJNBa0070C17.2
  misc_feature (6)..(142): NCBI GI NO: 38568009 NR Description: OSJNBa0070C17.1
  misc_feature (33)..(270): NCBI GI NO: 40644084 NR Description: hydroxycinnamoyl CoA quinate transferase
  misc_feature (33)..(274): NCBI GI NO: 40644899 NR Description: hydroxycinnamoyl CoA quinate transferase
MVLEESVVHDVRLSSVGPGRATGSDVFHNPGGLDLAMKLHYLRVVYFFDSEAAQDLTIMKIKDGMFTLFNHYFITCGRFRRSDSGRPLIKCNDCGARFIEAKCNKTLDEWLAMKDWPLYKLLVSHQVIGPELSFSPPVLFQVTKFKCGGISLGLSWAHVLGDPLSASEFINSWGLILKNMGLKMLFNIPRSIPTPGQPGPEKDPVSAKRIDPVGDHWIPANNKKMETFSFHLTSSQLNYLQAQIWGTSLDQTPPFESLCAMIWRCMARIRPGSEPKTVTVCRSNPYKRGNHIIGNNQVICKVDAASESSILDTDLTVLASMLVDQGVDERKQIEEAVERDQGVSDFFVYGVNLTFLDLQETNVYDLQLKGHTPKFVYYTLQGVGDEGVVLVYPLPKGSMENGVDGKFLTMIFPEDEMVKLKSELKIIGLLLENN

SEQ ID NO: 6504 - protein, 398 aa, Glycine max
  peptide (1)..(398): Ceres Seq. ID no. 14313431
  misc_feature (1)..(389): Pfam Name: Pfam Description:  Transferase family
  misc_feature (1)..(394): NCBI GI NO: 15236357 NR Description: transferase family [Arabidopsis thaliana]
  misc_feature (1)..(357): NCBI GI NO: 21593424 NR Description: fatty acid elongase-like protein (cer2-like)
  misc_feature (1)..(357): NCBI GI NO: 18403923 NR Description: transferase family [Arabidopsis thaliana]
  misc_feature (1)..(397): NCBI GI NO: 38345799 NR Description: OSJNBa0085I10.16
  misc_feature (1)..(388): NCBI GI NO: 15233851 NR Description: CER2 [Arabidopsis thaliana]
  misc_feature (1)..(388): NCBI GI NO: 2130139 NR Description: hypothetical protein - maize
  misc_feature (114)..(397): NCBI GI NO: 38568010 NR Description: OSJNBa0070C17.2
  misc_feature (1)..(106): NCBI GI NO: 38568009 NR Description: OSJNBa0070C17.1
  misc_feature (1)..(234): NCBI GI NO: 40644084 NR Description: hydroxycinnamoyl CoA quinate transferase
  misc_feature (1)..(238): NCBI GI NO: 40644899 NR Description: hydroxycinnamoyl CoA quinate transferase
MKLHYLRVVYFFDSEAAQDLTIMKIKDGMFTLFNHYFITCGRFRRSDSGRPLIKCNDCGARFIEAKCNKTLDEWLAMKDWPLYKLLVSHQVIGPELSFSPPVLFQVTKFKCGGISLGLSWAHVLGDPLSASEFINSWGLILKNMGLKMLFNIPRSIPTPGQPGPEKDPVSAKRIDPVGDHWIPANNKKMETFSFHLTSSQLNYLQAQIWGTSLDQTPPFESLCAMIWRCMARIRPGSEPKTVTVCRSNPYKRGNHIIGNNQVICKVDAASESSILDTDLTVLASMLVDQGVDERKQIEEAVERDQGVSDFFVYGVNLTFLDLQETNVYDLQLKGHTPKFVYYTLQGVGDEGVVLVYPLPKGSMENGVDGKFLTMIFPEDEMVKLKSELKIIGLLLENN

SEQ ID NO: 6505 - protein, 376 aa, Glycine max
  peptide (1)..(376): Ceres Seq. ID no. 14313432
  misc_feature (1)..(367): Pfam Name: Pfam Description:  Transferase family
  misc_feature (1)..(372): NCBI GI NO: 15236357 NR Description: transferase family [Arabidopsis thaliana]
  misc_feature (1)..(335): NCBI GI NO: 21593424 NR Description: fatty acid elongase-like protein (cer2-like)
  misc_feature (1)..(335): NCBI GI NO: 18403923 NR Description: transferase family [Arabidopsis thaliana]
  misc_feature (1)..(375): NCBI GI NO: 38345799 NR Description: OSJNBa0085I10.16
  misc_feature (1)..(366): NCBI GI NO: 15233851 NR Description: CER2 [Arabidopsis thaliana]
  misc_feature (1)..(366): NCBI GI NO: 2130139 NR Description: hypothetical protein - maize
  misc_feature (92)..(375): NCBI GI NO: 38568010 NR Description: OSJNBa0070C17.2
  misc_feature (1)..(84): NCBI GI NO: 38568009 NR Description: OSJNBa0070C17.1
  misc_feature (1)..(212): NCBI GI NO: 40644084 NR Description: hydroxycinnamoyl CoA quinate transferase
  misc_feature (1)..(216): NCBI GI NO: 40644899 NR Description: hydroxycinnamoyl CoA quinate transferase
MKIKDGMFTLFNHYFITCGRFRRSDSGRPLIKCNDCGARFIEAKCNKTLDEWLAMKDWPLYKLLVSHQVIGPELSFSPPVLFQVTKFKCGGISLGLSWAHVLGDPLSASEFINSWGLILKNMGLKMLFNIPRSIPTPGQPGPEKDPVSAKRIDPVGDHWIPANNKKMETFSFHLTSSQLNYLQAQIWGTSLDQTPPFESLCAMIWRCMARIRPGSEPKTVTVCRSNPYKRGNHIIGNNQVICKVDAASESSILDTDLTVLASMLVDQGVDERKQIEEAVERDQGVSDFFVYGVNLTFLDLQETNVYDLQLKGHTPKFVYYTLQGVGDEGVVLVYPLPKGSMENGVDGKFLTMIFPEDEMVKLKSELKIIGLLLENN

SEQ ID NO: 6506 - DNA, 1191 bp, Glycine max
  misc_feature (1)..(1191): Ceres Seq. ID no. 13594037
cccccatgtttttattaatttgattttctctttcgtggttttttttttatacataacttgagagaattgttttttgttttggcattatgtggctttaaattgtttgacatgacaataattgagtggtaattaaatttgatgtgaacgagtgtagatttgtgatacacataaaagccggggcatacttcgagaatgtggaggtaatcaggaagaagaccaatctgatgttcgtcggagatgggattggaaagactgttgtgaaggccagtaggaatgttgtggatggctggaccactttccaatcagccactgttgctgtggttggagacggattcatagcaaagggtataacctttgaaaattctgctgggccaagcaaacaccaagccgtggccctaaggagtggttctgatttctcagccttctataaatgcagcttcgttgcctaccaagatactctctatgtccactccctgcgccaattctaccgcgattgtgacgtttatggcacagtcgacttcatcttcggcaatgcagcaacagtgctccagaactgcaacttgtacgcacgcaagcccaatgaaaaccaaaggaacttgttcactgcacaaggaagagaagaccctaaccaaaacaccggcatttccatcttgaactgcaaggttgcagcagctgctgatttaatcccggtcaaatctcagttcaagaactacttgggtcgtccttggaagaagtattcgagaactgtttatcttaattcttacatggaggatctgatagaccccaaagggtggttggagtggaatggcacgtttgcattggatacgttgtattatggagagtacaacaataggggtcccggttcaaacacaagtgcaagagttacgtggcctggttatagggttatcaagaacgccactgaggcaaaccagttcacagttcgcaatttcattcaagggaatgaatggttgagttccaccgacattccattcttctctgatttcagttgaatacgttatggttattagtggcttcatgctcttttggtatccccatttaataaagtattagatgtttgttgtggaaatagaattcaaggaatgttattgttccttgcgacaaaagcactaactaaaataaaaaagtattttatattaattttttatcgataaawawtaatttattaatttt

SEQ ID NO: 6507 - protein, 261 aa, Glycine max
  peptide (1)..(261): Ceres Seq. ID no. 15221289
  misc_feature (1)..(246): Pfam Name: Pfam Description:  Pectinesterase
  misc_feature (1)..(258): NCBI GI NO: 7025485 NR Description: pectin methylesterase isoform alpha
  misc_feature (1)..(261): NCBI GI NO: 34393863 NR Description: putative pectinesterase
  misc_feature (1)..(260): NCBI GI NO: 15235315 NR Description: pectinesterase family [Arabidopsis thaliana]
  misc_feature (1)..(259): NCBI GI NO: 15235323 NR Description: pectinesterase family [Arabidopsis thaliana]
  misc_feature (1)..(258): NCBI GI NO: 6174914 NR Description: Pectinesterase 2
  misc_feature (1)..(258): NCBI GI NO: 7447381 NR Description: pectinesterase (EC 3
  misc_feature (1)..(256): NCBI GI NO: 24250746 NR Description: putative thermostable pectinesterase
  misc_feature (1)..(256): NCBI GI NO: 2129667 NR Description: pectinesterase (EC 3
  misc_feature (1)..(256): NCBI GI NO: 15220955 NR Description: pectin methylesterase (PMEU1) -related
  misc_feature (1)..(258): NCBI GI NO: 18406733 NR Description: pectinesterase family [Arabidopsis thaliana]
MFVGDGIGKTVVKASRNVVDGWTTFQSATVAVVGDGFIAKGITFENSAGPSKHQAVALRSGSDFSAFYKCSFVAYQDTLYVHSLRQFYRDCDVYGTVDFIFGNAATVLQNCNLYARKPNENQRNLFTAQGREDPNQNTGISILNCKVAAAADLIPVKSQFKNYLGRPWKKYSRTVYLNSYMEDLIDPKGWLEWNGTFALDTLYYGEYNNRGPGSNTSARVTWPGYRVIKNATEANQFTVRNFIQGNEWLSSTDIPFFSDFS

SEQ ID NO: 6508 - DNA, 1288 bp, Glycine max
  misc_feature (1)..(1288): Ceres Seq. ID no. 15170521
aaaagttggcacctggcagcaagtagtagtaacaatttaggattgtggtgtgttgttgttgttgtagctatcagtaggtgaatccaaaaccctagccctcactctcaccaccattttttcaattcttgagctatgtttcagggataatagggcagggatgtacaaagaacgagagcgaggtggtgtttccgtttccgcctctaaatccgaggatcggaagcgaatcaacgacgttctcgataagcacttggaacgatcctctccttccacttcccgccccatcaacaccgcttccaagaattccaacctccaagtggaggaatctgagacggagagtgaagagtctgatgttagtggctctgatggggatgacacctcttggatctcgtggttctgtaatctaagagggaatgagttcttttgtgaggtggatgatgattacatacaggatgactttaacctctgtggattgagcagtcaagtgccctactttgattatgcccttgatttgattctcgacgttgagtcatcccatggtgacatgttcacggaggaacagaatgagttgattgaatcggcggcggaaatgctttatggtatgattcatgctcgatatgtgttgaccagcaaaggaatggctgccatgcttgacaaatacaagagctatgattttggtagatgcccaagagtttactgctctggacagccctgccttccagttggtcaatcggacattcctaggtcaagtactgtgaaaatatactgccctaggtgtgaagatctttactatccgcgttccaagtatcaaggcaacattgatggagcttactttggaacaacatttccacacctcttcttgatgacttatggacaactgaagccacagaaaccagcacaaggctatgttccgagagtttttgggttcaaagttcacaagccataaagccgaagttgaagctttcatgaaagtaaaaatctccccgtgtctcatttaactcttcttatggttctctttgcaacaacaggcgaatcatatgctttccaaaccagtacaatctaggcatctgttttacttgttataggagcttgttgtaaagaaatatgcagacatgtgaagcaagtgcttagtttcagcttctgattcaatgagcaagtgcttaggtactcgatggtacttcttaatggctttttacaaattgtattcttgcaattaacttaatattgtctatggttatgtctcgaattacaaataccctgctatttttatattgttttattccatttcaag

SEQ ID NO: 6509 - protein, 261 aa, Glycine max
  peptide (1)..(261): Ceres Seq. ID no. 15170522
  misc_feature (71)..(249): Pfam Name: Pfam Description:  Casein kinase II regulatory subunit
  misc_feature (41)..(260): NCBI GI NO: 37536920 NR Description: putative casein kinase II beta subunit
  misc_feature (1)..(51): NCBI GI NO: 37536920 NR Description: putative casein kinase II beta subunit
  misc_feature (19)..(259): NCBI GI NO: 15224934 NR Description: casein kinase II beta chain, putative
  misc_feature (32)..(260): NCBI GI NO: 21261784 NR Description: protein kinase Ck2 regulatory subunit 2
  misc_feature (19)..(259): NCBI GI NO: 30689795 NR Description: casein kinase II beta chain, putative
  misc_feature (1)..(261): NCBI GI NO: 15232283 NR Description: casein kinase II beta chain, putative
  misc_feature (19)..(261): NCBI GI NO: 11527002 NR Description: protein kinase CK2 regulatory subunit CK2B2
  misc_feature (46)..(261): NCBI GI NO: 15238013 NR Description: casein kinase II beta chain, putative
  misc_feature (38)..(261): NCBI GI NO: 15236597 NR Description: casein kinase II beta chain, putative
  misc_feature (55)..(261): NCBI GI NO: 34901776 NR Description: OJ1058_B11.17
MYKERERGGVSVSASKSEDRKRINDVLDKHLERSSPSTSRPINTASKNSNLQVEESETESEESDVSGSDGDDTSWISWFCNLRGNEFFCEVDDDYIQDDFNLCGLSSQVPYFDYALDLILDVESSHGDMFTEEQNELIESAAEMLYGMIHARYVLTSKGMAAMLDKYKSYDFGRCPRVYCSGQPCLPVGQSDIPRSSTVKIYCPRCEDLYYPRSKYQGNIDGAYFGTTFPHLFLMTYGQLKPQKPAQGYVPRVFGFKVHKP

SEQ ID NO: 6510 - protein, 133 aa, Glycine max
  peptide (1)..(133): Ceres Seq. ID no. 15170523
  misc_feature (1)..(121): Pfam Name: Pfam Description:  Casein kinase II regulatory subunit
  misc_feature (1)..(132): NCBI GI NO: 37536920 NR Description: putative casein kinase II beta subunit
  misc_feature (1)..(131): NCBI GI NO: 15224934 NR Description: casein kinase II beta chain, putative
  misc_feature (1)..(132): NCBI GI NO: 21261784 NR Description: protein kinase Ck2 regulatory subunit 2
  misc_feature (1)..(131): NCBI GI NO: 30689795 NR Description: casein kinase II beta chain, putative
  misc_feature (1)..(133): NCBI GI NO: 15232283 NR Description: casein kinase II beta chain, putative
  misc_feature (1)..(133): NCBI GI NO: 11527002 NR Description: protein kinase CK2 regulatory subunit CK2B2
  misc_feature (1)..(133): NCBI GI NO: 15238013 NR Description: casein kinase II beta chain, putative
  misc_feature (1)..(133): NCBI GI NO: 15236597 NR Description: casein kinase II beta chain, putative
  misc_feature (1)..(133): NCBI GI NO: 34901776 NR Description: OJ1058_B11.17
  misc_feature (1)..(133): NCBI GI NO: 11527000 NR Description: protein kinase CK2 regulatory subunit CK2B1
MFTEEQNELIESAAEMLYGMIHARYVLTSKGMAAMLDKYKSYDFGRCPRVYCSGQPCLPVGQSDIPRSSTVKIYCPRCEDLYYPRSKYQGNIDGAYFGTTFPHLFLMTYGQLKPQKPAQGYVPRVFGFKVHKP

SEQ ID NO: 6511 - DNA, 1773 bp, Glycine max
  misc_feature (1)..(1773): Ceres Seq. ID no. 15170532
agttcttcatctcttctttctctttctctctactcagttcttcatctcttctttctctctctctctctcccctcacaacacacattgagaaaaacaaccctcactccctagatggggccttccgagaacgagccacttgtaaattcccaatttttcagttgaattttaactgcaattggtagattacgatttcccctacctgaaaccctagccatttgtagatgactcacttgtaaattcgcaattttgttgctgaatttcagctgtgattggtagtttcattgcatcttcgcgaccaattttcgggagaaaatggcagaactcgatctgtccaagaaagtagccgataggtatctcaagcgtgaagtccttggtgagggtacatacggtgtcgtttacaaagccattgataccaagacagggcagacggttgcaattaagaagatccggcttggcaagcagaaagaaggggtcaattttacggctctcagagaaattaaactgcttaaagagctcaaagatccaaacattattgagttgattgatgcctttccacataaagggaatttgcatcttgtgtttgagttcatggagacggacctcgaagctgttatacgggacaggaatattgttctttcacctagtgatataaaatcttaccttcagatgacattaaaaggccttgctatttgccacaagaaatgggtgttgcatagggatatgaagccaaataacttgttgataggatccaacggacagctgaaacttgcagattttggtttagcacgggtatttggaagcccagatcgcaggttcactcatcaggtgtttgctcggtggtatagagcacctgagctattatttggcaccaagcagtatggtcctggggtagatgtttgggctgcagcttgtatatttgctgaatttcttcttcgtcgacccttcctgcagggttcaagtgatattgatcaattaggaaagatttttgcagcatttggaactccatctgcttctcagtggcctgatatgattttccttcctgattatgttgaatatcaacatgttcctgccccacctttgcgttctttatttccaatggctagtgacgatgccttagatttgttgtcaaagatgtttacttatgatccaaaggctagaatatctgtaccgcaggcattagagcacaggtacttctcatctgcgcctctgcccacagatcctgttaagctttcaagacctgctcctaagaaggaatctaaggtttcagatgtaatttcaaacgaaggtcctactgtcttgtcacctccaagaaagtccaggagagtaatgccagggcgtgatgggtctgaaggaaattctttgcaaggagataagtttgatgacagtgttgttagtgtcagacaggcagctggtgataatatgggaaagaatgagccagctccaatgtcactagatttttctctttttggattaaaacctccaaatagacctacaattaccagtgctgacagatcacatttaaaaagaaaattagatctagagttctagcagccagaatgaatattctatgatggttccatcagtaagagaggggtctgatgcatttgagaaaattctgtgaatcagcttcgcttgtatgccattccctatatttttctctctgcataaagttcccatgaatatgttgatgtttaaaggaagaagtatctgtgacagcagattagcatctcacttgaatagtagttcagagagctgaaagtaactatcatagac

SEQ ID NO: 6512 - protein, 411 aa, Glycine max
  peptide (1)..(411): Ceres Seq. ID no. 15170533
  misc_feature (14)..(294): Pfam Name: Pfam Description:  Protein kinase domain
  misc_feature (1)..(411): NCBI GI NO: 15419985 NR Description: CDK-activating kinase
  misc_feature (8)..(410): NCBI GI NO: 266410 NR Description: CDC2+/CDC28-related protein kinase R2
  misc_feature (4)..(411): NCBI GI NO: 15219522 NR Description: cell division protein kinase, putative
  misc_feature (8)..(383): NCBI GI NO: 15220917 NR Description: cell division protein kinase, putative
  misc_feature (369)..(411): NCBI GI NO: 15220917 NR Description: cell division protein kinase, putative
  misc_feature (12)..(344): NCBI GI NO: 15219730 NR Description: cell division protein kinase, putative
  misc_feature (4)..(309): NCBI GI NO: 13529020 NR Description: cyclin-dependent kinase 7
  misc_feature (4)..(309): NCBI GI NO: 4502743 NR Description: cyclin-dependent kinase 7
  misc_feature (4)..(309): NCBI GI NO: 33304107 NR Description: cyclin-dependent kinase 7 [synthetic construct]
  misc_feature (4)..(309): NCBI GI NO: 2125816 NR Description: serine/threonine protein kinase [Homo sapiens]
MAELDLSKKVADRYLKREVLGEGTYGVVYKAIDTKTGQTVAIKKIRLGKQKEGVNFTALREIKLLKELKDPNIIELIDAFPHKGNLHLVFEFMETDLEAVIRDRNIVLSPSDIKSYLQMTLKGLAICHKKWVLHRDMKPNNLLIGSNGQLKLADFGLARVFGSPDRRFTHQVFARWYRAPELLFGTKQYGPGVDVWAAACIFAEFLLRRPFLQGSSDIDQLGKIFAAFGTPSASQWPDMIFLPDYVEYQHVPAPPLRSLFPMASDDALDLLSKMFTYDPKARISVPQALEHRYFSSAPLPTDPVKLSRPAPKKESKVSDVISNEGPTVLSPPRKSRRVMPGRDGSEGNSLQGDKFDDSVVSVRQAAGDNMGKNEPAPMSLDFSLFGLKPPNRPTITSADRSHLKRKLDLEF

SEQ ID NO: 6513 - protein, 319 aa, Glycine max
  peptide (1)..(319): Ceres Seq. ID no. 15170534
  misc_feature (1)..(202): Pfam Name: Pfam Description:  Protein kinase domain
  misc_feature (1)..(319): NCBI GI NO: 15419985 NR Description: CDK-activating kinase
  misc_feature (1)..(318): NCBI GI NO: 266410 NR Description: CDC2+/CDC28-related protein kinase R2
  misc_feature (1)..(319): NCBI GI NO: 15219522 NR Description: cell division protein kinase, putative
  misc_feature (1)..(291): NCBI GI NO: 15220917 NR Description: cell division protein kinase, putative
  misc_feature (277)..(319): NCBI GI NO: 15220917 NR Description: cell division protein kinase, putative
  misc_feature (1)..(252): NCBI GI NO: 15219730 NR Description: cell division protein kinase, putative
  misc_feature (1)..(217): NCBI GI NO: 13529020 NR Description: cyclin-dependent kinase 7
  misc_feature (1)..(217): NCBI GI NO: 4502743 NR Description: cyclin-dependent kinase 7
  misc_feature (1)..(217): NCBI GI NO: 33304107 NR Description: cyclin-dependent kinase 7 [synthetic construct]
  misc_feature (1)..(217): NCBI GI NO: 2125816 NR Description: serine/threonine protein kinase [Homo sapiens]
METDLEAVIRDRNIVLSPSDIKSYLQMTLKGLAICHKKWVLHRDMKPNNLLIGSNGQLKLADFGLARVFGSPDRRFTHQVFARWYRAPELLFGTKQYGPGVDVWAAACIFAEFLLRRPFLQGSSDIDQLGKIFAAFGTPSASQWPDMIFLPDYVEYQHVPAPPLRSLFPMASDDALDLLSKMFTYDPKARISVPQALEHRYFSSAPLPTDPVKLSRPAPKKESKVSDVISNEGPTVLSPPRKSRRVMPGRDGSEGNSLQGDKFDDSVVSVRQAAGDNMGKNEPAPMSLDFSLFGLKPPNRPTITSADRSHLKRKLDLEF

SEQ ID NO: 6514 - protein, 293 aa, Glycine max
  peptide (1)..(293): Ceres Seq. ID no. 15170535
  misc_feature (1)..(176): Pfam Name: Pfam Description:  Protein kinase domain
  misc_feature (1)..(293): NCBI GI NO: 15419985 NR Description: CDK-activating kinase
  misc_feature (1)..(292): NCBI GI NO: 266410 NR Description: CDC2+/CDC28-related protein kinase R2
  misc_feature (1)..(293): NCBI GI NO: 15219522 NR Description: cell division protein kinase, putative
  misc_feature (1)..(265): NCBI GI NO: 15220917 NR Description: cell division protein kinase, putative
  misc_feature (251)..(293): NCBI GI NO: 15220917 NR Description: cell division protein kinase, putative
  misc_feature (1)..(226): NCBI GI NO: 15219730 NR Description: cell division protein kinase, putative
  misc_feature (1)..(191): NCBI GI NO: 13529020 NR Description: cyclin-dependent kinase 7
  misc_feature (1)..(191): NCBI GI NO: 4502743 NR Description: cyclin-dependent kinase 7
  misc_feature (1)..(191): NCBI GI NO: 33304107 NR Description: cyclin-dependent kinase 7 [synthetic construct]
  misc_feature (1)..(191): NCBI GI NO: 2125816 NR Description: serine/threonine protein kinase [Homo sapiens]
MTLKGLAICHKKWVLHRDMKPNNLLIGSNGQLKLADFGLARVFGSPDRRFTHQVFARWYRAPELLFGTKQYGPGVDVWAAACIFAEFLLRRPFLQGSSDIDQLGKIFAAFGTPSASQWPDMIFLPDYVEYQHVPAPPLRSLFPMASDDALDLLSKMFTYDPKARISVPQALEHRYFSSAPLPTDPVKLSRPAPKKESKVSDVISNEGPTVLSPPRKSRRVMPGRDGSEGNSLQGDKFDDSVVSVRQAAGDNMGKNEPAPMSLDFSLFGLKPPNRPTITSADRSHLKRKLDLEF

SEQ ID NO: 6515 - DNA, 1095 bp, Glycine max
  misc_feature (1)..(1095): Ceres Seq. ID no. 15169749
ggagacggtagcagataagcctaaacacgaaactcgcaaattccctcaacactggagtcgctggaaaattcattctgggactcagctgagctgaccaagcatgattcaaaatggttgcattgtatcccaagggtgtgcccctctgaattctaggtcacgcaaccatggcatacctagtacctctgcctttcgttgcgcttctctaatgcctcccaaggttgccgtctctaacatccggagcttttggggacataatctggaatgtaaacccttgttgccaagaggaatgacattgacaaacacgtttgctgtatcaagcctgcgtgtaagggagggtcaaaatcatctctttcgtgctctccctcttttaccccggttgcgcaagtctaatatggcccctcgagcatcaaaggatgtcccaactagcttccgttatcctccaatgaccaagaaaccgcaatggtggtggagatcattagcatgcctcccttacctcatgcctctccatgagacatggatgtatgccgagacagcatacaatcttcacccatttttggaatgctttgaattctatacttacccttttcttatggccattggaagccttcctagctggtttctcatggcatacttctttgttgcatatcttggaattgtgaggagaaaagagtggcctcatttcttcagatttcatgttgtgatgggaatgttattggagattgccctgcaggttatagggactgtgagccgctggatgccgctatcactctactggggtaaactgggaatgcatttttggactgccgtatcatttggttatctatttaccgtcttggagtccataaggtgtgctcttgccggtatgtatgctgacattcctttcatctgtgacgcagcatatatccagataccatatgattaacaaggcagatgtaaggaagtttaagtttacattatgtatcacttttcgttgtatcagaatttttcttgagcagaattgaaggattactagtctattagtgattatgcccaaaaaaaaatgtgtttgagatttcccttgcgtacattttgtttatatgaattgactttatctgc

SEQ ID NO: 6516 - protein, 273 aa, Glycine max
  peptide (1)..(273): Ceres Seq. ID no. 15169750
  misc_feature (57)..(273): NCBI GI NO: 26449432 NR Description: unknown protein [Arabidopsis thaliana]
  misc_feature (20)..(273): NCBI GI NO: 3769673 NR Description: Tic20 [Pisum sativum]
  misc_feature (1)..(273): NCBI GI NO: 6984128 NR Description: Tic20-like protein [Euphorbia esula]
  misc_feature (92)..(253): NCBI GI NO: 15220356 NR Description: expressed protein [Arabidopsis thaliana]
  misc_feature (69)..(268): NCBI GI NO: 34393290 NR Description: putative Tic20 protein
  misc_feature (69)..(268): NCBI GI NO: 34899836 NR Description: putative Tic20 protein
  misc_feature (20)..(268): NCBI GI NO: 15236283 NR Description: chloroplast protein import component -related
  misc_feature (190)..(253): NCBI GI NO: 25406822 NR Description: hypothetical protein
MIQNGCIVSQGCAPLNSRSRNHGIPSTSAFRCASLMPPKVAVSNIRSFWGHNLECKPLLPRGMTLTNTFAVSSLRVREGQNHLFRALPLLPRLRKSNMAPRASKDVPTSFRYPPMTKKPQWWWRSLACLPYLMPLHETWMYAETAYNLHPFLECFEFYTYPFLMAIGSLPSWFLMAYFFVAYLGIVRRKEWPHFFRFHVVMGMLLEIALQVIGTVSRWMPLSLYWGKLGMHFWTAVSFGYLFTVLESIRCALAGMYADIPFICDAAYIQIPYD

SEQ ID NO: 6517 - protein, 238 aa, Glycine max
  peptide (1)..(238): Ceres Seq. ID no. 15169751
  misc_feature (22)..(238): NCBI GI NO: 26449432 NR Description: unknown protein [Arabidopsis thaliana]
  misc_feature (1)..(238): NCBI GI NO: 3769673 NR Description: Tic20 [Pisum sativum]
  misc_feature (1)..(238): NCBI GI NO: 6984128 NR Description: Tic20-like protein [Euphorbia esula]
  misc_feature (57)..(218): NCBI GI NO: 15220356 NR Description: expressed protein [Arabidopsis thaliana]
  misc_feature (34)..(233): NCBI GI NO: 34393290 NR Description: putative Tic20 protein
  misc_feature (34)..(233): NCBI GI NO: 34899836 NR Description: putative Tic20 protein
  misc_feature (1)..(233): NCBI GI NO: 15236283 NR Description: chloroplast protein import component -related
  misc_feature (155)..(218): NCBI GI NO: 25406822 NR Description: hypothetical protein
MPPKVAVSNIRSFWGHNLECKPLLPRGMTLTNTFAVSSLRVREGQNHLFRALPLLPRLRKSNMAPRASKDVPTSFRYPPMTKKPQWWWRSLACLPYLMPLHETWMYAETAYNLHPFLECFEFYTYPFLMAIGSLPSWFLMAYFFVAYLGIVRRKEWPHFFRFHVVMGMLLEIALQVIGTVSRWMPLSLYWGKLGMHFWTAVSFGYLFTVLESIRCALAGMYADIPFICDAAYIQIPYD

SEQ ID NO: 6518 - protein, 211 aa, Glycine max
  peptide (1)..(211): Ceres Seq. ID no. 15169752
  misc_feature (1)..(211): NCBI GI NO: 26449432 NR Description: unknown protein [Arabidopsis thaliana]
  misc_feature (1)..(211): NCBI GI NO: 3769673 NR Description: Tic20 [Pisum sativum]
  misc_feature (1)..(211): NCBI GI NO: 6984128 NR Description: Tic20-like protein [Euphorbia esula]
  misc_feature (30)..(191): NCBI GI NO: 15220356 NR Description: expressed protein [Arabidopsis thaliana]
  misc_feature (7)..(206): NCBI GI NO: 34393290 NR Description: putative Tic20 protein
  misc_feature (7)..(206): NCBI GI NO: 34899836 NR Description: putative Tic20 protein
  misc_feature (1)..(206): NCBI GI NO: 15236283 NR Description: chloroplast protein import component -related
  misc_feature (128)..(191): NCBI GI NO: 25406822 NR Description: hypothetical protein
MTLTNTFAVSSLRVREGQNHLFRALPLLPRLRKSNMAPRASKDVPTSFRYPPMTKKPQWWWRSLACLPYLMPLHETWMYAETAYNLHPFLECFEFYTYPFLMAIGSLPSWFLMAYFFVAYLGIVRRKEWPHFFRFHVVMGMLLEIALQVIGTVSRWMPLSLYWGKLGMHFWTAVSFGYLFTVLESIRCALAGMYADIPFICDAAYIQIPYD

SEQ ID NO: 6519 - DNA, 1124 bp, Glycine max
  misc_feature (1)..(1124): Ceres Seq. ID no. 14305409
atagtagcagcctcacattacattctgtgttactctgtgttaacatgacaacagatgataagaaggaagtttaaaatgattgtatgtatgggcgctaagttgtatatatatatatatataaagatctaagtaaaaataagttctaaactaaaattaagtttgtggcaatacagaattctcagttgtgctgaattgtgttttcaggtggaatcagatccatgatcatggtacaagtcatttaagtataatagatcctgagagaaatgccatttccatgactagcactgtgaatgcatattttggttcaaagatcctttcaccaagtacaggaatagtactgaacaatgaaatggatgatttttccatgcctagaaatgttaccaaggatgttccaccaccagctcctgccaatttcatcatgccaggaaagcggccactatcatccatgtcacccactattgcccttaaggatgggaagctaaaagctgtagtaggtgcaagtggaggtgctttcatcattggtggaactgcagaagttcttttgaatcacttcgttaaaggaatggatcctttttcttctgtaacagctccaagggtctatcatcagctactacctaacgtggttaattatgagaattggaccactttaggtgaacactttgaacttcctgctgatatcagggaagcccttaaaagtaagggtcatgtcctaaagggccttgccggtgggactatttgccaatttattgttctagacaattctgtgccgtccagacaaaataaagggattggaaatggaaagcttgtggcagtgagtgacccaagaaagggtggttttcctgcaggcttttgagataattcattgatgttgtgatatcttcatctcatctatgcaagttttctcctttgcatgattcttatactgcttgctgtattttattaatggggataaaaaatctacacaatttggcttctggttatctcaagtatctacaagtacaactactaccctgcttgttctcgtctattcaagttttcctttacatgattctcgtactgctaaatgctaattgtattgaaattaaataatgggaatgaaaaatctacacaattttcttctggtt

SEQ ID NO: 6520 - protein, 192 aa, Glycine max
  peptide (1)..(192): Ceres Seq. ID no. 14305410
  misc_feature (1)..(187): Pfam Name: Pfam Description:  Gamma-glutamyltranspeptidase
  misc_feature (1)..(192): NCBI GI NO: 28208262 NR Description: gamma-glutamyl transferase [Raphanus sativus]
  misc_feature (1)..(192): NCBI GI NO: 2129587 NR Description: gamma-glutamyltransferase (EC 2
  misc_feature (1)..(192): NCBI GI NO: 7433816 NR Description: probable gamma-glutamyltransferase (EC 2
  misc_feature (1)..(192): NCBI GI NO: 22329258 NR Description: gamma-glutamyltransferase -related
  misc_feature (1)..(192): NCBI GI NO: 38567882 NR Description: OSJNBa0036B21.10
  misc_feature (1)..(192): NCBI GI NO: 15235951 NR Description: gamma-glutamyltransferase -related
  misc_feature (1)..(192): NCBI GI NO: 27348118 NR Description: gamma-glutamyl transferase [Raphanus sativus]
  misc_feature (1)..(121): NCBI GI NO: 15222461 NR Description: gamma-glutamyltransferase
  misc_feature (1)..(191): NCBI GI NO: 34895870 NR Description: putative gamma-glutamyltransferase
  misc_feature (1)..(190): NCBI GI NO: 15233493 NR Description: gamma-glutamyltransferase-related protein
MTSTVNAYFGSKILSPSTGIVLNNEMDDFSMPRNVTKDVPPPAPANFIMPGKRPLSSMSPTIALKDGKLKAVVGASGGAFIIGGTAEVLLNHFVKGMDPFSSVTAPRVYHQLLPNVVNYENWTTLGEHFELPADIREALKSKGHVLKGLAGGTICQFIVLDNSVPSRQNKGIGNGKLVAVSDPRKGGFPAGF

SEQ ID NO: 6521 - protein, 167 aa, Glycine max
  peptide (1)..(167): Ceres Seq. ID no. 14305411
  misc_feature (1)..(162): Pfam Name: Pfam Description:  Gamma-glutamyltranspeptidase
  misc_feature (1)..(167): NCBI GI NO: 28208262 NR Description: gamma-glutamyl transferase [Raphanus sativus]
  misc_feature (1)..(167): NCBI GI NO: 2129587 NR Description: gamma-glutamyltransferase (EC 2
  misc_feature (1)..(167): NCBI GI NO: 22329258 NR Description: gamma-glutamyltransferase -related
  misc_feature (1)..(167): NCBI GI NO: 7433816 NR Description: probable gamma-glutamyltransferase (EC 2
  misc_feature (1)..(167): NCBI GI NO: 38567882 NR Description: OSJNBa0036B21.10
  misc_feature (1)..(167): NCBI GI NO: 15235951 NR Description: gamma-glutamyltransferase -related
  misc_feature (1)..(167): NCBI GI NO: 27348118 NR Description: gamma-glutamyl transferase [Raphanus sativus]
  misc_feature (1)..(96): NCBI GI NO: 15222461 NR Description: gamma-glutamyltransferase
  misc_feature (1)..(166): NCBI GI NO: 34895870 NR Description: putative gamma-glutamyltransferase
  misc_feature (1)..(165): NCBI GI NO: 15233493 NR Description: gamma-glutamyltransferase-related protein
MDDFSMPRNVTKDVPPPAPANFIMPGKRPLSSMSPTIALKDGKLKAVVGASGGAFIIGGTAEVLLNHFVKGMDPFSSVTAPRVYHQLLPNVVNYENWTTLGEHFELPADIREALKSKGHVLKGLAGGTICQFIVLDNSVPSRQNKGIGNGKLVAVSDPRKGGFPAGF

SEQ ID NO: 6522 - protein, 162 aa, Glycine max
  peptide (1)..(162): Ceres Seq. ID no. 14305412
  misc_feature (1)..(157): Pfam Name: Pfam Description:  Gamma-glutamyltranspeptidase
  misc_feature (1)..(162): NCBI GI NO: 28208262 NR Description: gamma-glutamyl transferase [Raphanus sativus]
  misc_feature (1)..(162): NCBI GI NO: 2129587 NR Description: gamma-glutamyltransferase (EC 2
  misc_feature (1)..(162): NCBI GI NO: 22329258 NR Description: gamma-glutamyltransferase -related
  misc_feature (1)..(162): NCBI GI NO: 7433816 NR Description: probable gamma-glutamyltransferase (EC 2
  misc_feature (1)..(162): NCBI GI NO: 38567882 NR Description: OSJNBa0036B21.10
  misc_feature (1)..(162): NCBI GI NO: 15235951 NR Description: gamma-glutamyltransferase -related
  misc_feature (1)..(162): NCBI GI NO: 27348118 NR Description: gamma-glutamyl transferase [Raphanus sativus]
  misc_feature (1)..(91): NCBI GI NO: 15222461 NR Description: gamma-glutamyltransferase
  misc_feature (1)..(161): NCBI GI NO: 34895870 NR Description: putative gamma-glutamyltransferase
  misc_feature (1)..(160): NCBI GI NO: 15233493 NR Description: gamma-glutamyltransferase-related protein
MPRNVTKDVPPPAPANFIMPGKRPLSSMSPTIALKDGKLKAVVGASGGAFIIGGTAEVLLNHFVKGMDPFSSVTAPRVYHQLLPNVVNYENWTTLGEHFELPADIREALKSKGHVLKGLAGGTICQFIVLDNSVPSRQNKGIGNGKLVAVSDPRKGGFPAGF

SEQ ID NO: 6523 - DNA, 1351 bp, Glycine max
  misc_feature (1)..(1351): Ceres Seq. ID no. 15226049
gtctgtggcagccacacgtcttggcagttctcttctctgattacgaaattttttcagcaaaagcaggcaatggacttcttttttaagggaatgaacagggatggatctgagtgtccctttgatgtgaaagacatccaacggtgtccgtttttaagaaacatcaatgaacctacaaacttctctttctcctcaactaaaatctccattcctgttcatggatccaagggtcctatatttgaagatggtcctagttttggcatggcatttaagctatttcatgggaaggatggagtcattcccctatctgagaaatctgactttcacaatggcagcacagaagcagattctctgcctgttttcaaccctttggcaggaagagctgcctccataagtctgtctggaccaggtggcccatttagtttttggaatttttctgagaaatggaagaagcagaagaattccgaatcatcaaataaaaaggaatactcacctcagaatggagatgtatcaaagcatgaggcacttggaaatgaatggttggccaaaggaacttgcccaattgccaagtcttatagagctgtaagcaatgttctaccccttgttgcaacagcttttcggccaccgagtggagtgaagcttagatgtccacatgcaattgttgctgcaagggctgcccttgcccgtacaacctttgtgaaaaacatgcgccctcagcctcttcctgcaaaaatgcttgttattgcagcgttaggcatggcggttaatgtgccctttggcatgtggaaggagcataccaagaaattttcattatcttggtttgtagccgtgcatgctgctgttccctttatagccatgcttcggaagtcagtggtgatgcctaaatcagcaatggcactgaccattgcagcttctatacttggacaagttattggctcaagagctgagcgaatccggctgaaaacaatagctgttgagatgggaaaagtgaaaacagagacagtatgcagcatggaaagctataatagtcccatgcaacttggtgatattagggccaatcactgtggtgctgaaggaatggtcctcaagtcgtcacttcctgtgaaggatactggttcaacttcaactgctggcgtgtgttattgatctataaagattggaaagaaatccattcaggttctatttgaacatattgatgaactggaattgtaataaaattgattaatataaataagatccttatgagctatgtataacttgaacagaaattaagacatgctgttactatgcatgcagaaatgtatatggagaattgatcgcttaattctgataaaagttgagttcgtcttaaatt

SEQ ID NO: 6524 - protein, 380 aa, Glycine max
  peptide (1)..(380): Ceres Seq. ID no. 15226050
  misc_feature (37)..(380): NCBI GI NO: 21595083 NR Description: unknown [Arabidopsis thaliana]
  misc_feature (37)..(380): NCBI GI NO: 30694759 NR Description: expressed protein [Arabidopsis thaliana]
  misc_feature (45)..(380): NCBI GI NO: 21954084 NR Description: unknown protein [Arabidopsis thaliana]
  misc_feature (24)..(348): NCBI GI NO: 37537220 NR Description: unknown protein
  misc_feature (44)..(377): NCBI GI NO: 15234866 NR Description: expressed protein [Arabidopsis thaliana]
  misc_feature (165)..(337): NCBI GI NO: 34897958 NR Description: contains ESTsAU068433
  misc_feature (44)..(175): NCBI GI NO: 34897958 NR Description: contains ESTsAU068433
  misc_feature (26)..(337): NCBI GI NO: 33146734 NR Description: unknown protein
  misc_feature (26)..(337): NCBI GI NO: 34899856 NR Description: OJ1714_H10.10
VCGSHTSWQFSSLITKFFQQKQAMDFFFKGMNRDGSECPFDVKDIQRCPFLRNINEPTNFSFSSTKISIPVHGSKGPIFEDGPSFGMAFKLFHGKDGVIPLSEKSDFHNGSTEADSLPVFNPLAGRAASISLSGPGGPFSFWNFSEKWKKQKNSESSNKKEYSPQNGDVSKHEALGNEWLAKGTCPIAKSYRAVSNVLPLVATAFRPPSGVKLRCPHAIVAARAALARTTFVKNMRPQPLPAKMLVIAALGMAVNVPFGMWKEHTKKFSLSWFVAVHAAVPFIAMLRKSVVMPKSAMALTIAASILGQVIGSRAERIRLKTIAVEMGKVKTETVCSMESYNSPMQLGDIRANHCGAEGMVLKSSLPVKDTGSTSTAGVCY

SEQ ID NO: 6525 - protein, 357 aa, Glycine max
  peptide (1)..(357): Ceres Seq. ID no. 15226051
  misc_feature (14)..(357): NCBI GI NO: 21595083 NR Description: unknown [Arabidopsis thaliana]
  misc_feature (14)..(357): NCBI GI NO: 30694759 NR Description: expressed protein [Arabidopsis thaliana]
  misc_feature (22)..(357): NCBI GI NO: 21954084 NR Description: unknown protein [Arabidopsis thaliana]
  misc_feature (1)..(325): NCBI GI NO: 37537220 NR Description: unknown protein
  misc_feature (21)..(354): NCBI GI NO: 15234866 NR Description: expressed protein [Arabidopsis thaliana]
  misc_feature (142)..(314): NCBI GI NO: 34897958 NR Description: contains ESTsAU068433
  misc_feature (21)..(152): NCBI GI NO: 34897958 NR Description: contains ESTsAU068433
  misc_feature (3)..(314): NCBI GI NO: 33146734 NR Description: unknown protein
  misc_feature (3)..(314): NCBI GI NO: 34899856 NR Description: OJ1714_H10.10
MDFFFKGMNRDGSECPFDVKDIQRCPFLRNINEPTNFSFSSTKISIPVHGSKGPIFEDGPSFGMAFKLFHGKDGVIPLSEKSDFHNGSTEADSLPVFNPLAGRAASISLSGPGGPFSFWNFSEKWKKQKNSESSNKKEYSPQNGDVSKHEALGNEWLAKGTCPIAKSYRAVSNVLPLVATAFRPPSGVKLRCPHAIVAARAALARTTFVKNMRPQPLPAKMLVIAALGMAVNVPFGMWKEHTKKFSLSWFVAVHAAVPFIAMLRKSVVMPKSAMALTIAASILGQVIGSRAERIRLKTIAVEMGKVKTETVCSMESYNSPMQLGDIRANHCGAEGMVLKSSLPVKDTGSTSTAGVCY

SEQ ID NO: 6526 - protein, 350 aa, Glycine max
  peptide (1)..(350): Ceres Seq. ID no. 15226052
  misc_feature (7)..(350): NCBI GI NO: 21595083 NR Description: unknown [Arabidopsis thaliana]
  misc_feature (7)..(350): NCBI GI NO: 30694759 NR Description: expressed protein [Arabidopsis thaliana]
  misc_feature (15)..(350): NCBI GI NO: 21954084 NR Description: unknown protein [Arabidopsis thaliana]
  misc_feature (1)..(318): NCBI GI NO: 37537220 NR Description: unknown protein
  misc_feature (14)..(347): NCBI GI NO: 15234866 NR Description: expressed protein [Arabidopsis thaliana]
  misc_feature (135)..(307): NCBI GI NO: 34897958 NR Description: contains ESTsAU068433
  misc_feature (14)..(145): NCBI GI NO: 34897958 NR Description: contains ESTsAU068433
  misc_feature (1)..(307): NCBI GI NO: 33146734 NR Description: unknown protein
  misc_feature (1)..(307): NCBI GI NO: 34899856 NR Description: OJ1714_H10.10
MNRDGSECPFDVKDIQRCPFLRNINEPTNFSFSSTKISIPVHGSKGPIFEDGPSFGMAFKLFHGKDGVIPLSEKSDFHNGSTEADSLPVFNPLAGRAASISLSGPGGPFSFWNFSEKWKKQKNSESSNKKEYSPQNGDVSKHEALGNEWLAKGTCPIAKSYRAVSNVLPLVATAFRPPSGVKLRCPHAIVAARAALARTTFVKNMRPQPLPAKMLVIAALGMAVNVPFGMWKEHTKKFSLSWFVAVHAAVPFIAMLRKSVVMPKSAMALTIAASILGQVIGSRAERIRLKTIAVEMGKVKTETVCSMESYNSPMQLGDIRANHCGAEGMVLKSSLPVKDTGSTSTAGVCY

SEQ ID NO: 6527 - DNA, 1023 bp, Glycine max
  misc_feature (1)..(1023): Ceres Seq. ID no. 15168370
ttgctacgtaggccccccccccttgttgcatcgcatcgcagtgtatctgagtaataacacggtcccgctccctctccatcccatcacaaagaaaacagagattcgcattattagcagatcggactcaaccgatgaagttgaagccgcagtgaaacaaaccagaataattgacgcatcatcaattagatcgagctgctagaaatgaaggatgaggacgggcttccgacgaccgccgccacgaagaaggaaagcatggattcgagtctgtttgggaaagggaggtacaaattctgggcgttagcggccatcttgcttctggcgttctggtccatgttcaccggcaccgtctcgctccgctggtccggcactctcaattccctttccagcgacatcgacactcccatccacgacgacctcgatgttctcgaaatggaggagagggagaaggtggtgaggcacatgtgggatgtgtacaccaacagtcgcagggtgaggttgccgaggttctggcaagaggccttcgaggctgcctatgaggatttgacgagcgatgtcactgaggtcagagacgctgccgtcaccgagatcgccaagatgtctgttcgctccattcattttgatccacctcctcttcaatccacgagtgcccgagaatttagcaagagccttaagcaagccgagaaaggaaaagatgcaacaacctaaaggggtgcttaaaggttagtgtgtggagcattcaagcgtatgcaatgtacttgaaaatgctcgagtgctaccagaagattgtgaagagagagtaatggacgaactcaactcagacttagatttgcatgtttcaatcacagggataatgatgtattttaataggctgtgtggttctttccaattttgcagtcttcacgaagtgaggagtagtaaatcgaaacacgaccttttgaacagacaaattgaactgagcatgctcttctgtttagctttattccacaacatctaaattataaatctctcatgtttctataaagt

SEQ ID NO: 6528 - protein, 167 aa, Glycine max
  peptide (1)..(167): Ceres Seq. ID no. 15168371
  misc_feature (1)..(163): NCBI GI NO: 18424975 NR Description: expressed protein [Arabidopsis thaliana]
  misc_feature (1)..(146): NCBI GI NO: 15234477 NR Description: expressed protein [Arabidopsis thaliana]
  misc_feature (1)..(147): NCBI GI NO: 9858772 NR Description: BAC19.4 [Lycopersicon esculentum]
  misc_feature (23)..(150): NCBI GI NO: 28209490 NR Description: unknown protein
  misc_feature (28)..(150): NCBI GI NO: 15222008 NR Description: expressed protein [Arabidopsis thaliana]
MKDEDGLPTTAATKKESMDSSLFGKGRYKFWALAAILLLAFWSMFTGTVSLRWSGTLNSLSSDIDTPIHDDLDVLEMEEREKVVRHMWDVYTNSRRVRLPRFWQEAFEAAYEDLTSDVTEVRDAAVTEIAKMSVRSIHFDPPPLQSTSAREFSKSLKQAEKGKDATT

SEQ ID NO: 6529 - protein, 150 aa, Glycine max
  peptide (1)..(150): Ceres Seq. ID no. 15168372
  misc_feature (1)..(146): NCBI GI NO: 18424975 NR Description: expressed protein [Arabidopsis thaliana]
  misc_feature (1)..(129): NCBI GI NO: 15234477 NR Description: expressed protein [Arabidopsis thaliana]
  misc_feature (1)..(130): NCBI GI NO: 9858772 NR Description: BAC19.4 [Lycopersicon esculentum]
  misc_feature (6)..(133): NCBI GI NO: 28209490 NR Description: unknown protein
  misc_feature (11)..(133): NCBI GI NO: 15222008 NR Description: expressed protein [Arabidopsis thaliana]
MDSSLFGKGRYKFWALAAILLLAFWSMFTGTVSLRWSGTLNSLSSDIDTPIHDDLDVLEMEEREKVVRHMWDVYTNSRRVRLPRFWQEAFEAAYEDLTSDVTEVRDAAVTEIAKMSVRSIHFDPPPLQSTSAREFSKSLKQAEKGKDATT

SEQ ID NO: 6530 - protein, 124 aa, Glycine max
  peptide (1)..(124): Ceres Seq. ID no. 15168373
  misc_feature (1)..(120): NCBI GI NO: 18424975 NR Description: expressed protein [Arabidopsis thaliana]
  misc_feature (1)..(103): NCBI GI NO: 15234477 NR Description: expressed protein [Arabidopsis thaliana]
  misc_feature (1)..(104): NCBI GI NO: 9858772 NR Description: BAC19.4 [Lycopersicon esculentum]
  misc_feature (1)..(107): NCBI GI NO: 28209490 NR Description: unknown protein
  misc_feature (1)..(107): NCBI GI NO: 15222008 NR Description: expressed protein [Arabidopsis thaliana]
MFTGTVSLRWSGTLNSLSSDIDTPIHDDLDVLEMEEREKVVRHMWDVYTNSRRVRLPRFWQEAFEAAYEDLTSDVTEVRDAAVTEIAKMSVRSIHFDPPPLQSTSAREFSKSLKQAEKGKDATT

SEQ ID NO: 6531 - DNA, 1338 bp, Glycine max
  misc_feature (1)..(1338): Ceres Seq. ID no. 13594056
ttttttttttttgccttcttttcattcctttcttttcttcaaatcaaggaactcagctatgactaccagagaaatccttcaaaagatgaaggtaaaagttggtttgggttcatcagaccctgactcagggaaaggaaagagcaagatgtcaaagaacataactcatggttatcatttggtgaaaggaaaatcatatcatgacatggaggattacgttgtggctcaatttaagcaaatagataacaatgaattgggtttgtttgcaatattcgacggccatgcgggtcagaacgtacctaattacttgcggtcccatttgtttgataatatcttacatgagcctgacttctggaaagaacctgcagatgctgtgaagagagcatacagtaaaactgattctaatattttagatatgtcgggtgaattaggtagagggggttcaactgcagttacagcaatattagtcaattgtcagaagttaatagtagccaacattggggattctagggccgtcttatgcaagaagggtgtggccaagcaactatcagtggatcatgagccaaccgcagaacatgaggatattaaaaatagaggtggttttgtatcaaactttccaggggatgttcctcgtgttgatggacggctggcagtgtcaagggcatttggtgacaaaagcttgaagaaacacttgagttcagagccatttgtgactgtggagaatataggtgatgatgcagagtttgttatattagccagtgatggattatggaaggtaatgtcaaatcaagaagcagctaattgtataaaaaatataaaggatgctcggtcttcagcaaagcgccttactgaagaagcagttaacaggaaaagcaccgatgatatctcctgcatcgttgtgaaatttcagtgatctcaaggctcgcatgatagactttgatccagcaacttgcaagtgtaacataaacttcggtgtaatgaataaaacgataatgcttcatagccatcaggtggtgttattatgttgagtcattcatgcaaattaaatgggacaactgtgttatttaaagtaataatgtgggaaagatgtagattctgattatgtatagaccaaactttaatatgtgagtttgcaaggaagtttgtcagtgatcttgaaagcttgctttcagatcactgcctaggcccataagattttagattaagttattcgattgtattattggccaacactcctacctttgttggataattagagtctagagtgtgtgggaagctttctcacaatttcttgtaatttttcagaacgaacctgggaatgaccttcaacgatatcttttc

SEQ ID NO: 6532 - protein, 302 aa, Glycine max
  peptide (1)..(302): Ceres Seq. ID no. 13594057
  misc_feature (35)..(294): Pfam Name: Pfam Description:  Protein phosphatase 2C
  misc_feature (20)..(302): NCBI GI NO: 4336436 NR Description: protein phosphatase type 2C [Lotus japonicus]
  misc_feature (20)..(302): NCBI GI NO: 15232538 NR Description: protein phosphatase 2C (PP2C), putative
  misc_feature (20)..(302): NCBI GI NO: 21539551 NR Description: putative protein phosphatase type 2C
  misc_feature (20)..(301): NCBI GI NO: 18417190 NR Description: protein phosphatase 2C (PP2C), putative
  misc_feature (20)..(301): NCBI GI NO: 23307574 NR Description: putative protein phosphatase 2C homolog
  misc_feature (20)..(302): NCBI GI NO: 18399423 NR Description: protein phosphatase 2C (PP2C), putative
  misc_feature (20)..(302): NCBI GI NO: 25411985 NR Description: probable protein phosphatase 2C
  misc_feature (49)..(301): NCBI GI NO: 7488280 NR Description: protein phosphatase 2C homolog F20O9
  misc_feature (33)..(302): NCBI GI NO: 18395099 NR Description: protein phosphatase 2C (PP2C), putative
  misc_feature (35)..(302): NCBI GI NO: 15218759 NR Description: protein phosphatase 2C (PP2C), putative
FFFLPSFHSFLFFKSRNSAMTTREILQKMKVKVGLGSSDPDSGKGKSKMSKNITHGYHLVKGKSYHDMEDYVVAQFKQIDNNELGLFAIFDGHAGQNVPNYLRSHLFDNILHEPDFWKEPADAVKRAYSKTDSNILDMSGELGRGGSTAVTAILVNCQKLIVANIGDSRAVLCKKGVAKQLSVDHEPTAEHEDIKNRGGFVSNFPGDVPRVDGRLAVSRAFGDKSLKKHLSSEPFVTVENIGDDAEFVILASDGLWKVMSNQEAANCIKNIKDARSSAKRLTEEAVNRKSTDDISCIVVKFQ

SEQ ID NO: 6533 - protein, 283 aa, Glycine max
  peptide (1)..(283): Ceres Seq. ID no. 13594058
  misc_feature (16)..(275): Pfam Name: Pfam Description:  Protein phosphatase 2C
  misc_feature (1)..(283): NCBI GI NO: 4336436 NR Description: protein phosphatase type 2C [Lotus japonicus]
  misc_feature (1)..(283): NCBI GI NO: 15232538 NR Description: protein phosphatase 2C (PP2C), putative
  misc_feature (1)..(283): NCBI GI NO: 21539551 NR Description: putative protein phosphatase type 2C
  misc_feature (1)..(282): NCBI GI NO: 18417190 NR Description: protein phosphatase 2C (PP2C), putative
  misc_feature (1)..(282): NCBI GI NO: 23307574 NR Description: putative protein phosphatase 2C homolog
  misc_feature (1)..(283): NCBI GI NO: 18399423 NR Description: protein phosphatase 2C (PP2C), putative
  misc_feature (1)..(283): NCBI GI NO: 25411985 NR Description: probable protein phosphatase 2C
  misc_feature (30)..(282): NCBI GI NO: 7488280 NR Description: protein phosphatase 2C homolog F20O9
  misc_feature (14)..(283): NCBI GI NO: 18395099 NR Description: protein phosphatase 2C (PP2C), putative
  misc_feature (16)..(283): NCBI GI NO: 15218759 NR Description: protein phosphatase 2C (PP2C), putative
MTTREILQKMKVKVGLGSSDPDSGKGKSKMSKNITHGYHLVKGKSYHDMEDYVVAQFKQIDNNELGLFAIFDGHAGQNVPNYLRSHLFDNILHEPDFWKEPADAVKRAYSKTDSNILDMSGELGRGGSTAVTAILVNCQKLIVANIGDSRAVLCKKGVAKQLSVDHEPTAEHEDIKNRGGFVSNFPGDVPRVDGRLAVSRAFGDKSLKKHLSSEPFVTVENIGDDAEFVILASDGLWKVMSNQEAANCIKNIKDARSSAKRLTEEAVNRKSTDDISCIVVKFQ

SEQ ID NO: 6534 - protein, 274 aa, Glycine max
  peptide (1)..(274): Ceres Seq. ID no. 13594059
  misc_feature (7)..(266): Pfam Name: Pfam Description:  Protein phosphatase 2C
  misc_feature (1)..(274): NCBI GI NO: 4336436 NR Description: protein phosphatase type 2C [Lotus japonicus]
  misc_feature (1)..(274): NCBI GI NO: 15232538 NR Description: protein phosphatase 2C (PP2C), putative
  misc_feature (1)..(274): NCBI GI NO: 21539551 NR Description: putative protein phosphatase type 2C
  misc_feature (1)..(273): NCBI GI NO: 18417190 NR Description: protein phosphatase 2C (PP2C), putative
  misc_feature (1)..(273): NCBI GI NO: 23307574 NR Description: putative protein phosphatase 2C homolog
  misc_feature (1)..(274): NCBI GI NO: 18399423 NR Description: protein phosphatase 2C (PP2C), putative
  misc_feature (1)..(274): NCBI GI NO: 25411985 NR Description: probable protein phosphatase 2C
  misc_feature (21)..(273): NCBI GI NO: 7488280 NR Description: protein phosphatase 2C homolog F20O9
  misc_feature (5)..(274): NCBI GI NO: 18395099 NR Description: protein phosphatase 2C (PP2C), putative
  misc_feature (7)..(274): NCBI GI NO: 15218759 NR Description: protein phosphatase 2C (PP2C), putative
MKVKVGLGSSDPDSGKGKSKMSKNITHGYHLVKGKSYHDMEDYVVAQFKQIDNNELGLFAIFDGHAGQNVPNYLRSHLFDNILHEPDFWKEPADAVKRAYSKTDSNILDMSGELGRGGSTAVTAILVNCQKLIVANIGDSRAVLCKKGVAKQLSVDHEPTAEHEDIKNRGGFVSNFPGDVPRVDGRLAVSRAFGDKSLKKHLSSEPFVTVENIGDDAEFVILASDGLWKVMSNQEAANCIKNIKDARSSAKRLTEEAVNRKSTDDISCIVVKFQ

SEQ ID NO: 6535 - DNA, 1969 bp, Glycine max
  misc_feature (1)..(1969): Ceres Seq. ID no. 15170524
aaattttcagatctacgattctctctctcttcgatggcttccacggttgttgcggccgccgtgaggagtgacgtgccgcctcggcagccggtggatccttcggcgtcgtcctcccccgacgtcgctgatcggagcgattccttcaattcctctcccaaccacttctccgacactgaaattcagttacaaactccagacgtattgaagagtgaagagtatcgccaattgttccgtcttccactggaggaagtcctcattgaagattttaattgtgccctccaggaaaacctacttattcagggtcatatgtacctctttgtcaacttcatttgtttctactcaaacatatttggatatgagacaaagaaaataatcccattccctgaagtcacaagtgtaaggagggcaaagacggctgggctctttcccaatgccattgagattctagccggaaacaagaagtacttctttgcatccttcctatcccgtgatgaagctttcaggattattaatgagggatggtcgcgacatggcaatggagccatagcaattatggaacagaaggaatcaatgtcagagtccagctgccaagagaatggatttgtagctgttgaaaatgtcaaaagttcttatataactaacaacggatcactttctactgatctgagcaaagatacggcgcttccatccattgtagatgatccattattgacggaagattcagcgaagcaatgcagtgtaaaacaggttgctgaacctgaattgaatattgatgccccaaatgctgcaagtgtgagttggaagtggaacgaggaggatattgatgccccatcaatccttgaagcatatacatgtgttgcagattcagtgtttccgataaaggttgaagacttctttaggtacttattctcagatgatgctctaaattttcttgagtcttttcgccaaaaatgtggtgataaagactttaggtgttcttcgtggcatcctcaagagaaatttgggtatgctcgtgaactgtcatttcaacatccaataaaaatttatcttggagcgaaatttggtggctgccatgaggtccagaaatttcgtgtttataggaacagtcatttggttatagagacgtcgcaagaagtcagtgatgtaccttacgcagattatttccgggttgagggactgtggagtgtagagagagacaaggatgaatcaaaagaatgctgctttttgcgggtatatgtgaatgtggcattttctaaaaaaactatttggaaaggcaaaataatacaatcaacaattgaagaatgtcgagatgcttatgcgacatggataaacatggcacatgaaatgttgaagcagaagaaccttgaaaaacaagctcaaaatggtgaaatcaatttagatagagaagtgaagactggagaatcttcagaagggtcacaggagcaaagtaaccatacaaagatactagctacttccaatgcctttgatgctactacccacaatgtcggctctcatttgccgggaaatttcatcgaaccatcatctgttccactgtttaaagagtttatgacgaagttcagatcatctttgagaagtcatagcaatctttctctgctccttattactgttgtcgctctgattttcttcattcagcagtgtagcatacttgtgctgttggctagacctcaacacatacatatgaacactcctgtagacatcacgaataggatgaacaatgaggtcactagaagtccttcagacatagcgtggttggagaaaagaattcatcacctcaaagatgaaatgtacatggttgagagtaggcttgaaaggatgcggtatgaacatttacttttaaaaaaccaactaaaggacctagaacacaagtagctaccaaatttcattgttgaatcatatccttcttatagcatttttttgtatattcatgtgatatatagatatgacattc

SEQ ID NO: 6536 - protein, 629 aa, Glycine max
  peptide (1)..(629): Ceres Seq. ID no. 15170525
  misc_feature (71)..(137): Pfam Name: Pfam Description:  GRAM domain
  misc_feature (2)..(334): NCBI GI NO: 15217621 NR Description: expressed protein [Arabidopsis thaliana]
  misc_feature (520)..(627): NCBI GI NO: 15217621 NR Description: expressed protein [Arabidopsis thaliana]
  misc_feature (351)..(429): NCBI GI NO: 15217621 NR Description: expressed protein [Arabidopsis thaliana]
  misc_feature (21)..(376): NCBI GI NO: 18086353 NR Description: At1g02120/T7I23_26 [Arabidopsis thaliana]
  misc_feature (372)..(627): NCBI GI NO: 34393622 NR Description: unknown protein
  misc_feature (72)..(484): NCBI GI NO: 39595679 NR Description: Hypothetical protein CBG12618
  misc_feature (86)..(434): NCBI GI NO: 31746594 NR Description: Hypothetical protein ZC328.3
  misc_feature (69)..(174): NCBI GI NO: 26350799 NR Description: unnamed protein product [Mus musculus]
  misc_feature (69)..(174): NCBI GI NO: 26665873 NR Description: DNA segment
  misc_feature (69)..(264): NCBI GI NO: 25012696 NR Description: RE58243p [Drosophila melanogaster]
KFSDLRFSLSSMASTVVAAAVRSDVPPRQPVDPSASSSPDVADRSDSFNSSPNHFSDTEIQLQTPDVLKSEEYRQLFRLPLEEVLIEDFNCALQENLLIQGHMYLFVNFICFYSNIFGYETKKIIPFPEVTSVRRAKTAGLFPNAIEILAGNKKYFFASFLSRDEAFRIINEGWSRHGNGAIAIMEQKESMSESSCQENGFVAVENVKSSYITNNGSLSTDLSKDTALPSIVDDPLLTEDSAKQCSVKQVAEPELNIDAPNAASVSWKWNEEDIDAPSILEAYTCVADSVFPIKVEDFFRYLFSDDALNFLESFRQKCGDKDFRCSSWHPQEKFGYARELSFQHPIKIYLGAKFGGCHEVQKFRVYRNSHLVIETSQEVSDVPYADYFRVEGLWSVERDKDESKECCFLRVYVNVAFSKKTIWKGKIIQSTIEECRDAYATWINMAHEMLKQKNLEKQAQNGEINLDREVKTGESSEGSQEQSNHTKILATSNAFDATTHNVGSHLPGNFIEPSSVPLFKEFMTKFRSSLRSHSNLSLLLITVVALIFFIQQCSILVLLARPQHIHMNTPVDITNRMNNEVTRSPSDIAWLEKRIHHLKDEMYMVESRLERMRYEHLLLKNQLKDLEHK

SEQ ID NO: 6537 - protein, 618 aa, Glycine max
  peptide (1)..(618): Ceres Seq. ID no. 15170526
  misc_feature (60)..(126): Pfam Name: Pfam Description:  GRAM domain
  misc_feature (1)..(323): NCBI GI NO: 15217621 NR Description: expressed protein [Arabidopsis thaliana]
  misc_feature (509)..(616): NCBI GI NO: 15217621 NR Description: expressed protein [Arabidopsis thaliana]
  misc_feature (340)..(418): NCBI GI NO: 15217621 NR Description: expressed protein [Arabidopsis thaliana]
  misc_feature (10)..(365): NCBI GI NO: 18086353 NR Description: At1g02120/T7I23_26 [Arabidopsis thaliana]
  misc_feature (361)..(616): NCBI GI NO: 34393622 NR Description: unknown protein
  misc_feature (61)..(473): NCBI GI NO: 39595679 NR Description: Hypothetical protein CBG12618
  misc_feature (75)..(423): NCBI GI NO: 31746594 NR Description: Hypothetical protein ZC328.3
  misc_feature (58)..(163): NCBI GI NO: 26350799 NR Description: unnamed protein product [Mus musculus]
  misc_feature (58)..(163): NCBI GI NO: 26665873 NR Description: DNA segment
  misc_feature (58)..(253): NCBI GI NO: 25012696 NR Description: RE58243p [Drosophila melanogaster]
MASTVVAAAVRSDVPPRQPVDPSASSSPDVADRSDSFNSSPNHFSDTEIQLQTPDVLKSEEYRQLFRLPLEEVLIEDFNCALQENLLIQGHMYLFVNFICFYSNIFGYETKKIIPFPEVTSVRRAKTAGLFPNAIEILAGNKKYFFASFLSRDEAFRIINEGWSRHGNGAIAIMEQKESMSESSCQENGFVAVENVKSSYITNNGSLSTDLSKDTALPSIVDDPLLTEDSAKQCSVKQVAEPELNIDAPNAASVSWKWNEEDIDAPSILEAYTCVADSVFPIKVEDFFRYLFSDDALNFLESFRQKCGDKDFRCSSWHPQEKFGYARELSFQHPIKIYLGAKFGGCHEVQKFRVYRNSHLVIETSQEVSDVPYADYFRVEGLWSVERDKDESKECCFLRVYVNVAFSKKTIWKGKIIQSTIEECRDAYATWINMAHEMLKQKNLEKQAQNGEINLDREVKTGESSEGSQEQSNHTKILATSNAFDATTHNVGSHLPGNFIEPSSVPLFKEFMTKFRSSLRSHSNLSLLLITVVALIFFIQQCSILVLLARPQHIHMNTPVDITNRMNNEVTRSPSDIAWLEKRIHHLKDEMYMVESRLERMRYEHLLLKNQLKDLEHK

SEQ ID NO: 6538 - protein, 527 aa, Glycine max
  peptide (1)..(527): Ceres Seq. ID no. 15170527
  misc_feature (1)..(232): NCBI GI NO: 15217621 NR Description: expressed protein [Arabidopsis thaliana]
  misc_feature (418)..(525): NCBI GI NO: 15217621 NR Description: expressed protein [Arabidopsis thaliana]
  misc_feature (249)..(327): NCBI GI NO: 15217621 NR Description: expressed protein [Arabidopsis thaliana]
  misc_feature (1)..(274): NCBI GI NO: 18086353 NR Description: At1g02120/T7I23_26 [Arabidopsis thaliana]
  misc_feature (270)..(525): NCBI GI NO: 34393622 NR Description: unknown protein
  misc_feature (1)..(382): NCBI GI NO: 39595679 NR Description: Hypothetical protein CBG12618
  misc_feature (1)..(332): NCBI GI NO: 31746594 NR Description: Hypothetical protein ZC328.3
  misc_feature (1)..(72): NCBI GI NO: 26350799 NR Description: unnamed protein product [Mus musculus]
  misc_feature (1)..(72): NCBI GI NO: 26665873 NR Description: DNA segment
  misc_feature (1)..(162): NCBI GI NO: 25012696 NR Description: RE58243p [Drosophila melanogaster]
MYLFVNFICFYSNIFGYETKKIIPFPEVTSVRRAKTAGLFPNAIEILAGNKKYFFASFLSRDEAFRIINEGWSRHGNGAIAIMEQKESMSESSCQENGFVAVENVKSSYITNNGSLSTDLSKDTALPSIVDDPLLTEDSAKQCSVKQVAEPELNIDAPNAASVSWKWNEEDIDAPSILEAYTCVADSVFPIKVEDFFRYLFSDDALNFLESFRQKCGDKDFRCSSWHPQEKFGYARELSFQHPIKIYLGAKFGGCHEVQKFRVYRNSHLVIETSQEVSDVPYADYFRVEGLWSVERDKDESKECCFLRVYVNVAFSKKTIWKGKIIQSTIEECRDAYATWINMAHEMLKQKNLEKQAQNGEINLDREVKTGESSEGSQEQSNHTKILATSNAFDATTHNVGSHLPGNFIEPSSVPLFKEFMTKFRSSLRSHSNLSLLLITVVALIFFIQQCSILVLLARPQHIHMNTPVDITNRMNNEVTRSPSDIAWLEKRIHHLKDEMYMVESRLERMRYEHLLLKNQLKDLEHK

SEQ ID NO: 6539 - DNA, 1278 bp, Glycine max
  misc_feature (1)..(1278): Ceres Seq. ID no. 14310616
attcccaacgaaccaacacagcctcacaagtaacaaacttataacacacactctctctctctctctctgcaatggctggaatggttcccctttgcattgcatcattggtcactctttttgttgcaacaagtgctagaattcctggggttttcaatggtggtgcatggcagggtgcccacgccactttctacggtggaaatgatgcctctggaacaatgggtggggcatgtgggtacgggaacctatacagccaagggtatggcgtgaacaccgcggccttgagcacggcgctgttcaacaacgggttgagctgcggcgcgtgcttcgagataaagtgcgaccaagatccgaggtggtgcaacccgggaagcccttccatcgtcatcaccgccacgaatttttgccctcccaactttgcccttcccagcgacaacggcggctggtgcaaccctcctcggccccacttcgacctcgccatgcccatgttcctcaagatcgctcagtataaagccggcatcgtgcccgtcagttaccgccgggttccatgcagaaaggtcggtggaatcagatttacgatcaacggttttcgttacttcaacttggttctaatcaccaacgtggcgggtgcaggggatatcgcgcgcgtgagcgttaaaggttccaaaaccgggtggaacagcatgagcagaaactgggggcaaaattggcaatcaaacgcgaatttagtgggccaggccctttccttcagagtcacgggcagtgacagacgcacctcaacctcttggaacgtggcaccttctcattggaagttcggccagaccttcacgggcaagaatttccgcgtctgaaaaaaataacaaaatttaaacatggatgtttgtttttgtagttgcgttttggttttttagttttcccgcgttcaactttccctctattttcccgggaaagtttgaagccgtgttttggtttaagtgtgtagtaggggacagaaagtaagagaagggtagataaggtaaaatgaaagtgactttactataaatgctagtagtgggtgtgagtagatgtttctaccaccttttgttattggagggtgaatttgtgtgatattaattattactaaagtgtattgggtgttgctggcaatatttattacccagcaatgctttttgttgacttggtgggggctgaggaggctgcaaggttcatgtagcccgcatctcctttattatgaactagaaacattatattatgtaatatctttcagttataatgcatgcc

SEQ ID NO: 6540 - protein, 258 aa, Glycine max
  peptide (1)..(258): Ceres Seq. ID no. 14310617
  misc_feature (165)..(242): Pfam Name: Pfam Description:  Pollen allergen
  misc_feature (1)..(258): NCBI GI NO: 1076531 NR Description: pollen allergen homolog, hypothetical
  misc_feature (1)..(258): NCBI GI NO: 29467509 NR Description: expansin [Pyrus communis]
  misc_feature (1)..(258): NCBI GI NO: 27464179 NR Description: expansin [Glycine max]
  misc_feature (7)..(258): NCBI GI NO: 21314549 NR Description: alpha-expansin precursor [Gossypium hirsutum]
  misc_feature (7)..(258): NCBI GI NO: 16923359 NR Description: alpha-expansin 6 precursor [Cucumis sativus]
  misc_feature (5)..(258): NCBI GI NO: 29466643 NR Description: expansin [Prunus persica]
  misc_feature (5)..(258): NCBI GI NO: 13898655 NR Description: expansin [Prunus cerasus]
  misc_feature (1)..(258): NCBI GI NO: 38046726 NR Description: alpha-expansin 1
  misc_feature (8)..(258): NCBI GI NO: 40217876 NR Description: expansin-1 [Petunia x hybrida]
  misc_feature (1)..(258): NCBI GI NO: 20502784 NR Description: expansin 11 precursor [Rumex palustris]
MAGMVPLCIASLVTLFVATSARIPGVFNGGAWQGAHATFYGGNDASGTMGGACGYGNLYSQGYGVNTAALSTALFNNGLSCGACFEIKCDQDPRWCNPGSPSIVITATNFCPPNFALPSDNGGWCNPPRPHFDLAMPMFLKIAQYKAGIVPVSYRRVPCRKVGGIRFTINGFRYFNLVLITNVAGAGDIARVSVKGSKTGWNSMSRNWGQNWQSNANLVGQALSFRVTGSDRRTSTSWNVAPSHWKFGQTFTGKNFRV

SEQ ID NO: 6541 - protein, 255 aa, Glycine max
  peptide (1)..(255): Ceres Seq. ID no. 14310618
  misc_feature (162)..(239): Pfam Name: Pfam Description:  Pollen allergen
  misc_feature (1)..(255): NCBI GI NO: 1076531 NR Description: pollen allergen homolog, hypothetical
  misc_feature (1)..(255): NCBI GI NO: 29467509 NR Description: expansin [Pyrus communis]
  misc_feature (1)..(255): NCBI GI NO: 27464179 NR Description: expansin [Glycine max]
  misc_feature (4)..(255): NCBI GI NO: 21314549 NR Description: alpha-expansin precursor [Gossypium hirsutum]
  misc_feature (4)..(255): NCBI GI NO: 16923359 NR Description: alpha-expansin 6 precursor [Cucumis sativus]
  misc_feature (2)..(255): NCBI GI NO: 29466643 NR Description: expansin [Prunus persica]
  misc_feature (2)..(255): NCBI GI NO: 13898655 NR Description: expansin [Prunus cerasus]
  misc_feature (1)..(255): NCBI GI NO: 38046726 NR Description: alpha-expansin 1
  misc_feature (5)..(255): NCBI GI NO: 40217876 NR Description: expansin-1 [Petunia x hybrida]
  misc_feature (1)..(255): NCBI GI NO: 20502784 NR Description: expansin 11 precursor [Rumex palustris]
MVPLCIASLVTLFVATSARIPGVFNGGAWQGAHATFYGGNDASGTMGGACGYGNLYSQGYGVNTAALSTALFNNGLSCGACFEIKCDQDPRWCNPGSPSIVITATNFCPPNFALPSDNGGWCNPPRPHFDLAMPMFLKIAQYKAGIVPVSYRRVPCRKVGGIRFTINGFRYFNLVLITNVAGAGDIARVSVKGSKTGWNSMSRNWGQNWQSNANLVGQALSFRVTGSDRRTSTSWNVAPSHWKFGQTFTGKNFRV

SEQ ID NO: 6542 - protein, 210 aa, Glycine max
  peptide (1)..(210): Ceres Seq. ID no. 14310619
  misc_feature (117)..(194): Pfam Name: Pfam Description:  Pollen allergen
  misc_feature (1)..(210): NCBI GI NO: 1076531 NR Description: pollen allergen homolog, hypothetical
  misc_feature (1)..(210): NCBI GI NO: 29467509 NR Description: expansin [Pyrus communis]
  misc_feature (1)..(210): NCBI GI NO: 27464179 NR Description: expansin [Glycine max]
  misc_feature (1)..(210): NCBI GI NO: 21314549 NR Description: alpha-expansin precursor [Gossypium hirsutum]
  misc_feature (1)..(210): NCBI GI NO: 16923359 NR Description: alpha-expansin 6 precursor [Cucumis sativus]
  misc_feature (1)..(210): NCBI GI NO: 29466643 NR Description: expansin [Prunus persica]
  misc_feature (1)..(210): NCBI GI NO: 13898655 NR Description: expansin [Prunus cerasus]
  misc_feature (1)..(210): NCBI GI NO: 38046726 NR Description: alpha-expansin 1
  misc_feature (1)..(210): NCBI GI NO: 40217876 NR Description: expansin-1 [Petunia x hybrida]
  misc_feature (1)..(210): NCBI GI NO: 20502784 NR Description: expansin 11 precursor [Rumex palustris]
MGGACGYGNLYSQGYGVNTAALSTALFNNGLSCGACFEIKCDQDPRWCNPGSPSIVITATNFCPPNFALPSDNGGWCNPPRPHFDLAMPMFLKIAQYKAGIVPVSYRRVPCRKVGGIRFTINGFRYFNLVLITNVAGAGDIARVSVKGSKTGWNSMSRNWGQNWQSNANLVGQALSFRVTGSDRRTSTSWNVAPSHWKFGQTFTGKNFRV

SEQ ID NO: 6543 - DNA, 1355 bp, Glycine max
  misc_feature (1)..(1355): Ceres Seq. ID no. 14311981
tcaagccaaagtcttgtgcttttcacatccccattttcccatttccctttctgcttcctctttcgccaaatgggtctcccataacacaatcttcacctttttttttcctctttctttcttcttcgcttctcggtggggcttcaagtttcaccataggatgttttctaggttgatacatcctcatgaagggcaggaagacatgcagggtggctccaatcacgctcacctcggagacccttgtcttgttttaacctccgatcccaaacctcgtcttcgttggaccgctgaccttcatgaacgctttgttgatgctgtcactcaacttgggggtgccagtaaagccactccaaaagcaatcatgaggaccatgaatgtcaagggtttgacgctctatcatttgaagagtcatcttcagaagtacaggctaggtaagcaatcaggaaaagattctgatgagggatgcaaagatgcttcatatcttcaagaaagccctggtactgataactcttctccaaagttaccagatgctaacgagggtcatgaagtcaaggaggcattaagagcacagatggaagtgcaaagtaaactacacttactagtggaggcagagaagcacttgcaaattcgccaggatgcagagcgaagatacatgggcatgcttgagcgagcgtgtaagatgttggcagatcaatttattggggatgtaactattgacatggacggccaaaaatttcaagggctggaaagcaaaacatcccagaagttccctagttgatcacgttggcttttatccccaagcgtgtactgaggtcggcggaatgcatgcttcagtagtatcacctattcttcaacctcaaggggctgactgtttcactgaaagttgcctaacatcacttgagagtctgggagggttgacactagaagaatctcctggcggatcgaagaagaggatgctgaacttggactcgatggtagcacctttgatctggagtgaagccaacaccagaactcaaggaattcatttagccaaagttaatccttcaggaatgactaggtacggcatgtaggtagggtagggaaggttagttcctcatgaagagagtttatgacattgtgctttgtcccaagcttttaggattaagtactgagtagggaaggttagctcctcatgaagagagttcatgacattgtgctttgccccaagcttttaggattaagtactgagttagattattatcggttgttgtccattaagttggtgagaatcaacttatctcacatcattgtgtaaattgaaatactatatggcttaacttggcccgtcactaaatgttggcgctgaccatttatgatcg

SEQ ID NO: 6544 - protein, 257 aa, Glycine max
  peptide (1)..(257): Ceres Seq. ID no. 14311982
  misc_feature (90)..(141): Pfam Name: Pfam Description:  Myb-like DNA-binding domain
  misc_feature (53)..(240): NCBI GI NO: 29647444 NR Description: P0410E11.32
  misc_feature (61)..(230): NCBI GI NO: 18404044 NR Description: transfactor -related [Arabidopsis thaliana]
  misc_feature (78)..(252): NCBI GI NO: 18414049 NR Description: expressed protein [Arabidopsis thaliana]
  misc_feature (77)..(230): NCBI GI NO: 11994231 NR Description: contains similarity to transfactor~gene_id:MUJ8.2
  misc_feature (77)..(236): NCBI GI NO: 25406584 NR Description: hypothetical protein T8K14.15
  misc_feature (77)..(236): NCBI GI NO: 30699418 NR Description: transfactor -related [Arabidopsis thaliana]
  misc_feature (78)..(252): NCBI GI NO: 7485694 NR Description: hypothetical protein F18A5
  misc_feature (77)..(257): NCBI GI NO: 6223653 NR Description: transfactor-like [Arabidopsis thaliana]
  misc_feature (77)..(256): NCBI GI NO: 14596181 NR Description: transfactor-like protein [Arabidopsis thaliana]
  misc_feature (77)..(256): NCBI GI NO: 28059694 NR Description: transfactor-like protein [Arabidopsis thaliana]
QAKVLCFSHPHFPISLSASSFAKWVSHNTIFTFFFPLSFFFASRWGFKFHHRMFSRLIHPHEGQEDMQGGSNHAHLGDPCLVLTSDPKPRLRWTADLHERFVDAVTQLGGASKATPKAIMRTMNVKGLTLYHLKSHLQKYRLGKQSGKDSDEGCKDASYLQESPGTDNSSPKLPDANEGHEVKEALRAQMEVQSKLHLLVEAEKHLQIRQDAERRYMGMLERACKMLADQFIGDVTIDMDGQKFQGLESKTSQKFPS

SEQ ID NO: 6545 - protein, 205 aa, Glycine max
  peptide (1)..(205): Ceres Seq. ID no. 14311983
  misc_feature (38)..(89): Pfam Name: Pfam Description:  Myb-like DNA-binding domain
  misc_feature (1)..(188): NCBI GI NO: 29647444 NR Description: P0410E11.32
  misc_feature (9)..(178): NCBI GI NO: 18404044 NR Description: transfactor -related [Arabidopsis thaliana]
  misc_feature (26)..(200): NCBI GI NO: 18414049 NR Description: expressed protein [Arabidopsis thaliana]
  misc_feature (25)..(178): NCBI GI NO: 11994231 NR Description: contains similarity to transfactor~gene_id:MUJ8.2
  misc_feature (25)..(184): NCBI GI NO: 25406584 NR Description: hypothetical protein T8K14.15
  misc_feature (25)..(184): NCBI GI NO: 30699418 NR Description: transfactor -related [Arabidopsis thaliana]
  misc_feature (26)..(200): NCBI GI NO: 7485694 NR Description: hypothetical protein F18A5
  misc_feature (25)..(205): NCBI GI NO: 6223653 NR Description: transfactor-like [Arabidopsis thaliana]
  misc_feature (25)..(204): NCBI GI NO: 14596181 NR Description: transfactor-like protein [Arabidopsis thaliana]
  misc_feature (25)..(204): NCBI GI NO: 28059694 NR Description: transfactor-like protein [Arabidopsis thaliana]
MFSRLIHPHEGQEDMQGGSNHAHLGDPCLVLTSDPKPRLRWTADLHERFVDAVTQLGGASKATPKAIMRTMNVKGLTLYHLKSHLQKYRLGKQSGKDSDEGCKDASYLQESPGTDNSSPKLPDANEGHEVKEALRAQMEVQSKLHLLVEAEKHLQIRQDAERRYMGMLERACKMLADQFIGDVTIDMDGQKFQGLESKTSQKFPS

SEQ ID NO: 6546 - protein, 191 aa, Glycine max
  peptide (1)..(191): Ceres Seq. ID no. 14311984
  misc_feature (24)..(75): Pfam Name: Pfam Description:  Myb-like DNA-binding domain
  misc_feature (1)..(174): NCBI GI NO: 29647444 NR Description: P0410E11.32
  misc_feature (1)..(164): NCBI GI NO: 18404044 NR Description: transfactor -related [Arabidopsis thaliana]
  misc_feature (12)..(186): NCBI GI NO: 18414049 NR Description: expressed protein [Arabidopsis thaliana]
  misc_feature (11)..(164): NCBI GI NO: 11994231 NR Description: contains similarity to transfactor~gene_id:MUJ8.2
  misc_feature (11)..(170): NCBI GI NO: 25406584 NR Description: hypothetical protein T8K14.15
  misc_feature (11)..(170): NCBI GI NO: 30699418 NR Description: transfactor -related [Arabidopsis thaliana]
  misc_feature (12)..(186): NCBI GI NO: 7485694 NR Description: hypothetical protein F18A5
  misc_feature (11)..(191): NCBI GI NO: 6223653 NR Description: transfactor-like [Arabidopsis thaliana]
  misc_feature (11)..(190): NCBI GI NO: 14596181 NR Description: transfactor-like protein [Arabidopsis thaliana]
  misc_feature (11)..(190): NCBI GI NO: 15238770 NR Description: transfactor-related protein [Arabidopsis thaliana]
MQGGSNHAHLGDPCLVLTSDPKPRLRWTADLHERFVDAVTQLGGASKATPKAIMRTMNVKGLTLYHLKSHLQKYRLGKQSGKDSDEGCKDASYLQESPGTDNSSPKLPDANEGHEVKEALRAQMEVQSKLHLLVEAEKHLQIRQDAERRYMGMLERACKMLADQFIGDVTIDMDGQKFQGLESKTSQKFPS

SEQ ID NO: 6547 - DNA, 1413 bp, Glycine max
  misc_feature (1)..(1413): Ceres Seq. ID no. 14309674
gagtgtatgaaatgacccagtactcagaaggtgaagggagtaagtgagaactgagaacttctaagaaacgccgccaatggcgcatcgctcactcttcctctctctcagacgaaatagcggtttagcttgtgtcctgaacagaacaagattcgtgtcttcgggtgctgtgagcagtgatttggtggaagagagtgtggaaggtgatgatgacctaaggagcagaatcttcaggcttaggctccccaagcgaagcgccaccaacgttcttcagaaatgggtcctccaagggaatcctattacgctctctcagcttcgggatatatccaaagagcttcgaagatctcaacgttacaaacacgctttggagatatcagagtggatggttagcaatgaggaatatgagttatcagactctgattatgcagtccgcatagatttgatgacccaagtttttggcattgatgctgcagagcgctactttgagggtctacctcttgctacaaagactactgaaacatacacagcactcctccattcttacgcaggagcaaaattgactgaaaaggctgaggaactttatcaaaggataaaggattcaaacctttcctttgatgctcttacttacaatgaaatgatgactctttacatgtcagtggggcagtttgaaaaggtccctatagttgttgaagaactgaaacaacaaaaggtttcccctgatatctttacttacaatctatggataagttcctgtgccgctattcttaatatcgatgaagttaggaggattcttgatgaaatgagtcacggtgctggttctaatgaaagttggatcagatatttgaacctggccaatatatatattagtgtagctcatcttgataatgcaagttccaacacacttgttgagactgagaaaaggatcacccaaaggcaatggataacttatgacttcttaatcattctttatggtgggttgggaagtaaggataaacttgatcagatatggaattccttgggaatgaccaaacagaaaatgattagcaggaattacatgtgcatcatttcttcctatctgatgcttggtcttacgaaagaagtgggtgaagttattgatcaatggaagcaatcaacgaccacggattttgatatgcttgcctgtaaaaagattttggttgcttttagggacattggcttagctgaaatagccaacaacttgaatgtgattctcattgagaagaacctcagtcttggaagtgattaactaggagttctctgagcatgaatgtaatatagaatatatatagatttgagatcaattttgcaacttcggaagggaaaatatatttcatttgaaatttgttaatccatcccgaatgaataaatatgctgtgtgaatggaagtcttgcaatgct

SEQ ID NO: 6548 - protein, 394 aa, Glycine max
  peptide (1)..(394): Ceres Seq. ID no. 14309675
  misc_feature (181)..(215): Pfam Name: Pfam Description:  PPR repeat
  misc_feature (1)..(394): NCBI GI NO: 18415979 NR Description: pentatricopeptide (PPR) repeat-containing protein
  misc_feature (1)..(394): NCBI GI NO: 21592522 NR Description: unknown [Arabidopsis thaliana]
  misc_feature (1)..(394): NCBI GI NO: 9955532 NR Description: putative protein [Arabidopsis thaliana]
  misc_feature (29)..(393): NCBI GI NO: 21740710 NR Description: OSJNBa0086B14.3
  misc_feature (29)..(354): NCBI GI NO: 15235508 NR Description: pentatricopeptide (PPR) repeat-containing protein
  misc_feature (29)..(354): NCBI GI NO: 17064738 NR Description: Unknown protein [Arabidopsis thaliana]
  misc_feature (16)..(387): NCBI GI NO: 15240937 NR Description: pentatricopeptide (PPR) repeat-containing protein
  misc_feature (44)..(387): NCBI GI NO: 15225409 NR Description: pentatricopeptide (PPR) repeat-containing protein
  misc_feature (49)..(348): NCBI GI NO: 22329290 NR Description: pentatricopeptide (PPR) repeat-containing protein
  misc_feature (49)..(348): NCBI GI NO: 20453085 NR Description: At1g02150/T7I23.8 [Arabidopsis thaliana]
MAHRSLFLSLRRNSGLACVLNRTRFVSSGAVSSDLVEESVEGDDDLRSRIFRLRLPKRSATNVLQKWVLQGNPITLSQLRDISKELRRSQRYKHALEISEWMVSNEEYELSDSDYAVRIDLMTQVFGIDAAERYFEGLPLATKTTETYTALLHSYAGAKLTEKAEELYQRIKDSNLSFDALTYNEMMTLYMSVGQFEKVPIVVEELKQQKVSPDIFTYNLWISSCAAILNIDEVRRILDEMSHGAGSNESWIRYLNLANIYISVAHLDNASSNTLVETEKRITQRQWITYDFLIILYGGLGSKDKLDQIWNSLGMTKQKMISRNYMCIISSYLMLGLTKEVGEVIDQWKQSTTTDFDMLACKKILVAFRDIGLAEIANNLNVILIEKNLSLGSD

SEQ ID NO: 6549 - protein, 293 aa, Glycine max
  peptide (1)..(293): Ceres Seq. ID no. 14309676
  misc_feature (80)..(114): Pfam Name: Pfam Description:  PPR repeat
  misc_feature (1)..(293): NCBI GI NO: 18415979 NR Description: pentatricopeptide (PPR) repeat-containing protein
  misc_feature (1)..(293): NCBI GI NO: 21592522 NR Description: unknown [Arabidopsis thaliana]
  misc_feature (1)..(293): NCBI GI NO: 9955532 NR Description: putative protein [Arabidopsis thaliana]
  misc_feature (1)..(292): NCBI GI NO: 21740710 NR Description: OSJNBa0086B14.3
  misc_feature (1)..(253): NCBI GI NO: 15235508 NR Description: pentatricopeptide (PPR) repeat-containing protein
  misc_feature (1)..(253): NCBI GI NO: 17064738 NR Description: Unknown protein [Arabidopsis thaliana]
  misc_feature (1)..(286): NCBI GI NO: 15240937 NR Description: pentatricopeptide (PPR) repeat-containing protein
  misc_feature (1)..(286): NCBI GI NO: 15225409 NR Description: pentatricopeptide (PPR) repeat-containing protein
  misc_feature (1)..(247): NCBI GI NO: 22329290 NR Description: pentatricopeptide (PPR) repeat-containing protein
  misc_feature (1)..(247): NCBI GI NO: 20453085 NR Description: At1g02150/T7I23.8 [Arabidopsis thaliana]
MVSNEEYELSDSDYAVRIDLMTQVFGIDAAERYFEGLPLATKTTETYTALLHSYAGAKLTEKAEELYQRIKDSNLSFDALTYNEMMTLYMSVGQFEKVPIVVEELKQQKVSPDIFTYNLWISSCAAILNIDEVRRILDEMSHGAGSNESWIRYLNLANIYISVAHLDNASSNTLVETEKRITQRQWITYDFLIILYGGLGSKDKLDQIWNSLGMTKQKMISRNYMCIISSYLMLGLTKEVGEVIDQWKQSTTTDFDMLACKKILVAFRDIGLAEIANNLNVILIEKNLSLGSD

SEQ ID NO: 6550 - protein, 273 aa, Glycine max
  peptide (1)..(273): Ceres Seq. ID no. 14309677
  misc_feature (60)..(94): Pfam Name: Pfam Description:  PPR repeat
  misc_feature (1)..(273): NCBI GI NO: 18415979 NR Description: pentatricopeptide (PPR) repeat-containing protein
  misc_feature (1)..(273): NCBI GI NO: 21592522 NR Description: unknown [Arabidopsis thaliana]
  misc_feature (1)..(273): NCBI GI NO: 9955532 NR Description: putative protein [Arabidopsis thaliana]
  misc_feature (1)..(272): NCBI GI NO: 21740710 NR Description: OSJNBa0086B14.3
  misc_feature (1)..(233): NCBI GI NO: 15235508 NR Description: pentatricopeptide (PPR) repeat-containing protein
  misc_feature (1)..(233): NCBI GI NO: 17064738 NR Description: Unknown protein [Arabidopsis thaliana]
  misc_feature (1)..(266): NCBI GI NO: 15240937 NR Description: pentatricopeptide (PPR) repeat-containing protein
  misc_feature (1)..(266): NCBI GI NO: 15225409 NR Description: pentatricopeptide (PPR) repeat-containing protein
  misc_feature (1)..(227): NCBI GI NO: 22329290 NR Description: pentatricopeptide (PPR) repeat-containing protein
  misc_feature (1)..(227): NCBI GI NO: 20453085 NR Description: At1g02150/T7I23.8 [Arabidopsis thaliana]
MTQVFGIDAAERYFEGLPLATKTTETYTALLHSYAGAKLTEKAEELYQRIKDSNLSFDALTYNEMMTLYMSVGQFEKVPIVVEELKQQKVSPDIFTYNLWISSCAAILNIDEVRRILDEMSHGAGSNESWIRYLNLANIYISVAHLDNASSNTLVETEKRITQRQWITYDFLIILYGGLGSKDKLDQIWNSLGMTKQKMISRNYMCIISSYLMLGLTKEVGEVIDQWKQSTTTDFDMLACKKILVAFRDIGLAEIANNLNVILIEKNLSLGSD

SEQ ID NO: 6551 - DNA, 1194 bp, Glycine max
  misc_feature (1)..(1194): Ceres Seq. ID no. 14308660
gaattttactttggctgtgaaaatgtatcaaaactgcttgcggaagttttatcataacacagactctcaaatacttctatatttagctcgtacacattacgaggctgaacagtggcaagactgtataaaaactctactgagggccatacatttggcaccctcaaactataccttaaggtttgatgcaggggttgcaatgcaaaagttttcagcatcaacactacaaaaagcaaagaggactgcagatgaggtaagagcaactgttgctgagcttcaaaatgctgttcgtgtatttagtcagttgtctgctgcttccaatctacatattcacgggtttgatgagaagaaaattgacacacatgttggatactgcaaccacttactttcggctgcaaaagttcatcttgaagcagctgagcatgaagagcagcaagtacggcaaagacaagaacttgctcgtcaggttgcattggctgaggaagcccggcgaaaggctgaagagcaaaggaaatttcagatggaaaggggaaaacaagaagacgagctaaagcgtgtgcaaaaacaggaggaacattttaggcgtgttaaggagcaatggaagagcagcagtcattcaaaacggagagaaagatcagacgatgaagagggagggactggtgagaagaagagaaaaaaaggtggaaaacggagaaaaaaggataagcactctaaattgcgctatgacgcagaggaaccagaagatgatttgatggatgaacagggaatggaggatgaagaagctgatataaactacagagaggagccccaaactcagatgaatgatgatgctgaggaaaatgctcagggtcttcttgcagcggctgggcttgaagattctgatgcagatgaggaaacagctgcaccttcctcaagcatagcccgacgaaggcaagcattatcggaatctgatgatgacgaaccattattacaaaggcagtcaagtccagtaagacaaaactctgctgatatgcagttgagtgatggagaaataagggatggggataagacaaatggagatgatggcaatgatgaggagaaacaatattgaccctacaggttagtctttaatatccgccaagtgattttgtaagagtgataacattatttaaattttatgtatatatacttgaaaaattttaaaaaaaggttttattc

SEQ ID NO: 6552 - protein, 361 aa, Glycine max
  peptide (1)..(361): Ceres Seq. ID no. 14308661
  misc_feature (22)..(55): Pfam Name: Pfam Description:  TPR Domain
  misc_feature (1)..(358): NCBI GI NO: 25411225 NR Description: probable TPR repeat nuclear phosphoprotein
  misc_feature (2)..(340): NCBI GI NO: 23095913 NR Description: putative TPR-containing nuclear phosphoprotein
  misc_feature (84)..(340): NCBI GI NO: 34901616 NR Description: putative TPR-containing nuclear phosphoprotein
  misc_feature (5)..(360): NCBI GI NO: 7661950 NR Description: SH2 domain binding protein 1
  misc_feature (5)..(360): NCBI GI NO: 40788884 NR Description: KIAA0155 [Homo sapiens]
  misc_feature (5)..(359): NCBI GI NO: 34858978 NR Description: similar to phosphoprotein [Rattus norvegicus]
  misc_feature (5)..(359): NCBI GI NO: 6678441 NR Description: SH2 domain binding protein 1
  misc_feature (9)..(270): NCBI GI NO: 34901616 NR Description: putative TPR-containing nuclear phosphoprotein
  misc_feature (5)..(249): NCBI GI NO: 31753133 NR Description: Unknown (protein for IMAGE:30058591)
  misc_feature (10)..(360): NCBI GI NO: 26006103 NR Description: mKIAA0155 protein [Mus musculus]
NFTLAVKMYQNCLRKFYHNTDSQILLYLARTHYEAEQWQDCIKTLLRAIHLAPSNYTLRFDAGVAMQKFSASTLQKAKRTADEVRATVAELQNAVRVFSQLSAASNLHIHGFDEKKIDTHVGYCNHLLSAAKVHLEAAEHEEQQVRQRQELARQVALAEEARRKAEEQRKFQMERGKQEDELKRVQKQEEHFRRVKEQWKSSSHSKRRERSDDEEGGTGEKKRKKGGKRRKKDKHSKLRYDAEEPEDDLMDEQGMEDEEADINYREEPQTQMNDDAEENAQGLLAAAGLEDSDADEETAAPSSSIARRRQALSESDDDEPLLQRQSSPVRQNSADMQLSDGEIRDGDKTNGDDGNDEEKQY

SEQ ID NO: 6553 - protein, 354 aa, Glycine max
  peptide (1)..(354): Ceres Seq. ID no. 14308662
  misc_feature (15)..(48): Pfam Name: Pfam Description:  TPR Domain
  misc_feature (1)..(351): NCBI GI NO: 25411225 NR Description: probable TPR repeat nuclear phosphoprotein
  misc_feature (1)..(333): NCBI GI NO: 23095913 NR Description: putative TPR-containing nuclear phosphoprotein
  misc_feature (77)..(333): NCBI GI NO: 34901616 NR Description: putative TPR-containing nuclear phosphoprotein
  misc_feature (1)..(353): NCBI GI NO: 7661950 NR Description: SH2 domain binding protein 1
  misc_feature (1)..(353): NCBI GI NO: 40788884 NR Description: KIAA0155 [Homo sapiens]
  misc_feature (1)..(352): NCBI GI NO: 34858978 NR Description: similar to phosphoprotein [Rattus norvegicus]
  misc_feature (1)..(352): NCBI GI NO: 6678441 NR Description: SH2 domain binding protein 1
  misc_feature (2)..(263): NCBI GI NO: 34901616 NR Description: putative TPR-containing nuclear phosphoprotein
  misc_feature (1)..(242): NCBI GI NO: 31753133 NR Description: Unknown (protein for IMAGE:30058591)
  misc_feature (3)..(353): NCBI GI NO: 26006103 NR Description: mKIAA0155 protein [Mus musculus]
MYQNCLRKFYHNTDSQILLYLARTHYEAEQWQDCIKTLLRAIHLAPSNYTLRFDAGVAMQKFSASTLQKAKRTADEVRATVAELQNAVRVFSQLSAASNLHIHGFDEKKIDTHVGYCNHLLSAAKVHLEAAEHEEQQVRQRQELARQVALAEEARRKAEEQRKFQMERGKQEDELKRVQKQEEHFRRVKEQWKSSSHSKRRERSDDEEGGTGEKKRKKGGKRRKKDKHSKLRYDAEEPEDDLMDEQGMEDEEADINYREEPQTQMNDDAEENAQGLLAAAGLEDSDADEETAAPSSSIARRRQALSESDDDEPLLQRQSSPVRQNSADMQLSDGEIRDGDKTNGDDGNDEEKQY

SEQ ID NO: 6554 - protein, 296 aa, Glycine max
  peptide (1)..(296): Ceres Seq. ID no. 14308663
  misc_feature (76)..(295): Pfam Name: Pfam Description:  Caldesmon
  misc_feature (1)..(293): NCBI GI NO: 25411225 NR Description: probable TPR repeat nuclear phosphoprotein
  misc_feature (1)..(275): NCBI GI NO: 23095913 NR Description: putative TPR-containing nuclear phosphoprotein
  misc_feature (19)..(275): NCBI GI NO: 34901616 NR Description: putative TPR-containing nuclear phosphoprotein
  misc_feature (1)..(295): NCBI GI NO: 7661950 NR Description: SH2 domain binding protein 1
  misc_feature (1)..(295): NCBI GI NO: 40788884 NR Description: KIAA0155 [Homo sapiens]
  misc_feature (1)..(294): NCBI GI NO: 34858978 NR Description: similar to phosphoprotein [Rattus norvegicus]
  misc_feature (1)..(294): NCBI GI NO: 6678441 NR Description: SH2 domain binding protein 1
  misc_feature (1)..(205): NCBI GI NO: 34901616 NR Description: putative TPR-containing nuclear phosphoprotein
  misc_feature (1)..(184): NCBI GI NO: 31753133 NR Description: Unknown (protein for IMAGE:30058591)
  misc_feature (1)..(295): NCBI GI NO: 26006103 NR Description: mKIAA0155 protein [Mus musculus]
MQKFSASTLQKAKRTADEVRATVAELQNAVRVFSQLSAASNLHIHGFDEKKIDTHVGYCNHLLSAAKVHLEAAEHEEQQVRQRQELARQVALAEEARRKAEEQRKFQMERGKQEDELKRVQKQEEHFRRVKEQWKSSSHSKRRERSDDEEGGTGEKKRKKGGKRRKKDKHSKLRYDAEEPEDDLMDEQGMEDEEADINYREEPQTQMNDDAEENAQGLLAAAGLEDSDADEETAAPSSSIARRRQALSESDDDEPLLQRQSSPVRQNSADMQLSDGEIRDGDKTNGDDGNDEEKQY

SEQ ID NO: 6555 - DNA, 1700 bp, Glycine max
  misc_feature (1)..(1700): Ceres Seq. ID no. 14307534
aaaaccctgctagtgttgttccgttgagataaacataaacctgagtgagtgaggctaagggagaaagctagaactaaaaatgtcatcagcttctaagctcacactgtacggaatcggaaccgcactgttccgcacccgtcgaactgcacctgtaagtgtaactccctttctcttcttcaaacccattcccttacctcggccgccgcgcttcctcctcctccgcgattcctcttcctcctccgccgccgccgcagaaatcctaccctccgttgaccacccctggccggaatgggtctccttcgtcgaccgcttgagcaccaaaggctacctccccaaaccctcctcttcttccgatgacaccgtaagcctttacaccaacatgaactctctcaaggacgcttgtctcagcttctcgcgtgaccgttacgaccttttcaagttgctgcctacgcacgatatccaagcagtagttgagggtgggtgccctaatcttctccgtaaagctgttaattcggccaagagactgagagcacacctgcaattagatgaaggggatgtttgtggtgcttgcaatctacgaagctcttgtgatagagcttatgtgattctaaaggattttgaaactgatgctcgaactattgatatagttcgaatacttttgttctacgcactagatccactagtgctttctagtggagacaaaccaccaggccgagaagttattgaatcatccgccagaaaacttctctctcagctaattgagttgagtgagtcccctgctccagcccctgcttctgctcgttcaaagcctactgcacaggatgctgtgggagaaggccaatctctaagtgttacgactaatcaattgtttaaagatgctgagatgaagaaaggtgactggatgtgtccaaaatgcaatttcatgaacttttctagaaatacgcaatgcctgaattgtaacgaagacaagcctaaggatattaacccatctactgttcaaatgaagccaggagattggacctgtcctgaatgcaattttttaaattttgccagaaacacacgatgtctaaaatgcaaaacagcggggccgacaaaggaagccaatactaatgaagttgaaaggaaaaaaggagattggacttgcccacaatgtgggttcatgaattatgctaggaacacgaaatgtttgcgttgtcctgagacaaggcctaagaaacatcctggtgactggaattgtcccgggtgtgggttcatgaattttggtagtaaaatgaagtgcttgcactgtcaagagccaaacccaagttccaagaaatataacggggattggagttgtcccaaatgtgatttctacaattatgcaagaaatatggcttgcctgaagtgcaatactgaacgccctaaagaacaaccaaccgttgactatgatggccatgaatggagacgatcaaattgattaaaaaaaaaccgccatcgagggaggtcacaattttggtcttggctgtaacaaatattttgattgcatatgaattaattctccaattaatggtgctgagtgcttcttaacttaattagagatactttaaagttatttgattgcatatgaatttgtgttttaatttaatcatgtacagatctaaaagcaaatttacagagattgaatcttgtgaatgttatagctttattttgcttctgattcc

SEQ ID NO: 6556 - protein, 458 aa, Glycine max
  peptide (1)..(458): Ceres Seq. ID no. 14307535
  misc_feature (270)..(299): Pfam Name: Pfam Description:  Zn-finger in Ran binding protein and others
  misc_feature (3)..(456): NCBI GI NO: 15221905 NR Description: expressed protein [Arabidopsis thaliana]
  misc_feature (87)..(353): NCBI GI NO: 13702809 NR Description: putative ARP protein [Oryza sativa]
  misc_feature (38)..(91): NCBI GI NO: 13702809 NR Description: putative ARP protein [Oryza sativa]
  misc_feature (31)..(378): NCBI GI NO: 18409643 NR Description: expressed protein [Arabidopsis thaliana]
  misc_feature (31)..(378): NCBI GI NO: 21593408 NR Description: unknown [Arabidopsis thaliana]
  misc_feature (37)..(435): NCBI GI NO: 13324787 NR Description: hypothetical protein [Oryza sativa]
  misc_feature (103)..(347): NCBI GI NO: 34393925 NR Description: unknown protein
  misc_feature (56)..(83): NCBI GI NO: 34393925 NR Description: unknown protein
  misc_feature (31)..(351): NCBI GI NO: 25372841 NR Description: hypothetical protein F5A18.17
  misc_feature (95)..(337): NCBI GI NO: 15293147 NR Description: unknown protein [Arabidopsis thaliana]
MSSASKLTLYGIGTALFRTRRTAPVSVTPFLFFKPIPLPRPPRFLLLRDSSSSSAAAAEILPSVDHPWPEWVSFVDRLSTKGYLPKPSSSSDDTVSLYTNMNSLKDACLSFSRDRYDLFKLLPTHDIQAVVEGGCPNLLRKAVNSAKRLRAHLQLDEGDVCGACNLRSSCDRAYVILKDFETDARTIDIVRILLFYALDPLVLSSGDKPPGREVIESSARKLLSQLIELSESPAPAPASARSKPTAQDAVGEGQSLSVTTNQLFKDAEMKKGDWMCPKCNFMNFSRNTQCLNCNEDKPKDINPSTVQMKPGDWTCPECNFLNFARNTRCLKCKTAGPTKEANTNEVERKKGDWTCPQCGFMNYARNTKCLRCPETRPKKHPGDWNCPGCGFMNFGSKMKCLHCQEPNPSSKKYNGDWSCPKCDFYNYARNMACLKCNTERPKEQPTVDYDGHEWRRSN

SEQ ID NO: 6557 - protein, 358 aa, Glycine max
  peptide (1)..(358): Ceres Seq. ID no. 14307536
  misc_feature (170)..(199): Pfam Name: Pfam Description:  Zn-finger in Ran binding protein and others
  misc_feature (1)..(356): NCBI GI NO: 15221905 NR Description: expressed protein [Arabidopsis thaliana]
  misc_feature (1)..(253): NCBI GI NO: 13702809 NR Description: putative ARP protein [Oryza sativa]
  misc_feature (1)..(278): NCBI GI NO: 18409643 NR Description: expressed protein [Arabidopsis thaliana]
  misc_feature (1)..(278): NCBI GI NO: 21593408 NR Description: unknown [Arabidopsis thaliana]
  misc_feature (1)..(335): NCBI GI NO: 13324787 NR Description: hypothetical protein [Oryza sativa]
  misc_feature (3)..(247): NCBI GI NO: 34393925 NR Description: unknown protein
  misc_feature (1)..(251): NCBI GI NO: 25372841 NR Description: hypothetical protein F5A18.17
  misc_feature (1)..(237): NCBI GI NO: 15293147 NR Description: unknown protein [Arabidopsis thaliana]
  misc_feature (1)..(237): NCBI GI NO: 18405190 NR Description: expressed protein [Arabidopsis thaliana]
  misc_feature (234)..(314): NCBI GI NO: 13702809 NR Description: putative ARP protein [Oryza sativa]
MNSLKDACLSFSRDRYDLFKLLPTHDIQAVVEGGCPNLLRKAVNSAKRLRAHLQLDEGDVCGACNLRSSCDRAYVILKDFETDARTIDIVRILLFYALDPLVLSSGDKPPGREVIESSARKLLSQLIELSESPAPAPASARSKPTAQDAVGEGQSLSVTTNQLFKDAEMKKGDWMCPKCNFMNFSRNTQCLNCNEDKPKDINPSTVQMKPGDWTCPECNFLNFARNTRCLKCKTAGPTKEANTNEVERKKGDWTCPQCGFMNYARNTKCLRCPETRPKKHPGDWNCPGCGFMNFGSKMKCLHCQEPNPSSKKYNGDWSCPKCDFYNYARNMACLKCNTERPKEQPTVDYDGHEWRRSN

SEQ ID NO: 6558 - DNA, 1396 bp, Glycine max
  misc_feature (1)..(1396): Ceres Seq. ID no. 15170345
actgatctttcttttggtgttgaagaagagaagatcaatgatctacctgatcaatggacgactccaactcacctgatcccaccgcatcctttgcttttagatccacaaccacaaccacaacacctcagagcaacttcttgagaagccattctactaaagaaacccctttctcaaacttcattcactccccaccacgcctctcttgtcccactctttctcgtagcctccaaaactctcctatttcctctccacttcaccaccgtcaattctcaccccctccctctcctccttctcccacaaaactctctgattctgaacctcaaaccacttaccactgtgcctcttcagtcctcagaaacgatggacagatcctctccattgccctgtcatcaaatggtttggtctacactggctctgactcaaaccttgtgagggtgtggaagctccctgagttcaccgaatgtggacaactcaggaccaaggcttgcagggtggtggccctcgaagtgtccaatgacacggtttatgcagcatatggtgatggcaaaataagggtatggagaagaacttgggataaggtgttgaagcatgttcggttggctaccatcccaaagacactcggctatgttcgcagctacatcgccggcaaagacaagacaatgcacaaggggctaatcacggcaatggcaataaacacagcagaggacattctatacacagcttccctggacaaaacggtgaaagtgtggagaatctcagacctgaagtgcatagagaccatcaaggcacacactgagccaatcaacgccatcatagtggcagatgatggagtcctctaaacttgacttttatagaatttagttcacctattttcatctttatttcatgctttgaataatcataattttgatttttataaattatagttttatttatataaaatttttctaaaaaatttataagtcaataatgtccaatataaagagaagctaaatttatataaaactttaatataaaataggtctttaaaaagactcatcaaactagatattcaaataggtgaacaaaattatcaattaaaaattcacctattcccaattgccttccctatccacaactcatgaattaagaattttcaaagtagcaacatctattgaactaactctcttacttcatggaaatctttcataaaaaaatttagtaaaaaaaaaatctttcacaaatattactaattaatcctaaagatccatgctgaacaatttatataacattttttaaaaataaattttatcatgtcactatttttttatatttgattttttaaataatatgatagtaataaatgattgtattaaaagacttccgtttacatagagacagtgtgtggcagttggtt

SEQ ID NO: 6559 - protein, 261 aa, Glycine max
  peptide (1)..(261): Ceres Seq. ID no. 15170346
  misc_feature (45)..(261): NCBI GI NO: 15229740 NR Description: transducin / WD-40 repeat protein family
  misc_feature (40)..(261): NCBI GI NO: 15235354 NR Description: transducin / WD-40 repeat protein family
  misc_feature (99)..(257): NCBI GI NO: 15220271 NR Description: transducin / WD-40 repeat protein family
  misc_feature (98)..(261): NCBI GI NO: 31126785 NR Description: putative WD repeat-protein
  misc_feature (15)..(261): NCBI GI NO: 15222143 NR Description: transducin / WD-40 repeat protein family
  misc_feature (98)..(261): NCBI GI NO: 15225317 NR Description: transducin / WD-40 repeat protein family
  misc_feature (15)..(261): NCBI GI NO: 17979259 NR Description: At1g49450/F13F21_11 [Arabidopsis thaliana]
  misc_feature (25)..(261): NCBI GI NO: 15230244 NR Description: transducin / WD-40 repeat protein family
  misc_feature (61)..(261): NCBI GI NO: 34904338 NR Description: unnamed protein product
  misc_feature (49)..(261): NCBI GI NO: 34906600 NR Description: hypothetical protein~similar to Arabidopsisthaliana
MDDSNSPDPTASFAFRSTTTTTTPQSNFLRSHSTKETPFSNFIHSPPRLSCPTLSRSLQNSPISSPLHHRQFSPPPSPPSPTKLSDSEPQTTYHCASSVLRNDGQILSIALSSNGLVYTGSDSNLVRVWKLPEFTECGQLRTKACRVVALEVSNDTVYAAYGDGKIRVWRRTWDKVLKHVRLATIPKTLGYVRSYIAGKDKTMHKGLITAMAINTAEDILYTASLDKTVKVWRISDLKCIETIKAHTEPINAIIVADDGVL

SEQ ID NO: 6560 - DNA, 1779 bp, Glycine max
  misc_feature (1)..(1779): Ceres Seq. ID no. 14310772
attccaaaatggtggaaacattaccacaccatactcctcctcctcctaaccatcaccaagtcttggttctaaaatctgcaatatgttcgagactcctcctcgtaaccctaatcatcctcttccgaaccctcgtttccccctacgacacatccgcatccttaaaccctccatgcctctccacccccaaccccaactccaccacccacccttcccccctcgaaaacggcgtcgtttgggactccgtctacttcctccgcatcgcccaatgcggctacgagtacgaacaaaccttcgccttcttacccctccttcctctctctctctccctctcttctcacaccctcttcgcctttctctctccctttctaaaccaaaggcccctcctcgctctctccgcttacgtcatcaacaacatggctttcgttctcgccgctctctacttctacaagctctccctcaccgtcttgaaggacccccaaatagcgcttcgggccaccgttttcttctgctttaatcctgcctctatattttattcatccatatactcggagagtttgtacgcgcttctgtgtttcggaggaatgtaccacttcatgtctggtgggaacaatttggctgttcttttctttgcgctctccggttgtgctaggtctaatggggtgctgaatgctggctatctctgctttcagactatgcatcgcgcttatcatgctatgtttcaagaaaagcgtgttactttggctttgcagattgttattgctggagctttacgtactgcatgtatttttgctccatttgtagctttccaggcttatggctactacaatatgtgtgttggacgttctcctgatgaaataaggccatggtgcaaggcaagaataccattactttacaattacatccaaagtcattattggggtgtaggtttcttgagatattttcagctgaaacagttgcctaactttcttcttgcttccccaatactgtctctggcactttgctcagttgtccattatgctaagtcaaggcctcaaaactttctctcactgggttttttagctcctatggaagaaaagagccgtggagttgtgtttttattagatgaactctcaaggtccaaagaagcccgaagtgtgaagaaatcctctgttagggtagaagcagaacattccaatcttaggagaagaaagaatgtgagcaagggagatgctgctaatgttcacctagaatctgagccagcagcaatttggccaggatacttgtctgcttctgttcttccatttgtgttacacttgggattcatggcatgcactgctttcttcatcatgcatgtacaggtttcaactcgtttcttgtctgccagccctccactttattggtttgcttcatatataatggcatatcctggaaaatactctagatggggatacgtgatgtgggcatactctatagcatatatttttcttggcagtttgctgttttcaaacttctatccttttacttaacgagaagaaaggtagatggttcttgaaagctgttggtcttcttattccatgcaatgcacaaaggcataactatccaccctgaagcgttgctgctgaatttcagatttctgctggttgctgtttgatctttacacgcctgagtagtggagaaaatgcccccttccctccctcaaattagcaatttttttttacgttggtcaaccgggattcttatcatctagatgagtaaactaatagaaatccttttcctttgttgtaattttcatttttgtct

SEQ ID NO: 6561 - protein, 500 aa, Glycine max
  peptide (1)..(500): Ceres Seq. ID no. 14310773
  misc_feature (19)..(500): Pfam Name: DUF409 Pfam Description: Protein of unknown function
  misc_feature (19)..(500): NCBI GI NO: 15221122 NR Description: hypothetical protein [Arabidopsis thaliana]
  misc_feature (22)..(277): NCBI GI NO: 34871896 NR Description: similar to hypothetical protein FLJ20477
  misc_feature (287)..(359): NCBI GI NO: 34871896 NR Description: similar to hypothetical protein FLJ20477
  misc_feature (417)..(465): NCBI GI NO: 34871896 NR Description: similar to hypothetical protein FLJ20477
  misc_feature (22)..(287): NCBI GI NO: 31542474 NR Description: RIKEN cDNA D430024F16 gene [Mus musculus]
  misc_feature (287)..(350): NCBI GI NO: 31542474 NR Description: RIKEN cDNA D430024F16 gene [Mus musculus]
  misc_feature (418)..(465): NCBI GI NO: 31542474 NR Description: RIKEN cDNA D430024F16 gene [Mus musculus]
  misc_feature (22)..(287): NCBI GI NO: 32822771 NR Description: Unknown (protein for MGC:62865) [Mus musculus]
  misc_feature (287)..(350): NCBI GI NO: 32822771 NR Description: Unknown (protein for MGC:62865) [Mus musculus]
  misc_feature (418)..(465): NCBI GI NO: 32822771 NR Description: Unknown (protein for MGC:62865) [Mus musculus]
SKMVETLPHHTPPPPNHHQVLVLKSAICSRLLLVTLIILFRTLVSPYDTSASLNPPCLSTPNPNSTTHPSPLENGVVWDSVYFLRIAQCGYEYEQTFAFLPLLPLSLSLSSHTLFAFLSPFLNQRPLLALSAYVINNMAFVLAALYFYKLSLTVLKDPQIALRATVFFCFNPASIFYSSIYSESLYALLCFGGMYHFMSGGNNLAVLFFALSGCARSNGVLNAGYLCFQTMHRAYHAMFQEKRVTLALQIVIAGALRTACIFAPFVAFQAYGYYNMCVGRSPDEIRPWCKARIPLLYNYIQSHYWGVGFLRYFQLKQLPNFLLASPILSLALCSVVHYAKSRPQNFLSLGFLAPMEEKSRGVVFLLDELSRSKEARSVKKSSVRVEAEHSNLRRRKNVSKGDAANVHLESEPAAIWPGYLSASVLPFVLHLGFMACTAFFIMHVQVSTRFLSASPPLYWFASYIMAYPGKYSRWGYVMWAYSIAYIFLGSLLFSNFYPFT

SEQ ID NO: 6562 - protein, 498 aa, Glycine max
  peptide (1)..(498): Ceres Seq. ID no. 14310774
  misc_feature (17)..(498): Pfam Name: DUF409 Pfam Description: Protein of unknown function
  misc_feature (17)..(498): NCBI GI NO: 15221122 NR Description: hypothetical protein [Arabidopsis thaliana]
  misc_feature (20)..(275): NCBI GI NO: 34871896 NR Description: similar to hypothetical protein FLJ20477
  misc_feature (285)..(357): NCBI GI NO: 34871896 NR Description: similar to hypothetical protein FLJ20477
  misc_feature (415)..(463): NCBI GI NO: 34871896 NR Description: similar to hypothetical protein FLJ20477
  misc_feature (20)..(285): NCBI GI NO: 31542474 NR Description: RIKEN cDNA D430024F16 gene [Mus musculus]
  misc_feature (285)..(348): NCBI GI NO: 31542474 NR Description: RIKEN cDNA D430024F16 gene [Mus musculus]
  misc_feature (416)..(463): NCBI GI NO: 31542474 NR Description: RIKEN cDNA D430024F16 gene [Mus musculus]
  misc_feature (20)..(285): NCBI GI NO: 32822771 NR Description: Unknown (protein for MGC:62865) [Mus musculus]
  misc_feature (285)..(348): NCBI GI NO: 32822771 NR Description: Unknown (protein for MGC:62865) [Mus musculus]
  misc_feature (416)..(463): NCBI GI NO: 32822771 NR Description: Unknown (protein for MGC:62865) [Mus musculus]
MVETLPHHTPPPPNHHQVLVLKSAICSRLLLVTLIILFRTLVSPYDTSASLNPPCLSTPNPNSTTHPSPLENGVVWDSVYFLRIAQCGYEYEQTFAFLPLLPLSLSLSSHTLFAFLSPFLNQRPLLALSAYVINNMAFVLAALYFYKLSLTVLKDPQIALRATVFFCFNPASIFYSSIYSESLYALLCFGGMYHFMSGGNNLAVLFFALSGCARSNGVLNAGYLCFQTMHRAYHAMFQEKRVTLALQIVIAGALRTACIFAPFVAFQAYGYYNMCVGRSPDEIRPWCKARIPLLYNYIQSHYWGVGFLRYFQLKQLPNFLLASPILSLALCSVVHYAKSRPQNFLSLGFLAPMEEKSRGVVFLLDELSRSKEARSVKKSSVRVEAEHSNLRRRKNVSKGDAANVHLESEPAAIWPGYLSASVLPFVLHLGFMACTAFFIMHVQVSTRFLSASPPLYWFASYIMAYPGKYSRWGYVMWAYSIAYIFLGSLLFSNFYPFT

SEQ ID NO: 6563 - protein, 363 aa, Glycine max
  peptide (1)..(363): Ceres Seq. ID no. 14310775
  misc_feature (1)..(363): Pfam Name: DUF409 Pfam Description: Protein of unknown function
  misc_feature (1)..(363): NCBI GI NO: 15221122 NR Description: hypothetical protein [Arabidopsis thaliana]
  misc_feature (1)..(140): NCBI GI NO: 34871896 NR Description: similar to hypothetical protein FLJ20477
  misc_feature (150)..(222): NCBI GI NO: 34871896 NR Description: similar to hypothetical protein FLJ20477
  misc_feature (280)..(328): NCBI GI NO: 34871896 NR Description: similar to hypothetical protein FLJ20477
  misc_feature (1)..(150): NCBI GI NO: 31542474 NR Description: RIKEN cDNA D430024F16 gene [Mus musculus]
  misc_feature (150)..(213): NCBI GI NO: 31542474 NR Description: RIKEN cDNA D430024F16 gene [Mus musculus]
  misc_feature (281)..(328): NCBI GI NO: 31542474 NR Description: RIKEN cDNA D430024F16 gene [Mus musculus]
  misc_feature (1)..(150): NCBI GI NO: 32822771 NR Description: Unknown (protein for MGC:62865) [Mus musculus]
  misc_feature (150)..(213): NCBI GI NO: 32822771 NR Description: Unknown (protein for MGC:62865) [Mus musculus]
  misc_feature (281)..(328): NCBI GI NO: 32822771 NR Description: Unknown (protein for MGC:62865) [Mus musculus]
MAFVLAALYFYKLSLTVLKDPQIALRATVFFCFNPASIFYSSIYSESLYALLCFGGMYHFMSGGNNLAVLFFALSGCARSNGVLNAGYLCFQTMHRAYHAMFQEKRVTLALQIVIAGALRTACIFAPFVAFQAYGYYNMCVGRSPDEIRPWCKARIPLLYNYIQSHYWGVGFLRYFQLKQLPNFLLASPILSLALCSVVHYAKSRPQNFLSLGFLAPMEEKSRGVVFLLDELSRSKEARSVKKSSVRVEAEHSNLRRRKNVSKGDAANVHLESEPAAIWPGYLSASVLPFVLHLGFMACTAFFIMHVQVSTRFLSASPPLYWFASYIMAYPGKYSRWGYVMWAYSIAYIFLGSLLFSNFYPFT

SEQ ID NO: 6564 - DNA, 2113 bp, Glycine max
  misc_feature (1)..(2113): Ceres Seq. ID no. 12582251
cagctacgtaggccccccccccgagttgttgttgttgtttgtgccgcgaaagagaaggcaagcaaaaaaggtgatcctgggcgtacaagaccataacaccaccttccagctcactctccataaaccctaacgcttcgtctagggtttcgctgaattccccaattttcccaacccccgaccggacatgctccttctccgatggccgtcgtaactagcaacggcaagcgccgccaacattggccctccgcgaattaccactttccatctcccaattccaaaagacccagacttccaacaatgtcccaaaaccacgcgcaatccgtgttatcctccagtagtatcatttctagaatttctacgtaccccgaaaccaagccacccctccatagggaggttcacgccccgtgtagaccacgtaagtttgattctcctgccttcaatagaagtgctcattattatcgcaaggaagagattagtcacgatgtgggcaacttgttaagtaaaaattaccaaagggcgaaaaattccgcgttagctagcattaggtttggggaaaagggcaaggaggtgatagaagtggatgctgatagttccaaggatatggtttcggaggaggattcgagtgtggaagaggttcgttttgtggaagaagatggacgagaagtgcgctccgtggtgacggagcacaagtggcaagagggtgatttggttgtgactgaggttaaggatttggatgctaaggatatgtgtggtggccctcagcagcagtcaacttcatccgtggtttctgagttgactaatggtgatctgaatgtggttaatgctgagaagatgttggacattctttctttgactccggatcatgatctttcctccgttcaagcctacaagaagttgctcgatgctcttggccagcgaacggatacccttaacaggctggaggctgaaattaaagttaacgagaagcgtatgtccacgtttgaattgttgcgcccgaagaaggaactagtagaggaagttccattggaaccttttattcctcttactaaagaggaagaagttgaggttgcacatgccttttctaccaaccggaaaaagatcttggtttcccatgagaaatctggcattgagatctcgggagaaaagtttcaatgccttagaccgggtgcatggttaaacgatgaggtaataaatgtgtaccttgaattgctgaaagagagggagagaagagagccacagaagtttctgaactgtcattttttcagtacctttttctacaagaggttaataagtggcaagaatgggtatgatttcaaatctgtgaggagatggaccagccaaaagaaattgggatatggcctacatgaatgtgataaaatatttgttcctatccataaagagattcattggtgcttggctgttatcaataagaaagataagaaatttcagtatctggactcactaagaggaacagatgcccaagtaatgaaagttctggctagctatattgtagatgaagtaaaggacaagactggaaaagatattgatgtaagttcttggaaaaaagaatttgttgaagaccttcctgagcagcagaacgggtatgattgtggggtgtttatgatcaaatatgccgacttctatagcagaaacttggggctatgtttcaaccaggaacacatgtcttactttcggcgcagaacagctaaagaaatcttgagattaaaagctaactaagcaaaagaatattcatttgtatttccatattggattttggtcatcagaaattgaaacaatcattaatgtaaaatcagtagagcactttttgatgaaggatccttcactcctgtcactatctcgaccttaaccattcaaaagttctggcatttgttagattgtggactggactgattatacatatcatcccgatatccaggtacaccatgttggtagtgtagtgtgtagtgggttgtatatgctacgcaaaggtgaaatcatagatgagatgaggcattaggttgtggttttaattatgtaatcataaatgtgctccctcaccttttttggtgtctggttactaaaaaaaaaaaaaaaagaaaaaaaaaaaaaaaaa

SEQ ID NO: 6565 - protein, 512 aa, Glycine max
  peptide (1)..(512): Ceres Seq. ID no. 12582252
  misc_feature (310)..(510): Pfam Name: Pfam Description:  Ulp1 protease family
  misc_feature (115)..(512): NCBI GI NO: 18414542 NR Description: Expressed protein; protein id: At4g15880
  misc_feature (115)..(512): NCBI GI NO: 34787206 NR Description: SUMO protease [Arabidopsis thaliana]
  misc_feature (69)..(511): NCBI GI NO: 6728998 NR Description: hypothetical protein [Arabidopsis thaliana]
  misc_feature (69)..(511): NCBI GI NO: 30680058 NR Description: Ulp1 protease family [Arabidopsis thaliana]
  misc_feature (69)..(511): NCBI GI NO: 26450144 NR Description: unknown protein [Arabidopsis thaliana]
  misc_feature (227)..(511): NCBI GI NO: 34915036 NR Description: P0458A05.23
  misc_feature (115)..(469): NCBI GI NO: 25371728 NR Description: hypothetical protein AT4g15880
  misc_feature (115)..(464): NCBI GI NO: 2326343 NR Description: G14587-5 [Arabidopsis thaliana]
  misc_feature (115)..(464): NCBI GI NO: 7485126 NR Description: hypothetical protein - Arabidopsis thaliana
  misc_feature (297)..(512): NCBI GI NO: 15236895 NR Description: hypothetical protein; protein id: At4g00690.1
MAVVTSNGKRRQHWPSANYHFPSPNSKRPRLPTMSQNHAQSVLSSSSIISRISTYPETKPPLHREVHAPCRPRKFDSPAFNRSAHYYRKEEISHDVGNLLSKNYQRAKNSALASIRFGEKGKEVIEVDADSSKDMVSEEDSSVEEVRFVEEDGREVRSVVTEHKWQEGDLVVTEVKDLDAKDMCGGPQQQSTSSVVSELTNGDLNVVNAEKMLDILSLTPDHDLSSVQAYKKLLDALGQRTDTLNRLEAEIKVNEKRMSTFELLRPKKELVEEVPLEPFIPLTKEEEVEVAHAFSTNRKKILVSHEKSGIEISGEKFQCLRPGAWLNDEVINVYLELLKERERREPQKFLNCHFFSTFFYKRLISGKNGYDFKSVRRWTSQKKLGYGLHECDKIFVPIHKEIHWCLAVINKKDKKFQYLDSLRGTDAQVMKVLASYIVDEVKDKTGKDIDVSSWKKEFVEDLPEQQNGYDCGVFMIKYADFYSRNLGLCFNQEHMSYFRRRTAKEILRLKAN

SEQ ID NO: 6566 - protein, 479 aa, Glycine max
  peptide (1)..(479): Ceres Seq. ID no. 12582253
  misc_feature (277)..(477): Pfam Name: Pfam Description:  Ulp1 protease family
  misc_feature (82)..(479): NCBI GI NO: 18414542 NR Description: Expressed protein; protein id: At4g15880
  misc_feature (82)..(479): NCBI GI NO: 34787206 NR Description: SUMO protease [Arabidopsis thaliana]
  misc_feature (36)..(478): NCBI GI NO: 6728998 NR Description: hypothetical protein [Arabidopsis thaliana]
  misc_feature (36)..(478): NCBI GI NO: 30680058 NR Description: Ulp1 protease family [Arabidopsis thaliana]
  misc_feature (36)..(478): NCBI GI NO: 26450144 NR Description: unknown protein [Arabidopsis thaliana]
  misc_feature (194)..(478): NCBI GI NO: 34915036 NR Description: P0458A05.23
  misc_feature (82)..(436): NCBI GI NO: 25371728 NR Description: hypothetical protein AT4g15880
  misc_feature (82)..(431): NCBI GI NO: 2326343 NR Description: G14587-5 [Arabidopsis thaliana]
  misc_feature (82)..(431): NCBI GI NO: 7485126 NR Description: hypothetical protein - Arabidopsis thaliana
  misc_feature (264)..(479): NCBI GI NO: 15236895 NR Description: hypothetical protein; protein id: At4g00690.1
MSQNHAQSVLSSSSIISRISTYPETKPPLHREVHAPCRPRKFDSPAFNRSAHYYRKEEISHDVGNLLSKNYQRAKNSALASIRFGEKGKEVIEVDADSSKDMVSEEDSSVEEVRFVEEDGREVRSVVTEHKWQEGDLVVTEVKDLDAKDMCGGPQQQSTSSVVSELTNGDLNVVNAEKMLDILSLTPDHDLSSVQAYKKLLDALGQRTDTLNRLEAEIKVNEKRMSTFELLRPKKELVEEVPLEPFIPLTKEEEVEVAHAFSTNRKKILVSHEKSGIEISGEKFQCLRPGAWLNDEVINVYLELLKERERREPQKFLNCHFFSTFFYKRLISGKNGYDFKSVRRWTSQKKLGYGLHECDKIFVPIHKEIHWCLAVINKKDKKFQYLDSLRGTDAQVMKVLASYIVDEVKDKTGKDIDVSSWKKEFVEDLPEQQNGYDCGVFMIKYADFYSRNLGLCFNQEHMSYFRRRTAKEILRLKAN

SEQ ID NO: 6567 - protein, 378 aa, Glycine max
  peptide (1)..(378): Ceres Seq. ID no. 12582254
  misc_feature (176)..(376): Pfam Name: Pfam Description:  Ulp1 protease family
  misc_feature (1)..(378): NCBI GI NO: 18414542 NR Description: Expressed protein; protein id: At4g15880
  misc_feature (1)..(378): NCBI GI NO: 34787206 NR Description: SUMO protease [Arabidopsis thaliana]
  misc_feature (1)..(377): NCBI GI NO: 6728998 NR Description: hypothetical protein [Arabidopsis thaliana]
  misc_feature (1)..(377): NCBI GI NO: 30680058 NR Description: Ulp1 protease family [Arabidopsis thaliana]
  misc_feature (1)..(377): NCBI GI NO: 26450144 NR Description: unknown protein [Arabidopsis thaliana]
  misc_feature (93)..(377): NCBI GI NO: 34915036 NR Description: P0458A05.23
  misc_feature (1)..(335): NCBI GI NO: 25371728 NR Description: hypothetical protein AT4g15880
  misc_feature (1)..(330): NCBI GI NO: 2326343 NR Description: G14587-5 [Arabidopsis thaliana]
  misc_feature (1)..(330): NCBI GI NO: 7485126 NR Description: hypothetical protein - Arabidopsis thaliana
  misc_feature (163)..(378): NCBI GI NO: 15236895 NR Description: hypothetical protein; protein id: At4g00690.1
MVSEEDSSVEEVRFVEEDGREVRSVVTEHKWQEGDLVVTEVKDLDAKDMCGGPQQQSTSSVVSELTNGDLNVVNAEKMLDILSLTPDHDLSSVQAYKKLLDALGQRTDTLNRLEAEIKVNEKRMSTFELLRPKKELVEEVPLEPFIPLTKEEEVEVAHAFSTNRKKILVSHEKSGIEISGEKFQCLRPGAWLNDEVINVYLELLKERERREPQKFLNCHFFSTFFYKRLISGKNGYDFKSVRRWTSQKKLGYGLHECDKIFVPIHKEIHWCLAVINKKDKKFQYLDSLRGTDAQVMKVLASYIVDEVKDKTGKDIDVSSWKKEFVEDLPEQQNGYDCGVFMIKYADFYSRNLGLCFNQEHMSYFRRRTAKEILRLKAN

SEQ ID NO: 6568 - DNA, 1604 bp, Glycine max
  misc_feature (1)..(1604): Ceres Seq. ID no. 15175677
gagttctctgcattcttcaaacacacacacacacacacagaatgggtgacatgtaccactttgacaagaacctctcctcacaagacgaaatctcactttttctgcgtcagattctgctccgttcatctttaccttcccactccatgcctgctggatcctgcacctccaacgctgctcaacaaaacgtaaatgcacaccacccttctttcacggcgtcacagctccaagatgggaagatcttggccgttgattccaccgcttcttttgtctccggttctgctgcttgcagttccttcaagggccatggtgcttctgctgcaaatgtgtcttcttcttctgctggagtgagtgagaacgagaatgatgactatgattgtgagagtgaggagggtgttgaggctccggccgaagaagttccaacaaaggctgcttcttctaggagttcatctaaaagatcaagagctgcagaagttcataatttgtcagagaagcggagaaggggtaggatcaacgagaaaatgaaggctttgcaaaacctaattccaaattctaacaagacagataaggcttcaatgctcgatgaagctattgaataccttaaacagcttcagctacaagtacagatgctgtcaatgagaaatgggttgagtttgcatcctatgtgctttcctgaaggcttgcagcctctgcagttgtctcagatgggtatggaattaagtgaaagaaacaggtttacctctttaaacatgtcagctactctgcctctgcaccaagacaacaatcccttgcactatgcatccaatctacctaacaaacacaatctcccaaatcagccatcagtgccctatcctccatacattgacaacccagaaacttctttcggtctggaaccccgaatccaaacggatatgaaacctcttcaacacaaaggaggatcttctgagccaatacgaggggaagacattttgcagcaccagcaatcaagtggtatccattcagatgccaatacattaggtggttctcaagttgtcaaagaattcgaatcaggcacgagactatcattcccttttgacacgcaagcatgtgaacccaaagacaacagcaactcttcgcaaccatgcattggcggaagagatcattcaggagtgatcataagaaatagtgagaccaacattgttggtaggtaggtatatgatgcttatgtgaatgatatgtagctaggttcgtgcatgcaatgcaacatgtcttgaaaagcttttcaccagagactgcagaagggagaaagtggtcagtggcaactcgaagaccgaaaagtcagatttttgaagtttactgccagtaatgccttctgaattttggtttcgtaaaagcaggaatctcaatattatcccttgagcattttgtaatgttctcaaaaagcctctggcctacgtgacatgagagcagattttttttttttctctttctagcttctcgagttgataaaattatgtatgtataatgtatgcagagaatataactacccattgttatgcggattatataaccactgtagaatatcctatggtggttttatttcagttcacgataaaaacaaattgccc

SEQ ID NO: 6569 - protein, 394 aa, Glycine max
  peptide (1)..(394): Ceres Seq. ID no. 15175678
  misc_feature (154)..(203): Pfam Name: Pfam Description:  Helix-loop-helix DNA-binding domain
  misc_feature (90)..(234): NCBI GI NO: 18419937 NR Description: bHLH protein SPATULA (SPT) [Arabidopsis thaliana]
  misc_feature (90)..(234): NCBI GI NO: 25407777 NR Description: hypothetical protein AT4g36930
  misc_feature (125)..(332): NCBI GI NO: 15451582 NR Description: Putative SPATULA [Oryza sativa]
  misc_feature (21)..(349): NCBI GI NO: 25411969 NR Description: hypothetical protein At2g20180
  misc_feature (21)..(297): NCBI GI NO: 30680903 NR Description: (bHLH015) putative bHLH transcription factor
  misc_feature (21)..(297): NCBI GI NO: 30680909 NR Description: (bHLH015) putative bHLH transcription factor
  misc_feature (99)..(288): NCBI GI NO: 34899612 NR Description: putative phytochrome interacting factor 4
  misc_feature (62)..(236): NCBI GI NO: 15217533 NR Description: phytochrome interacting factor 3 (PIF3)
  misc_feature (62)..(236): NCBI GI NO: 4093153 NR Description: phytochrome-associated protein 3
  misc_feature (127)..(224): NCBI GI NO: 15240202 NR Description: bHLH protein family [Arabidopsis thaliana]
VLCILQTHTHTHRMGDMYHFDKNLSSQDEISLFLRQILLRSSLPSHSMPAGSCTSNAAQQNVNAHHPSFTASQLQDGKILAVDSTASFVSGSAACSSFKGHGASAANVSSSSAGVSENENDDYDCESEEGVEAPAEEVPTKAASSRSSSKRSRAAEVHNLSEKRRRGRINEKMKALQNLIPNSNKTDKASMLDEAIEYLKQLQLQVQMLSMRNGLSLHPMCFPEGLQPLQLSQMGMELSERNRFTSLNMSATLPLHQDNNPLHYASNLPNKHNLPNQPSVPYPPYIDNPETSFGLEPRIQTDMKPLQHKGGSSEPIRGEDILQHQQSSGIHSDANTLGGSQVVKEFESGTRLSFPFDTQACEPKDNSNSSQPCIGGRDHSGVIIRNSETNIVGR

SEQ ID NO: 6570 - protein, 381 aa, Glycine max
  peptide (1)..(381): Ceres Seq. ID no. 15175679
  misc_feature (141)..(190): Pfam Name: Pfam Description:  Helix-loop-helix DNA-binding domain
  misc_feature (77)..(221): NCBI GI NO: 18419937 NR Description: bHLH protein SPATULA (SPT) [Arabidopsis thaliana]
  misc_feature (77)..(221): NCBI GI NO: 25407777 NR Description: hypothetical protein AT4g36930
  misc_feature (112)..(319): NCBI GI NO: 15451582 NR Description: Putative SPATULA [Oryza sativa]
  misc_feature (8)..(336): NCBI GI NO: 25411969 NR Description: hypothetical protein At2g20180
  misc_feature (8)..(284): NCBI GI NO: 30680903 NR Description: (bHLH015) putative bHLH transcription factor
  misc_feature (8)..(284): NCBI GI NO: 30680909 NR Description: (bHLH015) putative bHLH transcription factor
  misc_feature (86)..(275): NCBI GI NO: 34899612 NR Description: putative phytochrome interacting factor 4
  misc_feature (49)..(223): NCBI GI NO: 15217533 NR Description: phytochrome interacting factor 3 (PIF3)
  misc_feature (49)..(223): NCBI GI NO: 4093153 NR Description: phytochrome-associated protein 3
  misc_feature (114)..(211): NCBI GI NO: 15240202 NR Description: bHLH protein family [Arabidopsis thaliana]
MGDMYHFDKNLSSQDEISLFLRQILLRSSLPSHSMPAGSCTSNAAQQNVNAHHPSFTASQLQDGKILAVDSTASFVSGSAACSSFKGHGASAANVSSSSAGVSENENDDYDCESEEGVEAPAEEVPTKAASSRSSSKRSRAAEVHNLSEKRRRGRINEKMKALQNLIPNSNKTDKASMLDEAIEYLKQLQLQVQMLSMRNGLSLHPMCFPEGLQPLQLSQMGMELSERNRFTSLNMSATLPLHQDNNPLHYASNLPNKHNLPNQPSVPYPPYIDNPETSFGLEPRIQTDMKPLQHKGGSSEPIRGEDILQHQQSSGIHSDANTLGGSQVVKEFESGTRLSFPFDTQACEPKDNSNSSQPCIGGRDHSGVIIRNSETNIVGR

SEQ ID NO: 6571 - protein, 378 aa, Glycine max
  peptide (1)..(378): Ceres Seq. ID no. 15175680
  misc_feature (138)..(187): Pfam Name: Pfam Description:  Helix-loop-helix DNA-binding domain
  misc_feature (74)..(218): NCBI GI NO: 18419937 NR Description: bHLH protein SPATULA (SPT) [Arabidopsis thaliana]
  misc_feature (74)..(218): NCBI GI NO: 25407777 NR Description: hypothetical protein AT4g36930
  misc_feature (109)..(316): NCBI GI NO: 15451582 NR Description: Putative SPATULA [Oryza sativa]
  misc_feature (5)..(333): NCBI GI NO: 25411969 NR Description: hypothetical protein At2g20180
  misc_feature (5)..(281): NCBI GI NO: 30680903 NR Description: (bHLH015) putative bHLH transcription factor
  misc_feature (5)..(281): NCBI GI NO: 30680909 NR Description: (bHLH015) putative bHLH transcription factor
  misc_feature (83)..(272): NCBI GI NO: 34899612 NR Description: putative phytochrome interacting factor 4
  misc_feature (46)..(220): NCBI GI NO: 15217533 NR Description: phytochrome interacting factor 3 (PIF3)
  misc_feature (46)..(220): NCBI GI NO: 4093153 NR Description: phytochrome-associated protein 3
  misc_feature (111)..(208): NCBI GI NO: 15240202 NR Description: bHLH protein family [Arabidopsis thaliana]
MYHFDKNLSSQDEISLFLRQILLRSSLPSHSMPAGSCTSNAAQQNVNAHHPSFTASQLQDGKILAVDSTASFVSGSAACSSFKGHGASAANVSSSSAGVSENENDDYDCESEEGVEAPAEEVPTKAASSRSSSKRSRAAEVHNLSEKRRRGRINEKMKALQNLIPNSNKTDKASMLDEAIEYLKQLQLQVQMLSMRNGLSLHPMCFPEGLQPLQLSQMGMELSERNRFTSLNMSATLPLHQDNNPLHYASNLPNKHNLPNQPSVPYPPYIDNPETSFGLEPRIQTDMKPLQHKGGSSEPIRGEDILQHQQSSGIHSDANTLGGSQVVKEFESGTRLSFPFDTQACEPKDNSNSSQPCIGGRDHSGVIIRNSETNIVGR

SEQ ID NO: 6572 - DNA, 1386 bp, Glycine max
  misc_feature (1)..(1386): Ceres Seq. ID no. 15226511
aatctttaataaaagatattaaaatcctatggcttccagcaacaagattcacgttgttatcgacaacaagctctatgacttgaccaagtttggcaagacccatccaggtggcagtctcatccttgaaaacttccacgactgtgatgtcactgattatttctatgccatccactctaagcaagcccaaaagatgctcaagaacatgccctcatctgacattgctgaagaggacaaagtcccccaaaccgattatttgaagctcttgttccaactcgaaaagaccgatcttttcaaggcagattatgttgttgagtttgttcaaatcttccacacaatcgttttgttcttcttggcaacttggtatggtcaaacctaccctgtcttttccgctatttgcctcggtttcggtaccctcatcggtggttgggttggccatcaatgcgatcatcagagagataacattatgagagacgtcaacttggtttacgccactgtttgcgacggcctttctccccactggtggtccaccaagcacaaccgtcaccacttgagcaccaacgaaactgaacatgatggtgatattcaactcttccctttcatctacctctggacccccaagaaggaccaagattcctggaacagagccatccaacacatctatttcaccgcattatacactatccttcaaattaaatggcaaattgactctgttcaatgggccatttctcaaagaaactacaaggagatggttggtttggctatccactgggcctggtacatcttcttcttgccttggcaagtctggactttgggagtccttattgctggtaccatttccgcttttgtcgtcacagctagtcaccaagctgagcacaaatacgaaggaaagaaggaattcgaaggagaagcagcaaatgttcgtagatccaaataccaaatccacgactatttcacccatcaagtcgtcaccaccagaaacatcgacctccacaactggttccttaattacatctgcggaggtatgcaataccaaatcgaacaccacgtcttccccagaatccctctttataaacttcctcttgtcaagggtgttgttcaagaatattgccaaaagcatggtgtagaatatagagatgaaggtttcatggatatcatgatgagaaactattatcacattgaaacaatcgctaaggtcaaagcccaagcctaaggttacaaagtataagaagaatttaataaattcatattttcttatatatgcttgcttgttctttctttatataatgcgtgaataaatttgcctatcccatttgttggaagtaagcagaatttgattttttttatcaaacgataattcaaacattattttaaaaaaaaaaaaaaaaa

SEQ ID NO: 6573 - protein, 393 aa, Glycine max
  peptide (1)..(393): Ceres Seq. ID no. 15226512
  misc_feature (121)..(359): Pfam Name: Pfam Description:  Fatty acid desaturase
  misc_feature (9)..(195): NCBI GI NO: 18483177 NR Description: delta 6 fatty acid desaturase
  misc_feature (239)..(392): NCBI GI NO: 18483177 NR Description: delta 6 fatty acid desaturase
  misc_feature (9)..(232): NCBI GI NO: 6070340 NR Description: delta-6 fatty acid desaturase [Mortierella alpina]
  misc_feature (239)..(392): NCBI GI NO: 6070340 NR Description: delta-6 fatty acid desaturase [Mortierella alpina]
  misc_feature (9)..(195): NCBI GI NO: 11559824 NR Description: delta6-fatty acid desaturase
  misc_feature (239)..(392): NCBI GI NO: 11559824 NR Description: delta6-fatty acid desaturase
  misc_feature (9)..(195): NCBI GI NO: 18483175 NR Description: delta 6 fatty acid desaturase [Mortierella alpina]
  misc_feature (239)..(392): NCBI GI NO: 18483175 NR Description: delta 6 fatty acid desaturase [Mortierella alpina]
  misc_feature (9)..(232): NCBI GI NO: 34221930 NR Description: delta6 fatty acid desaturase [Mortierella alpina]
  misc_feature (239)..(373): NCBI GI NO: 34221930 NR Description: delta6 fatty acid desaturase [Mortierella alpina]
MASSNKIHVVIDNKLYDLTKFGKTHPGGSLILENFHDCDVTDYFYAIHSKQAQKMLKNMPSSDIAEEDKVPQTDYLKLLFQLEKTDLFKADYVVEFVQIFHTIVLFFLATWYGQTYPVFSAICLGFGTLIGGWVGHQCDHQRDNIMRDVNLVYATVCDGLSPHWWSTKHNRHHLSTNETEHDGDIQLFPFIYLWTPKKDQDSWNRAIQHIYFTALYTILQIKWQIDSVQWAISQRNYKEMVGLAIHWAWYIFFLPWQVWTLGVLIAGTISAFVVTASHQAEHKYEGKKEFEGEAANVRRSKYQIHDYFTHQVVTTRNIDLHNWFLNYICGGMQYQIEHHVFPRIPLYKLPLVKGVVQEYCQKHGVEYRDEGFMDIMMRNYYHIETIAKVKAQA

SEQ ID NO: 6574 - protein, 339 aa, Glycine max
  peptide (1)..(339): Ceres Seq. ID no. 15226513
  misc_feature (67)..(305): Pfam Name: Pfam Description:  Fatty acid desaturase
  misc_feature (1)..(141): NCBI GI NO: 18483177 NR Description: delta 6 fatty acid desaturase
  misc_feature (185)..(338): NCBI GI NO: 18483177 NR Description: delta 6 fatty acid desaturase
  misc_feature (1)..(178): NCBI GI NO: 6070340 NR Description: delta-6 fatty acid desaturase [Mortierella alpina]
  misc_feature (185)..(338): NCBI GI NO: 6070340 NR Description: delta-6 fatty acid desaturase [Mortierella alpina]
  misc_feature (1)..(141): NCBI GI NO: 11559824 NR Description: delta6-fatty acid desaturase
  misc_feature (185)..(338): NCBI GI NO: 11559824 NR Description: delta6-fatty acid desaturase
  misc_feature (1)..(141): NCBI GI NO: 18483175 NR Description: delta 6 fatty acid desaturase [Mortierella alpina]
  misc_feature (185)..(338): NCBI GI NO: 18483175 NR Description: delta 6 fatty acid desaturase [Mortierella alpina]
  misc_feature (1)..(178): NCBI GI NO: 34221930 NR Description: delta6 fatty acid desaturase [Mortierella alpina]
  misc_feature (185)..(319): NCBI GI NO: 34221930 NR Description: delta6 fatty acid desaturase [Mortierella alpina]
MLKNMPSSDIAEEDKVPQTDYLKLLFQLEKTDLFKADYVVEFVQIFHTIVLFFLATWYGQTYPVFSAICLGFGTLIGGWVGHQCDHQRDNIMRDVNLVYATVCDGLSPHWWSTKHNRHHLSTNETEHDGDIQLFPFIYLWTPKKDQDSWNRAIQHIYFTALYTILQIKWQIDSVQWAISQRNYKEMVGLAIHWAWYIFFLPWQVWTLGVLIAGTISAFVVTASHQAEHKYEGKKEFEGEAANVRRSKYQIHDYFTHQVVTTRNIDLHNWFLNYICGGMQYQIEHHVFPRIPLYKLPLVKGVVQEYCQKHGVEYRDEGFMDIMMRNYYHIETIAKVKAQA

SEQ ID NO: 6575 - protein, 335 aa, Glycine max
  peptide (1)..(335): Ceres Seq. ID no. 15226514
  misc_feature (63)..(301): Pfam Name: Pfam Description:  Fatty acid desaturase
  misc_feature (1)..(137): NCBI GI NO: 18483177 NR Description: delta 6 fatty acid desaturase
  misc_feature (181)..(334): NCBI GI NO: 18483177 NR Description: delta 6 fatty acid desaturase
  misc_feature (1)..(174): NCBI GI NO: 6070340 NR Description: delta-6 fatty acid desaturase [Mortierella alpina]
  misc_feature (181)..(334): NCBI GI NO: 6070340 NR Description: delta-6 fatty acid desaturase [Mortierella alpina]
  misc_feature (1)..(137): NCBI GI NO: 11559824 NR Description: delta6-fatty acid desaturase
  misc_feature (181)..(334): NCBI GI NO: 11559824 NR Description: delta6-fatty acid desaturase
  misc_feature (1)..(137): NCBI GI NO: 18483175 NR Description: delta 6 fatty acid desaturase [Mortierella alpina]
  misc_feature (181)..(334): NCBI GI NO: 18483175 NR Description: delta 6 fatty acid desaturase [Mortierella alpina]
  misc_feature (1)..(174): NCBI GI NO: 34221930 NR Description: delta6 fatty acid desaturase [Mortierella alpina]
  misc_feature (181)..(315): NCBI GI NO: 34221930 NR Description: delta6 fatty acid desaturase [Mortierella alpina]
MPSSDIAEEDKVPQTDYLKLLFQLEKTDLFKADYVVEFVQIFHTIVLFFLATWYGQTYPVFSAICLGFGTLIGGWVGHQCDHQRDNIMRDVNLVYATVCDGLSPHWWSTKHNRHHLSTNETEHDGDIQLFPFIYLWTPKKDQDSWNRAIQHIYFTALYTILQIKWQIDSVQWAISQRNYKEMVGLAIHWAWYIFFLPWQVWTLGVLIAGTISAFVVTASHQAEHKYEGKKEFEGEAANVRRSKYQIHDYFTHQVVTTRNIDLHNWFLNYICGGMQYQIEHHVFPRIPLYKLPLVKGVVQEYCQKHGVEYRDEGFMDIMMRNYYHIETIAKVKAQA

SEQ ID NO: 6576 - DNA, 1358 bp, Glycine max
  misc_feature (1)..(1358): Ceres Seq. ID no. 13639514
gctctttctctcttagaaaacaccctctaccgcctctaagtcctacaagaacccatcccctccccagccgctcccaaaatctcactcttcttactcttcttcctccaagagaagtaaacaaccctcacattcaccacagcagcacacacagacaaagacaaccttgtttgtctccaatcaaaacctttcaagctggcgttcgaaaaccaagacaaccctgtccgagaaatcaagcccaagaataggagaatcatgggtgctggaggccctgatgatgaggacaacaacaggtggccaccgtggctgaagcctctgctaaaagaaagtttctttgttcaatgcaagcttcacgctgattcgcacaagagcgagtgcaacatgtactgcttggattgtatgaacggtgctctctgctctctctgcctcgcttaccataaagatcatcgtgctattcagataaggaggtcctcataccatgatgtgattagggtgaatgagattcagaaggtgttggacatcacaggggtccaaacctacattatcaacagcgcgagggttgttttcttgaatgagaggccgcagccaaggcctggtaaaggtgtcaccaacacttgtgaagtctgcgagcgtagccttcttgattcctaccgattctgttctctaggttgtaagattgttgggacttcaaggaacttcctgaagaaaaagtcagcggcaatggtatcagactcagaggattcttacagcagcaacagcagccatgggaagaagaacagcttcacaccttccacaccgccaccaacttttgttaattacagaacggccaagagaagaaagggaattccacaccgtgccccaatgggagggctagtcatagaatactagaaagttagtaacttttggttatttgctataatgcccctgatatattttacctcaaaatgcaactttctccgtgcagtttcacccgttccaacatacgtgagctttttgctgaaaaaggccggtgctggaagtgtttccttctctgttccttacttgttaatagcgtttgtctatatgggaaaattccaatagaagtgggaaaaaaggttgagaaagtagaaaaaataagacatctgtgaaatagtttgagaaaaagaatggtgtagcaaaataagcaaagttcctttcaaccaaagtacaagaagatgaggaacattataggtttggtttctagagctattatacctaagttttgggtggtgggtgtaaatagtggcttggggaagaagacagtgacaatgtactctttacaaataggtggattgtctatatatggaatggtgaaataataaatagtactaatagtttttctc

SEQ ID NO: 6577 - protein, 210 aa, Glycine max
  peptide (1)..(210): Ceres Seq. ID no. 13639515
  misc_feature (14)..(197): Pfam Name: Pfam Description:  Protein of unknown function, DUF597
  misc_feature (1)..(210): NCBI GI NO: 6714272 NR Description: F6N18.8 [Arabidopsis thaliana]
  misc_feature (5)..(210): NCBI GI NO: 18398555 NR Description: expressed protein [Arabidopsis thaliana]
  misc_feature (5)..(210): NCBI GI NO: 21554139 NR Description: unknown [Arabidopsis thaliana]
  misc_feature (1)..(145): NCBI GI NO: 15236696 NR Description: expressed protein [Arabidopsis thaliana]
  misc_feature (1)..(184): NCBI GI NO: 38346725 NR Description: OSJNBa0086O06.23
  misc_feature (1)..(210): NCBI GI NO: 37537092 NR Description: unknown protein
  misc_feature (7)..(149): NCBI GI NO: 18394936 NR Description: expressed protein [Arabidopsis thaliana]
  misc_feature (7)..(149): NCBI GI NO: 25337907 NR Description: hypothetical protein F9H16
  misc_feature (162)..(202): NCBI GI NO: 18394936 NR Description: expressed protein [Arabidopsis thaliana]
  misc_feature (162)..(202): NCBI GI NO: 25337907 NR Description: hypothetical protein F9H16
MGAGGPDDEDNNRWPPWLKPLLKESFFVQCKLHADSHKSECNMYCLDCMNGALCSLCLAYHKDHRAIQIRRSSYHDVIRVNEIQKVLDITGVQTYIINSARVVFLNERPQPRPGKGVTNTCEVCERSLLDSYRFCSLGCKIVGTSRNFLKKKSAAMVSDSEDSYSSNSSHGKKNSFTPSTPPPTFVNYRTAKRRKGIPHRAPMGGLVIEY

SEQ ID NO: 6578 - protein, 168 aa, Glycine max
  peptide (1)..(168): Ceres Seq. ID no. 13639516
  misc_feature (1)..(155): Pfam Name: Pfam Description:  Protein of unknown function, DUF597
  misc_feature (1)..(168): NCBI GI NO: 6714272 NR Description: F6N18.8 [Arabidopsis thaliana]
  misc_feature (1)..(168): NCBI GI NO: 18398555 NR Description: expressed protein [Arabidopsis thaliana]
  misc_feature (1)..(168): NCBI GI NO: 21554139 NR Description: unknown [Arabidopsis thaliana]
  misc_feature (1)..(103): NCBI GI NO: 15236696 NR Description: expressed protein [Arabidopsis thaliana]
  misc_feature (1)..(142): NCBI GI NO: 38346725 NR Description: OSJNBa0086O06.23
  misc_feature (1)..(168): NCBI GI NO: 37537092 NR Description: unknown protein
  misc_feature (1)..(107): NCBI GI NO: 18394936 NR Description: expressed protein [Arabidopsis thaliana]
  misc_feature (1)..(107): NCBI GI NO: 25337907 NR Description: hypothetical protein F9H16
  misc_feature (120)..(160): NCBI GI NO: 18394936 NR Description: expressed protein [Arabidopsis thaliana]
  misc_feature (120)..(160): NCBI GI NO: 25337907 NR Description: hypothetical protein F9H16
MYCLDCMNGALCSLCLAYHKDHRAIQIRRSSYHDVIRVNEIQKVLDITGVQTYIINSARVVFLNERPQPRPGKGVTNTCEVCERSLLDSYRFCSLGCKIVGTSRNFLKKKSAAMVSDSEDSYSSNSSHGKKNSFTPSTPPPTFVNYRTAKRRKGIPHRAPMGGLVIEY

SEQ ID NO: 6579 - protein, 162 aa, Glycine max
  peptide (1)..(162): Ceres Seq. ID no. 13639517
  misc_feature (1)..(149): Pfam Name: Pfam Description:  Protein of unknown function, DUF597
  misc_feature (1)..(162): NCBI GI NO: 6714272 NR Description: F6N18.8 [Arabidopsis thaliana]
  misc_feature (1)..(162): NCBI GI NO: 18398555 NR Description: expressed protein [Arabidopsis thaliana]
  misc_feature (1)..(162): NCBI GI NO: 21554139 NR Description: unknown [Arabidopsis thaliana]
  misc_feature (1)..(97): NCBI GI NO: 15236696 NR Description: expressed protein [Arabidopsis thaliana]
  misc_feature (1)..(136): NCBI GI NO: 38346725 NR Description: OSJNBa0086O06.23
  misc_feature (1)..(162): NCBI GI NO: 37537092 NR Description: unknown protein
  misc_feature (1)..(101): NCBI GI NO: 18394936 NR Description: expressed protein [Arabidopsis thaliana]
  misc_feature (1)..(101): NCBI GI NO: 25337907 NR Description: hypothetical protein F9H16
  misc_feature (114)..(154): NCBI GI NO: 18394936 NR Description: expressed protein [Arabidopsis thaliana]
  misc_feature (114)..(154): NCBI GI NO: 25337907 NR Description: hypothetical protein F9H16
MNGALCSLCLAYHKDHRAIQIRRSSYHDVIRVNEIQKVLDITGVQTYIINSARVVFLNERPQPRPGKGVTNTCEVCERSLLDSYRFCSLGCKIVGTSRNFLKKKSAAMVSDSEDSYSSNSSHGKKNSFTPSTPPPTFVNYRTAKRRKGIPHRAPMGGLVIEY

SEQ ID NO: 6580 - DNA, 823 bp, Glycine max
  misc_feature (1)..(823): Ceres Seq. ID no. 12610381
aacccaaacccccgctaagcatcagcagcagtgcagcacctcccttctacctcctctgctctgcattcctccttccagctccagccgcaatcaatggccgccatgaagatcaccctcctcgccgtggccgcgatggccgtcttactaggcagcgcgtcagcggtaacctacaacgtcggcgatcagggcggttgggccctcagcaccgactacagcaactgggtgtccggcaagaagttcaacgtgggtgatgacatcgtcttcaagtactcgaccccgacgcacgacgtggtcgaggtcagcaaggccggctacgactcctgcagcaccgacggcgccatcaacaccttaacctccggcaacgacgtcatctccctcaacgccaccggcacccgctacttcatctgtggcgtccctaaccattgcagccccgccgccgccgccagcatgaaggtcgtgatcgacgtcgcctcgggctcctcctcgccgtcgtcacccatgccagctgcaggtcctggcgcgagcaactctcccccggcgccgccctccaacgccgctacctccgtcggtgccacagcaggatttggcctcgtcgccctcctggcggccggtctcatggcttgaacgcatatattgatcagctgccgcgcgcacatacgactttatcttttgttattaactactatactgtagttattatcacgggtgaatacatgtattcttttttagagcgagaatgtgatagttacttgtatctatcacgtctatatgtaatctgcaggccttcatgtctttttatataatgattctagactattatttt

SEQ ID NO: 6581 - protein, 176 aa, Glycine max
  peptide (1)..(176): Ceres Seq. ID no. 12610382
  misc_feature (34)..(115): Pfam Name: Pfam Description:  Plastocyanin-like domain
  misc_feature (1)..(176): NCBI GI NO: 4104058 NR Description: blue copper-binding protein homolog
  misc_feature (1)..(176): NCBI GI NO: 37651973 NR Description: blue copper binding protein
  misc_feature (2)..(176): NCBI GI NO: 38636763 NR Description: putative blue copper binding protein
  misc_feature (1)..(176): NCBI GI NO: 38636760 NR Description: putative blue copper binding protein
  misc_feature (1)..(175): NCBI GI NO: 38636761 NR Description: putative blue copper binding protein
  misc_feature (2)..(175): NCBI GI NO: 38636764 NR Description: putative blue copper binding protein
  misc_feature (1)..(175): NCBI GI NO: 38636838 NR Description: putative blue copper binding protein
  misc_feature (1)..(163): NCBI GI NO: 38346158 NR Description: OSJNBa0079A21.5
  misc_feature (1)..(175): NCBI GI NO: 34900010 NR Description: P0039H02.23
  misc_feature (8)..(174): NCBI GI NO: 34915492 NR Description: contains ESTsD24614
MAAMKITLLAVAAMAVLLGSASAVTYNVGDQGGWALSTDYSNWVSGKKFNVGDDIVFKYSTPTHDVVEVSKAGYDSCSTDGAINTLTSGNDVISLNATGTRYFICGVPNHCSPAAAASMKVVIDVASGSSSPSSPMPAAGPGASNSPPAPPSNAATSVGATAGFGLVALLAAGLMA

SEQ ID NO: 6582 - protein, 173 aa, Glycine max
  peptide (1)..(173): Ceres Seq. ID no. 12610383
  misc_feature (31)..(112): Pfam Name: Pfam Description:  Plastocyanin-like domain
  misc_feature (1)..(173): NCBI GI NO: 4104058 NR Description: blue copper-binding protein homolog
  misc_feature (1)..(173): NCBI GI NO: 37651973 NR Description: blue copper binding protein
  misc_feature (1)..(173): NCBI GI NO: 38636763 NR Description: putative blue copper binding protein
  misc_feature (1)..(173): NCBI GI NO: 38636760 NR Description: putative blue copper binding protein
  misc_feature (1)..(172): NCBI GI NO: 38636761 NR Description: putative blue copper binding protein
  misc_feature (1)..(172): NCBI GI NO: 38636764 NR Description: putative blue copper binding protein
  misc_feature (1)..(172): NCBI GI NO: 38636838 NR Description: putative blue copper binding protein
  misc_feature (1)..(160): NCBI GI NO: 38346158 NR Description: OSJNBa0079A21.5
  misc_feature (1)..(172): NCBI GI NO: 34900010 NR Description: P0039H02.23
  misc_feature (5)..(171): NCBI GI NO: 34915492 NR Description: contains ESTsD24614
MKITLLAVAAMAVLLGSASAVTYNVGDQGGWALSTDYSNWVSGKKFNVGDDIVFKYSTPTHDVVEVSKAGYDSCSTDGAINTLTSGNDVISLNATGTRYFICGVPNHCSPAAAASMKVVIDVASGSSSPSSPMPAAGPGASNSPPAPPSNAATSVGATAGFGLVALLAAGLMA

SEQ ID NO: 6583 - protein, 163 aa, Glycine max
  peptide (1)..(163): Ceres Seq. ID no. 12610384
  misc_feature (21)..(102): Pfam Name: Pfam Description:  Plastocyanin-like domain
  misc_feature (1)..(163): NCBI GI NO: 4104058 NR Description: blue copper-binding protein homolog
  misc_feature (1)..(163): NCBI GI NO: 37651973 NR Description: blue copper binding protein
  misc_feature (1)..(163): NCBI GI NO: 38636763 NR Description: putative blue copper binding protein
  misc_feature (1)..(163): NCBI GI NO: 38636760 NR Description: putative blue copper binding protein
  misc_feature (1)..(162): NCBI GI NO: 38636761 NR Description: putative blue copper binding protein
  misc_feature (1)..(162): NCBI GI NO: 38636764 NR Description: putative blue copper binding protein
  misc_feature (1)..(162): NCBI GI NO: 38636838 NR Description: putative blue copper binding protein
  misc_feature (1)..(150): NCBI GI NO: 38346158 NR Description: OSJNBa0079A21.5
  misc_feature (1)..(162): NCBI GI NO: 34900010 NR Description: P0039H02.23
  misc_feature (1)..(161): NCBI GI NO: 34915492 NR Description: contains ESTsD24614
MAVLLGSASAVTYNVGDQGGWALSTDYSNWVSGKKFNVGDDIVFKYSTPTHDVVEVSKAGYDSCSTDGAINTLTSGNDVISLNATGTRYFICGVPNHCSPAAAASMKVVIDVASGSSSPSSPMPAAGPGASNSPPAPPSNAATSVGATAGFGLVALLAAGLMA

SEQ ID NO: 6584 - DNA, 764 bp, Glycine max
  misc_feature (1)..(764): Ceres Seq. ID no. 13595055
attttaggaggatctctctctctctctgcttctctccatctctctcttagccatggctgctttcacctgtacctctcgtcctcccgtttccctccgttcggagtcaagaatcgcttcctctccatcagcttcactctctgctcggcggatgttcgccgtctcgcctgactcagcaggattgagaatccgtctttcccagtctccctcctcgttgacctcgaaggttcctcgaccacgaagaggcatcgtctgtgaggctcaggaaaccactacagatatagtttcaatagtcaacgacacaacatgggactctctagttctcaaggcggacgggcctgtattggttgacttttgggcaccatggtgtgggccttgcaaaatgattgacccgctcgtgaacgagctagcaaaagagtacaccgggaaggtcaagttctacaaactgaacacggacgactctccttcaaccccaagcaagtacaatgttagaagcatcccaacgatcatgatctttgtcaatggggagaagaaggatgcaatcataggtgcagtgcctagatctacgctcgcgtctagcattgataaattcttgcaatgagatttagactggtgagtctgtgagatctgtttctcctcctcttctgtcttgtgttctcattctctcttgtaatttgtgcttctttgtagctatctgtttcttctattgtatcttttattcatcactgaacatggataaataagatgatgtcatgtttttttatgtt

SEQ ID NO: 6585 - protein, 181 aa, Glycine max
  peptide (1)..(181): Ceres Seq. ID no. 15221468
  misc_feature (1)..(180): NCBI GI NO: 15236327 NR Description: thioredoxin M-type 2, chloroplast precursor
  misc_feature (1)..(180): NCBI GI NO: 6539610 NR Description: thioredoxin m2 [Arabidopsis thaliana]
  misc_feature (1)..(180): NCBI GI NO: 21618235 NR Description: putative M-type thioredoxin [Arabidopsis thaliana]
  misc_feature (1)..(180): NCBI GI NO: 30678634 NR Description: thioredoxin M-type 1, chloroplast precursor
  misc_feature (1)..(181): NCBI GI NO: 11135407 NR Description: Thioredoxin M-type, chloroplast precursor (TRX-M)
  misc_feature (12)..(180): NCBI GI NO: 15594012 NR Description: putative thioredoxin m2 [Pisum sativum]
  misc_feature (18)..(181): NCBI GI NO: 38346628 NR Description: OSJNBa0074L08.22
  misc_feature (13)..(180): NCBI GI NO: 6539614 NR Description: thioredoxin m4 [Arabidopsis thaliana]
  misc_feature (13)..(180): NCBI GI NO: 15232567 NR Description: thioredoxin M-type 4, chloroplast precursor
  misc_feature (38)..(180): NCBI GI NO: 21354 NR Description: thioredoxin M precursor (AA -67 to 114)
MAAFTCTSRPPVSLRSESRIASSPSASLSARRMFAVSPDSAGLRIRLSQSPSSLTSKVPRPRRGIVCEAQETTTDIVSIVNDTTWDSLVLKADGPVLVDFWAPWCGPCKMIDPLVNELAKEYTGKVKFYKLNTDDSPSTPSKYNVRSIPTIMIFVNGEKKDAIIGAVPRSTLASSIDKFLQ

SEQ ID NO: 6586 - protein, 149 aa, Glycine max
  peptide (1)..(149): Ceres Seq. ID no. 15221469
  misc_feature (1)..(148): NCBI GI NO: 15236327 NR Description: thioredoxin M-type 2, chloroplast precursor
  misc_feature (1)..(148): NCBI GI NO: 6539610 NR Description: thioredoxin m2 [Arabidopsis thaliana]
  misc_feature (1)..(148): NCBI GI NO: 21618235 NR Description: putative M-type thioredoxin [Arabidopsis thaliana]
  misc_feature (1)..(148): NCBI GI NO: 30678634 NR Description: thioredoxin M-type 1, chloroplast precursor
  misc_feature (1)..(149): NCBI GI NO: 11135407 NR Description: Thioredoxin M-type, chloroplast precursor (TRX-M)
  misc_feature (1)..(148): NCBI GI NO: 15594012 NR Description: putative thioredoxin m2 [Pisum sativum]
  misc_feature (1)..(149): NCBI GI NO: 38346628 NR Description: OSJNBa0074L08.22
  misc_feature (1)..(148): NCBI GI NO: 6539614 NR Description: thioredoxin m4 [Arabidopsis thaliana]
  misc_feature (1)..(148): NCBI GI NO: 15232567 NR Description: thioredoxin M-type 4, chloroplast precursor
  misc_feature (6)..(148): NCBI GI NO: 21354 NR Description: thioredoxin M precursor (AA -67 to 114)
MFAVSPDSAGLRIRLSQSPSSLTSKVPRPRRGIVCEAQETTTDIVSIVNDTTWDSLVLKADGPVLVDFWAPWCGPCKMIDPLVNELAKEYTGKVKFYKLNTDDSPSTPSKYNVRSIPTIMIFVNGEKKDAIIGAVPRSTLASSIDKFLQ

SEQ ID NO: 6587 - DNA, 959 bp, Glycine max
  misc_feature (1)..(959): Ceres Seq. ID no. 13594918
catcctaatcgaaaaagagtactaaacggaatttgaaaaccaaggctgaagaagttttaagagacatggagctctccgtggttgcaagagacatggaagaagttgtattgctggttgatgatttgagatcactttctgggatttctcgctgtagaatatgtcatgaagaagaatttgagagctccaaaaccttggaagctccttgtgcttgttctgggacagttaagtttgctcacagagattgcattcagacatggtgcgatgagaaaggaaatacaacttgtgaaatatgtctccagcaatatgaacctggatatacagcagccccaaagaaatcgcaaataactgatgcagcaatgaccattagggatagcctgcaaatttcaaggaatgaacaagaaccgttaaacacaagaatagtgggtatcgttgaaggaaacaattactctgaatgcacgtatgctgcagataggaccgcggcttgttgtcgatctctggctctagcttttacactcatcttgcttgtaagacatctttttgcactccttacagatggaatggaagattatccatttacaattcttacggtctttttactaagggccagtggaattattatacccatgtacataattattaaggcgatcggagctattcatgacaatattaagcgtcaccatcatgaggattctgacgatgactcatcgatatctgatggagatgatgaagaaaatgagacaccaaatgatgaaattttaagacattcacaatcataggtcattatttgatttaatttgtatcagagcattatgctgatgctctgtcaagttttaccattttggaggcataattttttattgtaaaaaaaaagaagaacgaaattcacattgaaatacatatagctttgcagtatttatactgtttcctaccaacccaagtatataaaacaaccaaatttc

SEQ ID NO: 6588 - protein, 236 aa, Glycine max
  peptide (1)..(236): Ceres Seq. ID no. 13594919
  misc_feature (29)..(76): Pfam Name: RING finger Pfam Description: Zinc finger, C3HC4 type
  misc_feature (10)..(233): NCBI GI NO: 18411826 NR Description: zinc finger
  misc_feature (10)..(224): NCBI GI NO: 25518349 NR Description: hypothetical protein T14P4
  misc_feature (1)..(204): NCBI GI NO: 34905532 NR Description: B1146F03.23
  misc_feature (10)..(225): NCBI GI NO: 22325409 NR Description: zinc finger
  misc_feature (18)..(203): NCBI GI NO: 15227065 NR Description: zinc finger
  misc_feature (22)..(208): NCBI GI NO: 15223693 NR Description: expressed protein [Arabidopsis thaliana]
  misc_feature (22)..(208): NCBI GI NO: 26451292 NR Description: unknown protein [Arabidopsis thaliana]
  misc_feature (27)..(208): NCBI GI NO: 21537046 NR Description: nucleoside triphosphatase, putative
  misc_feature (28)..(226): NCBI GI NO: 15240828 NR Description: zinc finger
  misc_feature (29)..(203): NCBI GI NO: 18424590 NR Description: expressed protein [Arabidopsis thaliana]
MELSVVARDMEEVVLLVDDLRSLSGISRCRICHEEEFESSKTLEAPCACSGTVKFAHRDCIQTWCDEKGNTTCEICLQQYEPGYTAAPKKSQITDAAMTIRDSLQISRNEQEPLNTRIVGIVEGNNYSECTYAADRTAACCRSLALAFTLILLVRHLFALLTDGMEDYPFTILTVFLLRASGIIIPMYIIIKAIGAIHDNIKRHHHEDSDDDSSISDGDDEENETPNDEILRHSQS

SEQ ID NO: 6589 - protein, 227 aa, Glycine max
  peptide (1)..(227): Ceres Seq. ID no. 13594920
  misc_feature (20)..(67): Pfam Name: RING finger Pfam Description: Zinc finger, C3HC4 type
  misc_feature (1)..(224): NCBI GI NO: 18411826 NR Description: zinc finger
  misc_feature (1)..(215): NCBI GI NO: 25518349 NR Description: hypothetical protein T14P4
  misc_feature (1)..(195): NCBI GI NO: 34905532 NR Description: B1146F03.23
  misc_feature (1)..(216): NCBI GI NO: 22325409 NR Description: zinc finger
  misc_feature (9)..(194): NCBI GI NO: 15227065 NR Description: zinc finger
  misc_feature (13)..(199): NCBI GI NO: 15223693 NR Description: expressed protein [Arabidopsis thaliana]
  misc_feature (13)..(199): NCBI GI NO: 26451292 NR Description: unknown protein [Arabidopsis thaliana]
  misc_feature (18)..(199): NCBI GI NO: 21537046 NR Description: nucleoside triphosphatase, putative
  misc_feature (19)..(217): NCBI GI NO: 15240828 NR Description: zinc finger
  misc_feature (20)..(194): NCBI GI NO: 18424590 NR Description: expressed protein [Arabidopsis thaliana]
MEEVVLLVDDLRSLSGISRCRICHEEEFESSKTLEAPCACSGTVKFAHRDCIQTWCDEKGNTTCEICLQQYEPGYTAAPKKSQITDAAMTIRDSLQISRNEQEPLNTRIVGIVEGNNYSECTYAADRTAACCRSLALAFTLILLVRHLFALLTDGMEDYPFTILTVFLLRASGIIIPMYIIIKAIGAIHDNIKRHHHEDSDDDSSISDGDDEENETPNDEILRHSQS

SEQ ID NO: 6590 - protein, 139 aa, Glycine max
  peptide (1)..(139): Ceres Seq. ID no. 13594921
  misc_feature (1)..(136): NCBI GI NO: 18411826 NR Description: zinc finger
  misc_feature (1)..(127): NCBI GI NO: 25518349 NR Description: hypothetical protein T14P4
  misc_feature (1)..(107): NCBI GI NO: 34905532 NR Description: B1146F03.23
  misc_feature (1)..(128): NCBI GI NO: 22325409 NR Description: zinc finger
  misc_feature (1)..(106): NCBI GI NO: 15227065 NR Description: zinc finger
  misc_feature (1)..(111): NCBI GI NO: 15223693 NR Description: expressed protein [Arabidopsis thaliana]
  misc_feature (1)..(111): NCBI GI NO: 26451292 NR Description: unknown protein [Arabidopsis thaliana]
  misc_feature (1)..(111): NCBI GI NO: 21537046 NR Description: nucleoside triphosphatase, putative
  misc_feature (1)..(129): NCBI GI NO: 15240828 NR Description: zinc finger
  misc_feature (1)..(106): NCBI GI NO: 18424590 NR Description: expressed protein [Arabidopsis thaliana]
MTIRDSLQISRNEQEPLNTRIVGIVEGNNYSECTYAADRTAACCRSLALAFTLILLVRHLFALLTDGMEDYPFTILTVFLLRASGIIIPMYIIIKAIGAIHDNIKRHHHEDSDDDSSISDGDDEENETPNDEILRHSQS

SEQ ID NO: 6591 - DNA, 820 bp, Glycine max
  misc_feature (1)..(820): Ceres Seq. ID no. 13594922
gtttttcccaaataagcgtacgtcgatgtcaaacttggtttgagcaaacgcgcattcgctgacactttcactgcgtgattgattaaccttgctggtttccaccaaattggaattgtttgattgttctttgattttcaaacagcaatcactttcacaatggtgattgcaacaagaaatttcttcgtatctcttttcttaatatcctcatttttttgcacaacactccttgccaagtcttctcacccaatctccgatgctcaagtcaggaagaacaagcttcagtgctatgctgatattgacagtgggttgtggggttggtcatgcaaatcaacggtgatagcaagggagaattgtgctctaagatgcctttcacccgcttgttacgagctcatctacgagagtgacccgctcgaagagggagaaaaggactttattcgaagccaagagtacaaatactgcatgcacaagttgtccatgggagagagccttgagggtgttaagggtgcttttagcaactaatcaagcgaaaattctaaattggaggtggaagctatgatgaatttatatatgccctgttaaatgtagattaaagaaaatgccaagagtcttgagagcatttttttctttcaattaattaattataatgaaccatatacaagtatatgctcttagaaatccagtacaatctagaagaaaacaacgcttctcaaaaggtgagtgctttagtttctaacccttcaagactctattaaggtagtatataagttgcttcatattttgacatttctaaaagaattttatctgttagtaaatttccgtc

SEQ ID NO: 6592 - protein, 120 aa, Glycine max
  peptide (1)..(120): Ceres Seq. ID no. 15221432
  misc_feature (6)..(118): NCBI GI NO: 21618076 NR Description: unknown [Arabidopsis thaliana]
  misc_feature (6)..(118): NCBI GI NO: 18418364 NR Description: expressed protein [Arabidopsis thaliana]
  misc_feature (6)..(104): NCBI GI NO: 11346183 NR Description: hypothetical protein K10A8_90 - Arabidopsisthaliana
  misc_feature (33)..(119): NCBI GI NO: 34902472 NR Description: Putative DNAJ protein
MVIATRNFFVSLFLISSFFCTTLLAKSSHPISDAQVRKNKLQCYADIDSGLWGWSCKSTVIARENCALRCLSPACYELIYESDPLEEGEKDFIRSQEYKYCMHKLSMGESLEGVKGAFSN

SEQ ID NO: 6593 - DNA, 785 bp, Glycine max
  misc_feature (1)..(785): Ceres Seq. ID no. 12609177
gagaagagattagagattccagattcggtcgctaataatatttggagttgggaggggtgacctgagattcacgacgcaaaacaaatcatcatgtggagaagaatcgtttcctctggtctcaaaaccctagcctccgatttcgccgctgcttctcctcgtcgatccgtagccaccaccgccgtgagacccttgaggttctatctcgcatccaattcccttttccctcgccatttcagctccgaatcagtggagaccgttgggaagaagaaggtggaggatgttatgcccattgcaaccggacatgaaaaggaggagcttgaagctgaacttgaggggaggaggctgcttgacattgacttccctgaaggtccttttggaactaaggaagctcctgctatcgtaaagtcctactatgacaagcgaattgtgggatgccctggtggtgaaggcgaggatgaacacgatgttgtgtggttctggctggagaaaggaaagtcttttgaatgccccgtttgcactcagtactttgagctggaagtggttggtccaggtggacctcccgatggtcacggtgatgaagacgatgagcaccaccactgattccggcttctcccttgctgcgagttttgcttttttttttttattattttttactgcaataaaaaacatatgctgctgggtgagacagttaaaaatgtttttgatccttttggaacaacacttcggtatcggaagttgtcaaaatgcctaaaaatgttttacttttgtaccaattcttgaatcag

SEQ ID NO: 6594 - protein, 169 aa, Glycine max
  peptide (1)..(169): Ceres Seq. ID no. 12609178
  misc_feature (58)..(154): Pfam Name: Pfam Description:  Cytochrome c oxidase subunit Vb
  misc_feature (1)..(169): NCBI GI NO: 15232644 NR Description: putative cytochrome c oxidase subunit Vb
  misc_feature (1)..(168): NCBI GI NO: 21592567 NR Description: cytochrome c oxidase subunit, putative
  misc_feature (1)..(168): NCBI GI NO: 15220092 NR Description: cytochrome c oxidase subunit, putative
  misc_feature (43)..(169): NCBI GI NO: 5803264 NR Description: ESTs AU057456
  misc_feature (1)..(169): NCBI GI NO: 34912592 NR Description: cytochrome c oxidase subunit Vb precursor
  misc_feature (1)..(107): NCBI GI NO: 7484634 NR Description: probable cytochrome-c oxidase (EC 1
  misc_feature (121)..(168): NCBI GI NO: 5903035 NR Description: Similar to gb|D85381 cytochrome c oxidase subunitVb precursor from Oryza sativa
  misc_feature (68)..(148): NCBI GI NO: 223590 NR Description: oxidase IV,cytochrome
  misc_feature (68)..(148): NCBI GI NO: 117102 NR Description: CYTOCHROME C OXIDASE POLYPEPTIDE VB (VI)
  misc_feature (68)..(148): NCBI GI NO: 17017988 NR Description: cytochrome c oxidase subunit Vb precursor
MWRRIVSSGLKTLASDFAAASPRRSVATTAVRPLRFYLASNSLFPRHFSSESVETVGKKKVEDVMPIATGHEKEELEAELEGRRLLDIDFPEGPFGTKEAPAIVKSYYDKRIVGCPGGEGEDEHDVVWFWLEKGKSFECPVCTQYFELEVVGPGGPPDGHGDEDDEHHH

SEQ ID NO: 6595 - protein, 112 aa, Glycine max
  peptide (1)..(112): Ceres Seq. ID no. 12609179
MTSELWDALVVKARMNTMLCGSGWRKESLLNAPFALSTLSWKWLVQVDLPMVTVMKTMSTTTDSGFSLAASFAFFFLLFFTAIKNICCWVRQLKMFLILLEQHFGIGSCQNA

SEQ ID NO: 6596 - protein, 105 aa, Glycine max
  peptide (1)..(105): Ceres Seq. ID no. 12609180
  misc_feature (1)..(90): Pfam Name: Pfam Description:  Cytochrome c oxidase subunit Vb
  misc_feature (1)..(105): NCBI GI NO: 15232644 NR Description: putative cytochrome c oxidase subunit Vb
  misc_feature (1)..(104): NCBI GI NO: 21592567 NR Description: cytochrome c oxidase subunit, putative
  misc_feature (1)..(104): NCBI GI NO: 15220092 NR Description: cytochrome c oxidase subunit, putative
  misc_feature (1)..(105): NCBI GI NO: 5803264 NR Description: ESTs AU057456
  misc_feature (1)..(105): NCBI GI NO: 34912592 NR Description: cytochrome c oxidase subunit Vb precursor
  misc_feature (1)..(43): NCBI GI NO: 7484634 NR Description: probable cytochrome-c oxidase (EC 1
  misc_feature (57)..(104): NCBI GI NO: 5903035 NR Description: Similar to gb|D85381 cytochrome c oxidase subunitVb precursor from Oryza sativa
  misc_feature (4)..(84): NCBI GI NO: 223590 NR Description: oxidase IV,cytochrome
  misc_feature (4)..(84): NCBI GI NO: 117102 NR Description: CYTOCHROME C OXIDASE POLYPEPTIDE VB (VI)
  misc_feature (4)..(84): NCBI GI NO: 17017988 NR Description: cytochrome c oxidase subunit Vb precursor
MPIATGHEKEELEAELEGRRLLDIDFPEGPFGTKEAPAIVKSYYDKRIVGCPGGEGEDEHDVVWFWLEKGKSFECPVCTQYFELEVVGPGGPPDGHGDEDDEHHH

SEQ ID NO: 6597 - DNA, 827 bp, Glycine max
  misc_feature (1)..(827): Ceres Seq. ID no. 12609935
agatcaaatcgagcctgcccttctcgctcgcgtctccactccatttccctttcccccgaggaggccgccgccgtgacctgagagcacacgcacgcaccatgtggcgccgcctccaaaccctagcccccgccctccgccgcgctgccgccgcagccggcgcggccccctccccggccagcgcccgggccgctcccctctccacggcggtcgcggccttccgccgcactgggctcctcctctctgcggacaagccggcggcgtcagggacgagtgtggaggacgtcatgcccattgccacggggttggagcgcgaggagctcgaggcggagctccaggggaagaagcgcttcgacatggatcctcctgtcggtccctttggtaccaaggaggcaccggccgtcattgagtcctattttgacaagagaatagtaggttgccctggtgatgaaggagaggatgagcatgacgtcgtatggttctggttgaaaaaagatgagccacatgaatgcccagtctgctcacaatactttgtgcttaaggtcattggtgatggtggaaatccagatgggcatgatgatgatgatgatggtcatcaccactaaggatgcctcgtggttctgaaaataagaattttatgaggcatatgatttcgcttacgcgttctaagcaccagactgctccacggcatccttgtttatgaatatacatttggccatcaagcaggcggtagttttcgccttagtttttttttgtggaaacaaaactcttttcagatttgtccagtgcatgtcttatggagcatcatcaaataagagatgactgcagag

SEQ ID NO: 6598 - protein, 199 aa, Glycine max
  peptide (1)..(199): Ceres Seq. ID no. 12609936
  misc_feature (78)..(184): Pfam Name: Pfam Description:  Cytochrome c oxidase subunit Vb
  misc_feature (33)..(199): NCBI GI NO: 34912592 NR Description: cytochrome c oxidase subunit Vb precursor
  misc_feature (77)..(199): NCBI GI NO: 5803264 NR Description: ESTs AU057456
  misc_feature (33)..(199): NCBI GI NO: 15232644 NR Description: putative cytochrome c oxidase subunit Vb
  misc_feature (23)..(198): NCBI GI NO: 15220092 NR Description: cytochrome c oxidase subunit, putative
  misc_feature (23)..(198): NCBI GI NO: 21592567 NR Description: cytochrome c oxidase subunit, putative
  misc_feature (68)..(178): NCBI GI NO: 6753500 NR Description: cytochrome c oxidase, subunit Vb [Mus musculus]
  misc_feature (68)..(178): NCBI GI NO: 55992 NR Description: cytochrome c oxidase subunit VIa (AA 1 - 118)
  misc_feature (68)..(178): NCBI GI NO: 16758362 NR Description: cytochrome c oxidase subunit Vb
  misc_feature (68)..(178): NCBI GI NO: 12842467 NR Description: unnamed protein product [Mus musculus]
  misc_feature (68)..(178): NCBI GI NO: 473729 NR Description: cytochrome c oxidase subunit Vb
IKSSLPFSLASPLHFPFPRGGRRRDLRAHARTMWRRLQTLAPALRRAAAAAGAAPSPASARAAPLSTAVAAFRRTGLLLSADKPAASGTSVEDVMPIATGLEREELEAELQGKKRFDMDPPVGPFGTKEAPAVIESYFDKRIVGCPGDEGEDEHDVVWFWLKKDEPHECPVCSQYFVLKVIGDGGNPDGHDDDDDGHHH

SEQ ID NO: 6599 - protein, 167 aa, Glycine max
  peptide (1)..(167): Ceres Seq. ID no. 12609937
  misc_feature (46)..(152): Pfam Name: Pfam Description:  Cytochrome c oxidase subunit Vb
  misc_feature (1)..(167): NCBI GI NO: 34912592 NR Description: cytochrome c oxidase subunit Vb precursor
  misc_feature (45)..(167): NCBI GI NO: 5803264 NR Description: ESTs AU057456
  misc_feature (1)..(167): NCBI GI NO: 15232644 NR Description: putative cytochrome c oxidase subunit Vb
  misc_feature (1)..(166): NCBI GI NO: 15220092 NR Description: cytochrome c oxidase subunit, putative
  misc_feature (1)..(166): NCBI GI NO: 21592567 NR Description: cytochrome c oxidase subunit, putative
  misc_feature (36)..(146): NCBI GI NO: 6753500 NR Description: cytochrome c oxidase, subunit Vb [Mus musculus]
  misc_feature (36)..(146): NCBI GI NO: 55992 NR Description: cytochrome c oxidase subunit VIa (AA 1 - 118)
  misc_feature (36)..(146): NCBI GI NO: 16758362 NR Description: cytochrome c oxidase subunit Vb
  misc_feature (36)..(146): NCBI GI NO: 12842467 NR Description: unnamed protein product [Mus musculus]
  misc_feature (36)..(146): NCBI GI NO: 473729 NR Description: cytochrome c oxidase subunit Vb
MWRRLQTLAPALRRAAAAAGAAPSPASARAAPLSTAVAAFRRTGLLLSADKPAASGTSVEDVMPIATGLEREELEAELQGKKRFDMDPPVGPFGTKEAPAVIESYFDKRIVGCPGDEGEDEHDVVWFWLKKDEPHECPVCSQYFVLKVIGDGGNPDGHDDDDDGHHH

SEQ ID NO: 6600 - protein, 105 aa, Glycine max
  peptide (1)..(105): Ceres Seq. ID no. 12609938
  misc_feature (1)..(90): Pfam Name: Pfam Description:  Cytochrome c oxidase subunit Vb
  misc_feature (1)..(105): NCBI GI NO: 34912592 NR Description: cytochrome c oxidase subunit Vb precursor
  misc_feature (1)..(105): NCBI GI NO: 5803264 NR Description: ESTs AU057456
  misc_feature (1)..(105): NCBI GI NO: 15232644 NR Description: putative cytochrome c oxidase subunit Vb
  misc_feature (1)..(104): NCBI GI NO: 15220092 NR Description: cytochrome c oxidase subunit, putative
  misc_feature (1)..(104): NCBI GI NO: 21592567 NR Description: cytochrome c oxidase subunit, putative
  misc_feature (1)..(84): NCBI GI NO: 6753500 NR Description: cytochrome c oxidase, subunit Vb [Mus musculus]
  misc_feature (1)..(84): NCBI GI NO: 55992 NR Description: cytochrome c oxidase subunit VIa (AA 1 - 118)
  misc_feature (1)..(84): NCBI GI NO: 16758362 NR Description: cytochrome c oxidase subunit Vb
  misc_feature (1)..(84): NCBI GI NO: 12842467 NR Description: unnamed protein product [Mus musculus]
  misc_feature (1)..(84): NCBI GI NO: 473729 NR Description: cytochrome c oxidase subunit Vb
MPIATGLEREELEAELQGKKRFDMDPPVGPFGTKEAPAVIESYFDKRIVGCPGDEGEDEHDVVWFWLKKDEPHECPVCSQYFVLKVIGDGGNPDGHDDDDDGHHH

SEQ ID NO: 6601 - DNA, 1186 bp, Glycine max
  misc_feature (1)..(1186): Ceres Seq. ID no. 12609185
agaaaccgaccaagaagcaccagcacacgagttcgaggtagacaaacgtctcgagagaaagacagggagaacatggcggccatctcctccacctcctacttctcctcgcagccgcagctgccggcgtccgacggcgccaaccctgccaccgccagaagcagcagcagcaacggccgggagccccggaggcggcggaccggcaggtgcatcatgctggaagcagacgctgcctctgctagtggcagtggcggcgcggcggcggggaggacgaggagcctgacggaggaggacctggaggagctcaagggctgcctcgacctcggcttcggcttctcctaccaccagatcccgggcctctgcgggacgctccccggcctggagctctgctactccatgacgcggaggttcctcgacgagcagaggactctggtcgggcagctggagcctgctactgcggcggcagcgcccatcacggattggaagatctccggccctggtgatgatcctgacgaagtgaaagctcggctcaagtattgggcacagacagtggcatgcacagtcaaactctgcacctagtggagtggaggtcgggactagggagtttgcgagttcatcccatgacatgtgtgctaagatgggctcaactgaaggtggctgaagctgaagattctgcttacatggctctaagatatgttataccgaggagatgcttcggttgcgcgctatcgggataatataacagatcggtgctttccgaaaacttcagagagggagatgacttatgacaccacagaactgcgagaaatcttgaggcgatatgtcgtctaagctttaatgaaagcatcagaagcttgtcattcgtcataggcaatggtcactaggtgttctaaacgtgcaactcggagacctgctagtgcttttaatcttccttgtaatggtcattaggagctccaactgtgttctactgcgccaagttgagctttgcaaatatgtcagtaggttggctcaagtatggatttgttctcacgttcctgaactttaatttgctttcaaagagtagacactgtataggacgttcgtgatggacacagcgattcggtgctcgagctcagatgctcccgaaatcactgtcgtccgttcctgtcttgggatcccaacaattcagaatcgaatattccgttcatgg

SEQ ID NO: 6602 - protein, 191 aa, Glycine max
  peptide (1)..(191): Ceres Seq. ID no. 12609186
  misc_feature (25)..(166): NCBI GI NO: 34907664 NR Description: P0506A10.18
  misc_feature (89)..(191): NCBI GI NO: 30684991 NR Description: expressed protein [Arabidopsis thaliana]
  misc_feature (29)..(191): NCBI GI NO: 25406874 NR Description: hypothetical protein
  misc_feature (14)..(191): NCBI GI NO: 30689349 NR Description: expressed protein [Arabidopsis thaliana]
  misc_feature (14)..(188): NCBI GI NO: 25408860 NR Description: hypothetical protein At2g43340
  misc_feature (29)..(184): NCBI GI NO: 15221309 NR Description: unknown protein; protein id: At1g05870.1
  misc_feature (89)..(167): NCBI GI NO: 25408168 NR Description: hypothetical protein At2g31560
  misc_feature (93)..(187): NCBI GI NO: 15228829 NR Description: hypothetical protein; protein id: At3g22690.1
  misc_feature (88)..(188): NCBI GI NO: 18418346 NR Description: Expressed protein; protein id: At4g33985
  misc_feature (88)..(188): NCBI GI NO: 21617998 NR Description: unknown [Arabidopsis thaliana]
RNRPRSTSTRVRGRQTSREKDRENMAAISSTSYFSSQPQLPASDGANPATARSSSSNGREPRRRRTGRCIMLEADAASASGSGGAAAGRTRSLTEEDLEELKGCLDLGFGFSYHQIPGLCGTLPGLELCYSMTRRFLDEQRTLVGQLEPATAAAAPITDWKISGPGDDPDEVKARLKYWAQTVACTVKLCT

SEQ ID NO: 6603 - protein, 167 aa, Glycine max
  peptide (1)..(167): Ceres Seq. ID no. 12609187
  misc_feature (1)..(142): NCBI GI NO: 34907664 NR Description: P0506A10.18
  misc_feature (65)..(167): NCBI GI NO: 30684991 NR Description: expressed protein [Arabidopsis thaliana]
  misc_feature (5)..(167): NCBI GI NO: 25406874 NR Description: hypothetical protein
  misc_feature (1)..(167): NCBI GI NO: 30689349 NR Description: expressed protein [Arabidopsis thaliana]
  misc_feature (1)..(164): NCBI GI NO: 25408860 NR Description: hypothetical protein At2g43340
  misc_feature (5)..(160): NCBI GI NO: 15221309 NR Description: unknown protein; protein id: At1g05870.1
  misc_feature (65)..(143): NCBI GI NO: 25408168 NR Description: hypothetical protein At2g31560
  misc_feature (69)..(163): NCBI GI NO: 15228829 NR Description: hypothetical protein; protein id: At3g22690.1
  misc_feature (64)..(164): NCBI GI NO: 18418346 NR Description: Expressed protein; protein id: At4g33985
  misc_feature (64)..(164): NCBI GI NO: 21617998 NR Description: unknown [Arabidopsis thaliana]
MAAISSTSYFSSQPQLPASDGANPATARSSSSNGREPRRRRTGRCIMLEADAASASGSGGAAAGRTRSLTEEDLEELKGCLDLGFGFSYHQIPGLCGTLPGLELCYSMTRRFLDEQRTLVGQLEPATAAAAPITDWKISGPGDDPDEVKARLKYWAQTVACTVKLCT

SEQ ID NO: 6604 - protein, 121 aa, Glycine max
  peptide (1)..(121): Ceres Seq. ID no. 12609188
  misc_feature (1)..(96): NCBI GI NO: 34907664 NR Description: P0506A10.18
  misc_feature (19)..(121): NCBI GI NO: 30684991 NR Description: expressed protein [Arabidopsis thaliana]
  misc_feature (1)..(121): NCBI GI NO: 25406874 NR Description: hypothetical protein
  misc_feature (1)..(121): NCBI GI NO: 30689349 NR Description: expressed protein [Arabidopsis thaliana]
  misc_feature (1)..(118): NCBI GI NO: 25408860 NR Description: hypothetical protein At2g43340
  misc_feature (1)..(114): NCBI GI NO: 15221309 NR Description: unknown protein; protein id: At1g05870.1
  misc_feature (19)..(97): NCBI GI NO: 25408168 NR Description: hypothetical protein At2g31560
  misc_feature (23)..(117): NCBI GI NO: 15228829 NR Description: hypothetical protein; protein id: At3g22690.1
  misc_feature (18)..(118): NCBI GI NO: 18418346 NR Description: Expressed protein; protein id: At4g33985
  misc_feature (18)..(118): NCBI GI NO: 21617998 NR Description: unknown [Arabidopsis thaliana]
MLEADAASASGSGGAAAGRTRSLTEEDLEELKGCLDLGFGFSYHQIPGLCGTLPGLELCYSMTRRFLDEQRTLVGQLEPATAAAAPITDWKISGPGDDPDEVKARLKYWAQTVACTVKLCT

SEQ ID NO: 6605 - DNA, 906 bp, Glycine max
  misc_feature (1)..(906): Ceres Seq. ID no. 13594624
acacattcaaactaataactctcaaaaactgagagcagaagagagtagaggagaaacaaatgtccatatccatggcgctattctctccgccgatctcttcttcagttcaaaaccccaagatctcgttccctctcctctccaccaagcgcttctctctcctctccgtcactcgcgcttcctccgattctgctgcagtctctgcaaccaccgtagagattccgaagcccgcgtcggtttctgtagaggaggtgccatctaaacctcctgcggaaagctcctccgacgagactgatctgccaaccacggcgacgggaatcaagtttcaggatgcgaagtgggttaatggaacctgggatctgaaacagttcgagaaagacgggaaaaccgattgggattctattatcgtcgctgaggcaaagaggagaaagtggcttgaagataacccagaaacaactactaacgctgagcctgttcttttcgacacctcgatcattccatggtgggcgtggatgaagagataccatctaccagaagctgaactcctcaatggtcgtgctgcgatgatagggttcttcatggcttactttgttgacagccttaccggagtaggacttgttgatcaaatgggaaacttcttctgcaaaacactcttgtttgtggctgtagctggagttcttttcatccgcaagaacgaagatttagataagctcaaggttctgatcgaagagacgacgctatatgacaagcaatggcaagcggcttggaaagagccggaatcatcatcatcgacgctttcttcaaagaagtgaacaaaatctttctcgctttttgtttcctcttttctcatgtgatgtttgtgatcagtgaaaaaagtctcaagataaacgcaaaatctatttggctttg

SEQ ID NO: 6606 - protein, 249 aa, Glycine max
  peptide (1)..(249): Ceres Seq. ID no. 13594625
  misc_feature (1)..(249): NCBI GI NO: 30695110 NR Description: Lil3 protein [Arabidopsis thaliana]
  misc_feature (5)..(249): NCBI GI NO: 8978078 NR Description: Lil3 protein [Arabidopsis thaliana]
  misc_feature (19)..(249): NCBI GI NO: 21555799 NR Description: Lil3 protein [Arabidopsis thaliana]
  misc_feature (19)..(249): NCBI GI NO: 7485188 NR Description: hypothetical protein - Arabidopsis thaliana
  misc_feature (19)..(249): NCBI GI NO: 18414927 NR Description: Lil3 protein [Arabidopsis thaliana]
MSISMALFSPPISSSVQNPKISFPLLSTKRFSLLSVTRASSDSAAVSATTVEIPKPASVSVEEVPSKPPAESSSDETDLPTTATGIKFQDAKWVNGTWDLKQFEKDGKTDWDSIIVAEAKRRKWLEDNPETTTNAEPVLFDTSIIPWWAWMKRYHLPEAELLNGRAAMIGFFMAYFVDSLTGVGLVDQMGNFFCKTLLFVAVAGVLFIRKNEDLDKLKVLIEETTLYDKQWQAAWKEPESSSSTLSSKK

SEQ ID NO: 6607 - protein, 245 aa, Glycine max
  peptide (1)..(245): Ceres Seq. ID no. 13594626
  misc_feature (1)..(245): NCBI GI NO: 30695110 NR Description: Lil3 protein [Arabidopsis thaliana]
  misc_feature (1)..(245): NCBI GI NO: 8978078 NR Description: Lil3 protein [Arabidopsis thaliana]
  misc_feature (15)..(245): NCBI GI NO: 21555799 NR Description: Lil3 protein [Arabidopsis thaliana]
  misc_feature (15)..(245): NCBI GI NO: 7485188 NR Description: hypothetical protein - Arabidopsis thaliana
  misc_feature (15)..(245): NCBI GI NO: 18414927 NR Description: Lil3 protein [Arabidopsis thaliana]
MALFSPPISSSVQNPKISFPLLSTKRFSLLSVTRASSDSAAVSATTVEIPKPASVSVEEVPSKPPAESSSDETDLPTTATGIKFQDAKWVNGTWDLKQFEKDGKTDWDSIIVAEAKRRKWLEDNPETTTNAEPVLFDTSIIPWWAWMKRYHLPEAELLNGRAAMIGFFMAYFVDSLTGVGLVDQMGNFFCKTLLFVAVAGVLFIRKNEDLDKLKVLIEETTLYDKQWQAAWKEPESSSSTLSSKK

SEQ ID NO: 6608 - DNA, 819 bp, Glycine max
  misc_feature (1)..(819): Ceres Seq. ID no. 14301427
ctaattccagaaccatcccctccgacctaggctatggctttcatcgtgtccaagctcgcgcgggcagccctcgcatcccgccccgttggagatattgctggtggcatctccccgtgtctctcccggctctatctggcggctggtaccagccgtcgcatgtttgcagctgcaggcggtcccaagtcaaaagaagcaccccgaatatttccccttgttgatgagaattccattaagtcgaaggaatccctatgggccttgtatgaatgctggtgcaagtattggggggtatcccgtgaccgtgaagagatggtccgccggttcaagtcatttgaggctactgcacagtgggtttacaaaatgaacaactctgggtgttcgcaagtgtctcaactgggcccgcatgcagatttttcagagagtgagtttgctgaggtggtgtttcctccacttcctgatgatgatgatgaagacataaaagagatggtgccaggtcaagatttgggccaggagcttgaggagcccttaaataattaattcgagaaattatgaacttgtcttactccatccgttcccaaatataagtctttctagagattcaacaagtgactacatacggagcaaaatgagtgaatctgcactctaaaatatgtctacatgcatacgtatgttgtagtccatttgaaatgtctaaaaagacttatatgtaggaacggatgagtatttggttgtggtaatactgtggtactgggattattgttgttgtctggttgttctcatggaaccaaattagaattgaaataactttgtgttattgctctt

SEQ ID NO: 6609 - protein, 166 aa, Glycine max
  peptide (1)..(166): Ceres Seq. ID no. 14301428
  misc_feature (61)..(133): NCBI GI NO: 34897042 NR Description: hypothetical protein
  misc_feature (63)..(135): NCBI GI NO: 40786566 NR Description: putative cysteine proteinase
  misc_feature (1)..(111): NCBI GI NO: 38605767 NR Description: OSJNBa0044K18.10
MAFIVSKLARAALASRPVGDIAGGISPCLSRLYLAAGTSRRMFAAAGGPKSKEAPRIFPLVDENSIKSKESLWALYECWCKYWGVSRDREEMVRRFKSFEATAQWVYKMNNSGCSQVSQLGPHADFSESEFAEVVFPPLPDDDDEDIKEMVPGQDLGQELEEPLNN

SEQ ID NO: 6610 - protein, 125 aa, Glycine max
  peptide (1)..(125): Ceres Seq. ID no. 14301429
  misc_feature (20)..(92): NCBI GI NO: 34897042 NR Description: hypothetical protein
  misc_feature (22)..(94): NCBI GI NO: 40786566 NR Description: putative cysteine proteinase
  misc_feature (1)..(70): NCBI GI NO: 38605767 NR Description: OSJNBa0044K18.10
MFAAAGGPKSKEAPRIFPLVDENSIKSKESLWALYECWCKYWGVSRDREEMVRRFKSFEATAQWVYKMNNSGCSQVSQLGPHADFSESEFAEVVFPPLPDDDDEDIKEMVPGQDLGQELEEPLNN

SEQ ID NO: 6611 - DNA, 618 bp, Glycine max
  misc_feature (1)..(618): Ceres Seq. ID no. 15224985
tcccaaacccaaagcactagtagctatcccactcaagcacacgctcacgatggcatccagagctgctaccttcgtcgccctgagcctcctcctctccgccgtcgccacgcacggctgcggaccctattgccagccgccagtcgtcgtgccgacaccgcccgttgtcgttccgccgccgtaccatggaggaggagcgcacggccacggcgggcagtgctctatcgacgccctaaagctgagggtgtgcgccaacgttctcggcggcctgctcggcctcaaggtcggcgttccggcgcacgacgagtgctgcccgctgctccaggggttggtcgaccttgacgccgccgtctgcctgtgcaccgccgtcagggccaacgtcctcggcatccacctcaacgtgcctgtggacatcagcctcctcctcaaccactgcggcaagacgtgcccgtccgagttcacttgcccagcccattaacggacgcctactgctcacgggcgccgaataaaatttgctttcgatccgtacgtcgttgttattttcgtgtccacatttgaatccttgtaaccagtactactctttttgtaacaatcatcagccatccaaaaaaaaaaaaaaaa

SEQ ID NO: 6612 - protein, 157 aa, Glycine max
  peptide (1)..(157): Ceres Seq. ID no. 15224986
  misc_feature (72)..(154): Pfam Name: Pfam Description:  Protease inhibitor/seed storage/LTP family
  misc_feature (19)..(154): NCBI GI NO: 37536704 NR Description: putative lipid transfer protein
  misc_feature (18)..(154): NCBI GI NO: 37536702 NR Description: putative lipid transfer protein
  misc_feature (18)..(154): NCBI GI NO: 1084460 NR Description: RCc2 protein - rice
  misc_feature (17)..(154): NCBI GI NO: 37533212 NR Description: putative lipid transfer protein
  misc_feature (17)..(154): NCBI GI NO: 37533214 NR Description: putative lipid tranfer protein
  misc_feature (17)..(155): NCBI GI NO: 2226329 NR Description: physical impedance induced protein [Zea mays]
  misc_feature (19)..(154): NCBI GI NO: 37536712 NR Description: putative lipid transfer protein
  misc_feature (17)..(155): NCBI GI NO: 399204 NR Description: CORTICAL CELL DELINEATING PROTEIN PRECURSOR
  misc_feature (22)..(155): NCBI GI NO: 39748092 NR Description: lipid transfer protein-like protein
  misc_feature (17)..(154): NCBI GI NO: 37533220 NR Description: putative lipid tranfer protein
PKPKALVAIPLKHTLTMASRAATFVALSLLLSAVATHGCGPYCQPPVVVPTPPVVVPPPYHGGGAHGHGGQCSIDALKLRVCANVLGGLLGLKVGVPAHDECCPLLQGLVDLDAAVCLCTAVRANVLGIHLNVPVDISLLLNHCGKTCPSEFTCPAH

SEQ ID NO: 6613 - protein, 141 aa, Glycine max
  peptide (1)..(141): Ceres Seq. ID no. 15224987
  misc_feature (56)..(138): Pfam Name: Pfam Description:  Protease inhibitor/seed storage/LTP family
  misc_feature (3)..(138): NCBI GI NO: 37536704 NR Description: putative lipid transfer protein
  misc_feature (2)..(138): NCBI GI NO: 37536702 NR Description: putative lipid transfer protein
  misc_feature (2)..(138): NCBI GI NO: 1084460 NR Description: RCc2 protein - rice
  misc_feature (1)..(138): NCBI GI NO: 37533212 NR Description: putative lipid transfer protein
  misc_feature (1)..(138): NCBI GI NO: 37533214 NR Description: putative lipid tranfer protein
  misc_feature (1)..(139): NCBI GI NO: 2226329 NR Description: physical impedance induced protein [Zea mays]
  misc_feature (3)..(138): NCBI GI NO: 37536712 NR Description: putative lipid transfer protein
  misc_feature (1)..(139): NCBI GI NO: 399204 NR Description: CORTICAL CELL DELINEATING PROTEIN PRECURSOR
  misc_feature (6)..(139): NCBI GI NO: 39748092 NR Description: lipid transfer protein-like protein
  misc_feature (1)..(138): NCBI GI NO: 37533220 NR Description: putative lipid tranfer protein
MASRAATFVALSLLLSAVATHGCGPYCQPPVVVPTPPVVVPPPYHGGGAHGHGGQCSIDALKLRVCANVLGGLLGLKVGVPAHDECCPLLQGLVDLDAAVCLCTAVRANVLGIHLNVPVDISLLLNHCGKTCPSEFTCPAH

SEQ ID NO: 6614 - protein, 112 aa, Glycine max
  peptide (1)..(112): Ceres Seq. ID no. 15224988
SQTQSTSSYPTQAHAHDGIQSCYLRRPEPPPLRRRHARLRTLLPAASRRADTARCRSAAVPWRRSARPRRAVLYRRPKAEGVRQRSRRPARPQGRRSGARRVLPAAPGVGRP

SEQ ID NO: 6615 - DNA, 861 bp, Glycine max
  misc_feature (1)..(861): Ceres Seq. ID no. 13594925
gacacaagtaacttctctgcatccaaaatgccaggtcttaccatcggagacactattcctgatcttcaagttgaaactaaccaaggcaaaatcaagcttcatcagttctgtgctgatggctggaccatccttttctctcacccaggtgatttcaccccggtttgtaccactgagcttggtaagatggctcagtatgctaaggagttttatcaacgaggagtgaagctcttaggtttatcttgtgatgatgtgcaatcccacaatgagtggatcaaagacattgaagcctacactccaggtgcgaaagtgaattatccaataattgctgatccgaagagagaaatcatcaagcaactcaacatggttgaccctgatgagaaagactccactggcaacctaccctcaagggctcttcatattgttggcccagatttgaagatcaagctgagttttctgtaccctgccactactgggaggaacatggatgaagtgctgagggtgatagagtcattgcagaaggcctcaaagttcaaggttgctaccccagcaaactggaagccaggggaccctgttgtcattacccctgatgtcaccaatgagcaagccaaggaaatgttccctcaagggttcgagagtgtgaaactccatcaaagaaggaatatttgcgcttaactaaagtttgatgatgttctgcttcaagtagtagaaccttcttcagctgtgccaaatctcaatgcaatctagtcatctatctaccctaatcaaactatatatatgttttgtttaagtacactattttgtggcactgcttttgttattataagaaagaatgtacagtttaattgatcttttgttgactgc

SEQ ID NO: 6616 - protein, 223 aa, Glycine max
  peptide (1)..(223): Ceres Seq. ID no. 13594926
  misc_feature (15)..(166): Pfam Name: Pfam Description:  AhpC/TSA family
  misc_feature (10)..(223): NCBI GI NO: 19423862 NR Description: 1-cys peroxiredoxin [Xerophyta viscosa]
  misc_feature (10)..(223): NCBI GI NO: 6466096 NR Description: 1-Cys peroxiredoxin [Fagopyrum esculentum]
  misc_feature (10)..(219): NCBI GI NO: 1710077 NR Description: Peroxiredoxin (Rehydrin homolog) (B15C)
  misc_feature (10)..(219): NCBI GI NO: 34539782 NR Description: 1-Cys-peroxiredoxine [Triticum aestivum]
  misc_feature (10)..(219): NCBI GI NO: 12247762 NR Description: 1-Cys peroxiredoxin
  misc_feature (10)..(215): NCBI GI NO: 1710078 NR Description: RAB24 protein
  misc_feature (10)..(215): NCBI GI NO: 27261084 NR Description: putative RAB24 protein
  misc_feature (10)..(219): NCBI GI NO: 7381260 NR Description: peroxiredoxin antioxidant [Brassica napus]
  misc_feature (10)..(219): NCBI GI NO: 15221082 NR Description: peroxiredoxin [Arabidopsis thaliana]
  misc_feature (10)..(219): NCBI GI NO: 28393058 NR Description: putative peroxiredoxin [Arabidopsis thaliana]
DTSNFSASKMPGLTIGDTIPDLQVETNQGKIKLHQFCADGWTILFSHPGDFTPVCTTELGKMAQYAKEFYQRGVKLLGLSCDDVQSHNEWIKDIEAYTPGAKVNYPIIADPKREIIKQLNMVDPDEKDSTGNLPSRALHIVGPDLKIKLSFLYPATTGRNMDEVLRVIESLQKASKFKVATPANWKPGDPVVITPDVTNEQAKEMFPQGFESVKLHQRRNICA

SEQ ID NO: 6617 - protein, 214 aa, Glycine max
  peptide (1)..(214): Ceres Seq. ID no. 13594927
  misc_feature (6)..(157): Pfam Name: Pfam Description:  AhpC/TSA family
  misc_feature (1)..(214): NCBI GI NO: 19423862 NR Description: 1-cys peroxiredoxin [Xerophyta viscosa]
  misc_feature (1)..(214): NCBI GI NO: 6466096 NR Description: 1-Cys peroxiredoxin [Fagopyrum esculentum]
  misc_feature (1)..(210): NCBI GI NO: 1710077 NR Description: Peroxiredoxin (Rehydrin homolog) (B15C)
  misc_feature (1)..(210): NCBI GI NO: 34539782 NR Description: 1-Cys-peroxiredoxine [Triticum aestivum]
  misc_feature (1)..(210): NCBI GI NO: 12247762 NR Description: 1-Cys peroxiredoxin
  misc_feature (1)..(206): NCBI GI NO: 1710078 NR Description: RAB24 protein
  misc_feature (1)..(206): NCBI GI NO: 27261084 NR Description: putative RAB24 protein
  misc_feature (1)..(210): NCBI GI NO: 7381260 NR Description: peroxiredoxin antioxidant [Brassica napus]
  misc_feature (1)..(210): NCBI GI NO: 15221082 NR Description: peroxiredoxin [Arabidopsis thaliana]
  misc_feature (1)..(210): NCBI GI NO: 28393058 NR Description: putative peroxiredoxin [Arabidopsis thaliana]
MPGLTIGDTIPDLQVETNQGKIKLHQFCADGWTILFSHPGDFTPVCTTELGKMAQYAKEFYQRGVKLLGLSCDDVQSHNEWIKDIEAYTPGAKVNYPIIADPKREIIKQLNMVDPDEKDSTGNLPSRALHIVGPDLKIKLSFLYPATTGRNMDEVLRVIESLQKASKFKVATPANWKPGDPVVITPDVTNEQAKEMFPQGFESVKLHQRRNICA

SEQ ID NO: 6618 - protein, 162 aa, Glycine max
  peptide (1)..(162): Ceres Seq. ID no. 13594928
  misc_feature (1)..(105): Pfam Name: Pfam Description:  AhpC/TSA family
  misc_feature (1)..(162): NCBI GI NO: 19423862 NR Description: 1-cys peroxiredoxin [Xerophyta viscosa]
  misc_feature (1)..(162): NCBI GI NO: 6466096 NR Description: 1-Cys peroxiredoxin [Fagopyrum esculentum]
  misc_feature (1)..(158): NCBI GI NO: 1710077 NR Description: Peroxiredoxin (Rehydrin homolog) (B15C)
  misc_feature (1)..(158): NCBI GI NO: 34539782 NR Description: 1-Cys-peroxiredoxine [Triticum aestivum]
  misc_feature (1)..(158): NCBI GI NO: 12247762 NR Description: 1-Cys peroxiredoxin
  misc_feature (1)..(154): NCBI GI NO: 1710078 NR Description: RAB24 protein
  misc_feature (1)..(154): NCBI GI NO: 27261084 NR Description: putative RAB24 protein
  misc_feature (1)..(158): NCBI GI NO: 7381260 NR Description: peroxiredoxin antioxidant [Brassica napus]
  misc_feature (1)..(158): NCBI GI NO: 15221082 NR Description: peroxiredoxin [Arabidopsis thaliana]
  misc_feature (1)..(158): NCBI GI NO: 28393058 NR Description: putative peroxiredoxin [Arabidopsis thaliana]
MAQYAKEFYQRGVKLLGLSCDDVQSHNEWIKDIEAYTPGAKVNYPIIADPKREIIKQLNMVDPDEKDSTGNLPSRALHIVGPDLKIKLSFLYPATTGRNMDEVLRVIESLQKASKFKVATPANWKPGDPVVITPDVTNEQAKEMFPQGFESVKLHQRRNICA

SEQ ID NO: 6619 - DNA, 944 bp, Glycine max
  misc_feature (1)..(944): Ceres Seq. ID no. 12610129
taaaaccctagccgccgtccgtccccaaccttcaccgccgctccccctcaaccctccgccccccaaaccccgccgccgcctccgccatgcggccgctcgacgagaaggagaccacgatggtcttcgagaagctgttcaagttcaccggccccaacctgaagcacctcctggagcggccctccgtggagggccccgacccggagcccggccgctactgcctccgcctccacaagaaccgcgtcttctacgcctccgagtcgctcgtccgccgcgccaccgccgtgtcccgcacgcgcctcgccggggtcggcacgcccatcggcaagttcacccacggcggcgccttccacctcaccgtccacgcgctcgacctcctcgccgcccacgcgcgccgccgcatctggctcaagcccgacacggagcgctcgttcctcttcggcaactccgtgcccaagtccgcgctcgcgcgcatcacggagaacaccaagtccggcgatggcgtcgtcgtcatgtccatggccgacgtgccgctcgggttcggggtcgccgccaggggcgcgcaggactgcaggaaggccgacaccaacgccgtggtggtgctccaccagtccgacgccggcgagtacctccgcaaggaggaggagctcatgtgaggtgatgtgtgactgttctgaaagatgtgttccctcccttggttgtgatcaccgatcatctgtgcttgcaatcagtgtgcagttcgtcgaccattctgtattctgtagttttcatacagggcaaggaaaagcggatgtctgatctatctgagtgtcatagtagagtagttctcttttcaggcagttctgatggctataatttttgtcacgccgtagcttatcagtaagctactgcattgtatcgtgtgaactgtgaactgaagattccgtgaactaaatattatgataatg

SEQ ID NO: 6620 - protein, 218 aa, Glycine max
  peptide (1)..(218): Ceres Seq. ID no. 12610130
KTLAAVRPQPSPPLPLNPPPPKPRRRLRHAAARREGDHDGLREAVQVHRPQPEAPPGAALRGGPRPGARPLLPPPPQEPRLLRLRVARPPRHRRVPHAPRRGRHAHRQVHPRRRLPPHRPRARPPRRPRAPPHLAQARHGALVPLRQLRAQVRARAHHGEHQVRRWRRRHVHGRRAARVRGRRQGRAGLQEGRHQRRGGAPPVRRRRVPPQGGGAHVR

SEQ ID NO: 6621 - protein, 188 aa, Glycine max
  peptide (1)..(188): Ceres Seq. ID no. 12610131
  misc_feature (1)..(183): Pfam Name: UPF0113 Pfam Description: Uncharacterised protein family
  misc_feature (1)..(188): NCBI GI NO: 22831121 NR Description: putative 60S ribosome subunit biogenesis protein
  misc_feature (1)..(187): NCBI GI NO: 20301988 NR Description: Saccharomyces cerevisiae Nip7p homolog
  misc_feature (1)..(187): NCBI GI NO: 7705437 NR Description: hypothetical protein HSPC031 [Homo sapiens]
  misc_feature (1)..(187): NCBI GI NO: 12852038 NR Description: unnamed protein product [Mus musculus]
  misc_feature (1)..(187): NCBI GI NO: 13928674 NR Description: RIKEN cDNA 1110017C15 [Mus musculus]
  misc_feature (1)..(187): NCBI GI NO: 17506003 NR Description: 60S ribosome biogenesis (20.1 kD)
  misc_feature (1)..(187): NCBI GI NO: 39589582 NR Description: Hypothetical protein CBG12182
  misc_feature (1)..(187): NCBI GI NO: 34876605 NR Description: similar to Saccharomyces cerevisiae Nip7p homolog
  misc_feature (1)..(187): NCBI GI NO: 19075218 NR Description: putative protein involved in 60S ribosome subunitbiogenesis
  misc_feature (1)..(187): NCBI GI NO: 24649803 NR Description: CG7006-PA [Drosophila melanogaster]
MRPLDEKETTMVFEKLFKFTGPNLKHLLERPSVEGPDPEPGRYCLRLHKNRVFYASESLVRRATAVSRTRLAGVGTPIGKFTHGGAFHLTVHALDLLAAHARRRIWLKPDTERSFLFGNSVPKSALARITENTKSGDGVVVMSMADVPLGFGVAARGAQDCRKADTNAVVVLHQSDAGEYLRKEEELM

SEQ ID NO: 6622 - protein, 178 aa, Glycine max
  peptide (1)..(178): Ceres Seq. ID no. 12610132
  misc_feature (1)..(173): Pfam Name: UPF0113 Pfam Description: Uncharacterised protein family
  misc_feature (1)..(178): NCBI GI NO: 22831121 NR Description: putative 60S ribosome subunit biogenesis protein
  misc_feature (1)..(177): NCBI GI NO: 20301988 NR Description: Saccharomyces cerevisiae Nip7p homolog
  misc_feature (1)..(177): NCBI GI NO: 7705437 NR Description: hypothetical protein HSPC031 [Homo sapiens]
  misc_feature (1)..(177): NCBI GI NO: 12852038 NR Description: unnamed protein product [Mus musculus]
  misc_feature (1)..(177): NCBI GI NO: 13928674 NR Description: RIKEN cDNA 1110017C15 [Mus musculus]
  misc_feature (1)..(177): NCBI GI NO: 17506003 NR Description: 60S ribosome biogenesis (20.1 kD)
  misc_feature (1)..(177): NCBI GI NO: 39589582 NR Description: Hypothetical protein CBG12182
  misc_feature (1)..(177): NCBI GI NO: 34876605 NR Description: similar to Saccharomyces cerevisiae Nip7p homolog
  misc_feature (1)..(177): NCBI GI NO: 19075218 NR Description: putative protein involved in 60S ribosome subunitbiogenesis
  misc_feature (1)..(177): NCBI GI NO: 24649803 NR Description: CG7006-PA [Drosophila melanogaster]
MVFEKLFKFTGPNLKHLLERPSVEGPDPEPGRYCLRLHKNRVFYASESLVRRATAVSRTRLAGVGTPIGKFTHGGAFHLTVHALDLLAAHARRRIWLKPDTERSFLFGNSVPKSALARITENTKSGDGVVVMSMADVPLGFGVAARGAQDCRKADTNAVVVLHQSDAGEYLRKEEELM

SEQ ID NO: 6623 - DNA, 788 bp, Glycine max
  misc_feature (1)..(788): Ceres Seq. ID no. 12610133
aaaccaagcagataagcagctgtcctactgtcgcatacacacacaagtgctagctagctaatcgatcagccggcggccatggcggaggagaagcaccaccaccacctgttccaccacaaggagggcgaggacttccagcccgccgctgacggcggcgtcgacacgtacgggtactcgaccgagacggtggtgaccgccaccggcaacgagggggagtacgagcggatcaccaaggaggagaagcaccacaagcacaaggagcacctcggcgagatgggcgccgccgccgccggagccttcgccctctacgagaagcacgaggcgaagaaggacccggagcacgcgcacaagcacaagatcgaggaggaggtggccgccgctgcagccgtcggcgccggcggcttcgtcttccacgagcaccacgagaagaagcaggaccacaaggaggccaaggaggccagcggcgagaagaagcaccaccacttcggctagatcaccgttgacgtgcggtggccggcctcgccgccggccgtgcgtgtgcttacgttacgtgtgttccatagtgagagaggctgggacgtgggcctggtctcgtgctcgcctgtgcgtgattttctctgcgtgcttagcttccgagtgctgaataagtggggctgctgttcatgcagtggctcccacacctcatgcgtcggtgtgtgtcgtgtgtcggtgtgtgtttcaattctaccggcgccctgtatttgtaatttcactttattatgcaagtcctcacgaaactttttgtggcc

SEQ ID NO: 6624 - protein, 137 aa, Glycine max
  peptide (1)..(137): Ceres Seq. ID no. 12610134
  misc_feature (52)..(103): Pfam Name: Pfam Description:  ABA/WDS induced protein
  misc_feature (1)..(137): NCBI GI NO: 15667623 NR Description: drought inducible 22 kD protein
  misc_feature (1)..(137): NCBI GI NO: 7489448 NR Description: abscisic acid- and stress-induced protein - rice
  misc_feature (1)..(135): NCBI GI NO: 7484489 NR Description: abscisic acid
  misc_feature (23)..(135): NCBI GI NO: 2677824 NR Description: abscisic stress ripening protein homolog
  misc_feature (1)..(35): NCBI GI NO: 2677824 NR Description: abscisic stress ripening protein homolog
  misc_feature (1)..(135): NCBI GI NO: 14582465 NR Description: putative transcription factor [Vitis vinifera]
  misc_feature (1)..(135): NCBI GI NO: 7484607 NR Description: ABA stress ripening protein - common ice plant
  misc_feature (1)..(135): NCBI GI NO: 7484497 NR Description: water-stress-inducible protein LP3 - loblolly pine
  misc_feature (1)..(137): NCBI GI NO: 6525055 NR Description: anth [Lilium longiflorum]
  misc_feature (13)..(135): NCBI GI NO: 38532363 NR Description: abscisic acid and water deficit stress inducibleprotein
MAEEKHHHHLFHHKEGEDFQPAADGGVDTYGYSTETVVTATGNEGEYERITKEEKHHKHKEHLGEMGAAAAGAFALYEKHEAKKDPEHAHKHKIEEEVAAAAAVGAGGFVFHEHHEKKQDHKEAKEASGEKKHHHFG

SEQ ID NO: 6625 - protein, 72 aa, Glycine max
  peptide (1)..(72): Ceres Seq. ID no. 12610135
  misc_feature (1)..(72): NCBI GI NO: 15667623 NR Description: drought inducible 22 kD protein
  misc_feature (1)..(72): NCBI GI NO: 7489448 NR Description: abscisic acid- and stress-induced protein - rice
  misc_feature (1)..(70): NCBI GI NO: 7484489 NR Description: abscisic acid
  misc_feature (1)..(70): NCBI GI NO: 2677824 NR Description: abscisic stress ripening protein homolog
  misc_feature (1)..(70): NCBI GI NO: 14582465 NR Description: putative transcription factor [Vitis vinifera]
  misc_feature (1)..(70): NCBI GI NO: 7484607 NR Description: ABA stress ripening protein - common ice plant
  misc_feature (1)..(70): NCBI GI NO: 7484497 NR Description: water-stress-inducible protein LP3 - loblolly pine
  misc_feature (1)..(72): NCBI GI NO: 6525055 NR Description: anth [Lilium longiflorum]
  misc_feature (1)..(70): NCBI GI NO: 38532363 NR Description: abscisic acid and water deficit stress inducibleprotein
  misc_feature (1)..(70): NCBI GI NO: 7484499 NR Description: water-stress-inducible protein LP3-3
MGAAAAGAFALYEKHEAKKDPEHAHKHKIEEEVAAAAAVGAGGFVFHEHHEKKQDHKEAKEASGEKKHHHFG

SEQ ID NO: 6626 - DNA, 733 bp, Glycine max
  misc_feature (1)..(733): Ceres Seq. ID no. 13638927
gaccatcgccgcagacagaggtcggaagaagaggaaggaaaaggcgctctctctctgtctctcccacacggcggcgcggtgtagccggcggcggcgatggctttctggcaggcgcgcgacttcctgttctgcggcgtgtgcggcaccctcctcgacttcaactcccaccgctacgcctcctgccctctctgcggcttcaagcgcaaggccaaagagatcgaagggaaagaaactcgctacgcggtcaccgcggaggatattagaagagagctaaagataaaaccgtttgtggttcttgaatcggcgccgaatatggacatagtcgtgcaaagatccctgacagagcgagcctgtccagaatgcaaccatcatgaactcgaatattacaccaagcagcttcggtcggcggatgaggggcagactatcttctacgagtgcccggagtgcggccacgcattcaacgagaatacctaagagaaaagttttctactatcagggtatgggtatgcgtggaagaatctgctcctgccattggttgacaatcgatgttcaccgaaatttcgcctgccatgggttgaccattgatgttccagctttttggcgtgtattctaatcttcaatgttacctgggatatgttaatgctcctttctatctaacggtttttgatggaacctgtctgtctgatgtatttgactgaatgtggccatagaaagagcaggatatattgtttct

SEQ ID NO: 6627 - protein, 125 aa, Glycine max
  peptide (1)..(125): Ceres Seq. ID no. 13638928
  misc_feature (84)..(122): Pfam Name: TFIIS Pfam Description: Transcription factor S-II
  misc_feature (1)..(124): NCBI GI NO: 13324793 NR Description: putative RNA polymerase I subunit [Oryza sativa]
  misc_feature (8)..(123): NCBI GI NO: 18404735 NR Description: expressed protein [Arabidopsis thaliana]
  misc_feature (8)..(117): NCBI GI NO: 7657709 NR Description: zinc ribbon domain containing, 1
  misc_feature (10)..(124): NCBI GI NO: 19075559 NR Description: dna-directed rna polymerase i subunit
  misc_feature (8)..(117): NCBI GI NO: 12963545 NR Description: nuclear RNA polymerase I small specific subunit
  misc_feature (8)..(117): NCBI GI NO: 34852033 NR Description: similar to nuclear RNA polymerase I small specific subunit Rpa12
  misc_feature (10)..(124): NCBI GI NO: 6322523 NR Description: A12.2 subunit of RNA polymerase I; Rpa12p
  misc_feature (11)..(125): NCBI GI NO: 29248470 NR Description: GLP_572_32225_32536 [Giardia lamblia ATCC 50803]
  misc_feature (10)..(123): NCBI GI NO: 16082042 NR Description: probable transcription-associated protein TFIIS
  misc_feature (10)..(123): NCBI GI NO: 13541573 NR Description: DNA-directed RNA polymerase subunit M
MAFWQARDFLFCGVCGTLLDFNSHRYASCPLCGFKRKAKEIEGKETRYAVTAEDIRRELKIKPFVVLESAPNMDIVVQRSLTERACPECNHHELEYYTKQLRSADEGQTIFYECPECGHAFNENT

SEQ ID NO: 6628 - protein, 90 aa, Glycine max
  peptide (1)..(90): Ceres Seq. ID no. 13638929
TIAADRGRKKRKEKALSLCLSHTAARCSRRRRWLSGRRATSCSAACAAPSSTSTPTATPPALSAASSARPKRSKGKKLATRSPRRILEES

SEQ ID NO: 6629 - protein, 86 aa, Glycine max
  peptide (1)..(86): Ceres Seq. ID no. 13638930
PSPQTEVGRRGRKRRSLSVSPTRRRGVAGGGDGFLAGARLPVLRRVRHPPRLQLPPLRLLPSLRLQAQGQRDRRERNSLRGHRGGY

SEQ ID NO: 6630 - DNA, 1006 bp, Glycine max
  misc_feature (1)..(1006): Ceres Seq. ID no. 13638976
atctactgcccccgccgtcctcgcctcctcccccgatccaaatccgaaatttttcccctccccgcagcccgctccctcctccgcgcccgcactgtagcccgagcgctcggctccaccgccgtgggctgtagccgccgtcgctgccatggcgaacgacgggtcccccaagtccggtgacatcccgccctaccccgagatgattctcgcggcgatcgaggcgctgggcgacaagaacggctcgagcaagtccgccatctccagctacatcgaggagaagtacgagggcctcccctcggcgcacgcctccctcctcacggccaacctcgccagcatgaaggaggccggcaagctcgccttcgtcaagaacaactacctcaaggctgacgctccctccgccaccccggcaaagcgcggccgcggccgcccgcctaaggaccctaacgcgccgcccaagccgaaggctgcgcccaaggaccccaacacgcccaagcgcggccggggccgcccgcccaaggctaaggatcccatggccgacgccgtcaaggatgccgtcgccaaggcgaccaccggcatgccccggggccgcggccgcccgccgggtccctcctcggccaagaaggccaaggtcgccaaggaggctgcctctccggctcccgcggacggctccgctcctgccaagcgtggccgtgggcgcccacgcaaggtggcggtgtgaggcctgcgtgctgatgcctttcggtctgtgtatctcgctgtggttgcgacggtggtaagctcctaggtgtgaccgtgcttcttcgatttgtgctccgtactaattgttccgtcggcttagttgctcagtatgtgttgtaacctaatcgagatgagtgtgcacaatggatggatggatgtttttagcttcggttgtagttgactgtgctgctgtgagtgaacatgttcattttttttatcgccatctctgttgcttccgcattatgatgaagatgtttgtcatgttgttgtg

SEQ ID NO: 6631 - protein, 189 aa, Glycine max
  peptide (1)..(189): Ceres Seq. ID no. 13638977
  misc_feature (11)..(80): Pfam Name: Pfam Description:  linker histone H1 and H5 family
  misc_feature (1)..(188): NCBI GI NO: 20502966 NR Description: HMG-I/Y protein HMGa [Triticum aestivum]
  misc_feature (1)..(187): NCBI GI NO: 11544762 NR Description: HMGI/Y protein [Zea mays]
  misc_feature (1)..(187): NCBI GI NO: 9837562 NR Description: high mobility group I/Y-2 [Zea mays]
  misc_feature (1)..(187): NCBI GI NO: 4585621 NR Description: HMGI/Y protein [Zea mays]
  misc_feature (2)..(187): NCBI GI NO: 7439646 NR Description: DNA binding protein PF1 - rice
  misc_feature (2)..(188): NCBI GI NO: 25553691 NR Description: P0479C08.8
  misc_feature (1)..(151): NCBI GI NO: 629769 NR Description: histone-like DNA-binding protein PF 1 - oat
  misc_feature (1)..(186): NCBI GI NO: 6651027 NR Description: high mobility group protein I/Y [Brassica napus]
  misc_feature (9)..(187): NCBI GI NO: 1808590 NR Description: HMG-I/Y [Arabidopsis thaliana]
  misc_feature (9)..(187): NCBI GI NO: 15223947 NR Description: linker histone protein -related
MANDGSPKSGDIPPYPEMILAAIEALGDKNGSSKSAISSYIEEKYEGLPSAHASLLTANLASMKEAGKLAFVKNNYLKADAPSATPAKRGRGRPPKDPNAPPKPKAAPKDPNTPKRGRGRPPKAKDPMADAVKDAVAKATTGMPRGRGRPPGPSSAKKAKVAKEAASPAPADGSAPAKRGRGRPRKVAV

SEQ ID NO: 6632 - protein, 172 aa, Glycine max
  peptide (1)..(172): Ceres Seq. ID no. 13638978
  misc_feature (1)..(63): Pfam Name: Pfam Description:  linker histone H1 and H5 family
  misc_feature (1)..(171): NCBI GI NO: 20502966 NR Description: HMG-I/Y protein HMGa [Triticum aestivum]
  misc_feature (1)..(170): NCBI GI NO: 11544762 NR Description: HMGI/Y protein [Zea mays]
  misc_feature (1)..(170): NCBI GI NO: 9837562 NR Description: high mobility group I/Y-2 [Zea mays]
  misc_feature (1)..(170): NCBI GI NO: 4585621 NR Description: HMGI/Y protein [Zea mays]
  misc_feature (1)..(170): NCBI GI NO: 7439646 NR Description: DNA binding protein PF1 - rice
  misc_feature (1)..(171): NCBI GI NO: 25553691 NR Description: P0479C08.8
  misc_feature (1)..(134): NCBI GI NO: 629769 NR Description: histone-like DNA-binding protein PF 1 - oat
  misc_feature (1)..(169): NCBI GI NO: 6651027 NR Description: high mobility group protein I/Y [Brassica napus]
  misc_feature (1)..(170): NCBI GI NO: 1808590 NR Description: HMG-I/Y [Arabidopsis thaliana]
  misc_feature (1)..(170): NCBI GI NO: 15223947 NR Description: linker histone protein -related
MILAAIEALGDKNGSSKSAISSYIEEKYEGLPSAHASLLTANLASMKEAGKLAFVKNNYLKADAPSATPAKRGRGRPPKDPNAPPKPKAAPKDPNTPKRGRGRPPKAKDPMADAVKDAVAKATTGMPRGRGRPPGPSSAKKAKVAKEAASPAPADGSAPAKRGRGRPRKVAV

SEQ ID NO: 6633 - protein, 127 aa, Glycine max
  peptide (1)..(127): Ceres Seq. ID no. 13638979
  misc_feature (1)..(126): NCBI GI NO: 20502966 NR Description: HMG-I/Y protein HMGa [Triticum aestivum]
  misc_feature (1)..(125): NCBI GI NO: 11544762 NR Description: HMGI/Y protein [Zea mays]
  misc_feature (1)..(125): NCBI GI NO: 9837562 NR Description: high mobility group I/Y-2 [Zea mays]
  misc_feature (1)..(125): NCBI GI NO: 4585621 NR Description: HMGI/Y protein [Zea mays]
  misc_feature (1)..(125): NCBI GI NO: 7439646 NR Description: DNA binding protein PF1 - rice
  misc_feature (1)..(126): NCBI GI NO: 25553691 NR Description: P0479C08.8
  misc_feature (1)..(89): NCBI GI NO: 629769 NR Description: histone-like DNA-binding protein PF 1 - oat
  misc_feature (1)..(124): NCBI GI NO: 6651027 NR Description: high mobility group protein I/Y [Brassica napus]
  misc_feature (1)..(125): NCBI GI NO: 1808590 NR Description: HMG-I/Y [Arabidopsis thaliana]
  misc_feature (1)..(125): NCBI GI NO: 15223947 NR Description: linker histone protein -related
MKEAGKLAFVKNNYLKADAPSATPAKRGRGRPPKDPNAPPKPKAAPKDPNTPKRGRGRPPKAKDPMADAVKDAVAKATTGMPRGRGRPPGPSSAKKAKVAKEAASPAPADGSAPAKRGRGRPRKVAV

SEQ ID NO: 6634 - DNA, 1141 bp, Glycine max
  misc_feature (1)..(1141): Ceres Seq. ID no. 13638877
aaccaaagccagagcgcccgtctctcccccctcccacgccgccgcacaccgaaccctagcgccccagcgagcgagcgagcgacagccatgccggcggacgcgaagatccggtggggggagctcgaggaggacgacgggggcgacctcgacttcctgctgccgccgcgggtggtcatcgggcccgacgagaacggcttcaagaagacgatcgagtaccgcttcgacgacgacggcaacaaggtcaaggtcaccaccaccacccgcgtccgcaagctcgcgcgcgcgcgcctctccaaggccgccgtcgagcgtcgcaactggtccaagttcggcgacgccgccagcggcgacgacgcctccgcgcgcctcaccgtcgtctccaccgaggagatcctcctcgagcgcccgcgcgccccagggagcaaagctgatgaaccaagtgcgtctggtgacccactggcaatggcaagcaagggaggtgctgttctcatggtttgcagaacctgtggtaagaagggtgaccactggacctcaaagtgcccctacaaggacctcgctccaccaaccgatgcatcggacatgcctcctacttctgacggccctgcagcactgagtggccctgccaagggctcatacgttgctccaaggctaagggctggtgctgttcataccgatgctgggcacgacatgaggcgcaggaacgacgagaacagtgtccgtgttaccaatctgtctgaggacacccgcgagcccgacctcctcgagctgttccgcacgtttggcccggtcagccgtgtctatgtcgcggtggatcagaagactggaatgagcaggggctttgggtttgtcaactttgttcacagggaggacgccgagaaggccatcagcaagctcaatgggtatggttatgataacctcatcctccatgtggagatggctgcacctaggcctacttagttactgcctactaagcatccagatttcctacaagtgtcgtatcattatggtctccgaaatacccgtacgtttgtgtcgtgagcttgtgtcatgttttgccttgttgagaataactacactctggtggtgaaaaagtgaatttcttaagggatggcacttgagtttatatttcatcaagctttgt

SEQ ID NO: 6635 - protein, 318 aa, Glycine max
  peptide (1)..(318): Ceres Seq. ID no. 13638878
  misc_feature (239)..(310): Pfam Name: a.k.a. RRM, RBD, or RNP domain Pfam Description: RNA recognition motif.
  misc_feature (34)..(318): NCBI GI NO: 12407751 NR Description: initiation factor 3g [Arabidopsis thaliana]
  misc_feature (34)..(318): NCBI GI NO: 15229743 NR Description: eukaryotic translation initiation factor 3 subunitg
  misc_feature (35)..(318): NCBI GI NO: 10177573 NR Description: eukaryotic translation initiation factor 3 subunit-like protein
  misc_feature (58)..(318): NCBI GI NO: 30681225 NR Description: eukaryotic translation initiation factor 3
  misc_feature (30)..(316): NCBI GI NO: 19112519 NR Description: eukaryotic translation iation factor 3 rna-binding subunit
  misc_feature (33)..(315): NCBI GI NO: 29124629 NR Description: Similar to eukaryotic translation initiation factor3
  misc_feature (38)..(316): NCBI GI NO: 2951777 NR Description: translation initiation factor 3
  misc_feature (52)..(315): NCBI GI NO: 23503064 NR Description: Eukaryotic translation initiation factor 3 subunit4
  misc_feature (52)..(315): NCBI GI NO: 30583983 NR Description: Homo sapiens eukaryotic translation initiationfactor 3
  misc_feature (50)..(315): NCBI GI NO: 31980808 NR Description: eukaryotic translation initiation factor 3
NQSQSARLSPLPRRRTPNPSAPASERATAMPADAKIRWGELEEDDGGDLDFLLPPRVVIGPDENGFKKTIEYRFDDDGNKVKVTTTTRVRKLARARLSKAAVERRNWSKFGDAASGDDASARLTVVSTEEILLERPRAPGSKADEPSASGDPLAMASKGGAVLMVCRTCGKKGDHWTSKCPYKDLAPPTDASDMPPTSDGPAALSGPAKGSYVAPRLRAGAVHTDAGHDMRRRNDENSVRVTNLSEDTREPDLLELFRTFGPVSRVYVAVDQKTGMSRGFGFVNFVHREDAEKAISKLNGYGYDNLILHVEMAAPRPT

SEQ ID NO: 6636 - protein, 289 aa, Glycine max
  peptide (1)..(289): Ceres Seq. ID no. 13638879
  misc_feature (210)..(281): Pfam Name: a.k.a. RRM, RBD, or RNP domain Pfam Description: RNA recognition motif.
  misc_feature (5)..(289): NCBI GI NO: 12407751 NR Description: initiation factor 3g [Arabidopsis thaliana]
  misc_feature (5)..(289): NCBI GI NO: 15229743 NR Description: eukaryotic translation initiation factor 3 subunitg
  misc_feature (6)..(289): NCBI GI NO: 10177573 NR Description: eukaryotic translation initiation factor 3 subunit-like protein
  misc_feature (29)..(289): NCBI GI NO: 30681225 NR Description: eukaryotic translation initiation factor 3
  misc_feature (1)..(287): NCBI GI NO: 19112519 NR Description: eukaryotic translation iation factor 3 rna-binding subunit
  misc_feature (4)..(286): NCBI GI NO: 29124629 NR Description: Similar to eukaryotic translation initiation factor3
  misc_feature (9)..(287): NCBI GI NO: 2951777 NR Description: translation initiation factor 3
  misc_feature (23)..(286): NCBI GI NO: 23503064 NR Description: Eukaryotic translation initiation factor 3 subunit4
  misc_feature (23)..(286): NCBI GI NO: 30583983 NR Description: Homo sapiens eukaryotic translation initiationfactor 3
  misc_feature (21)..(286): NCBI GI NO: 31980808 NR Description: eukaryotic translation initiation factor 3
MPADAKIRWGELEEDDGGDLDFLLPPRVVIGPDENGFKKTIEYRFDDDGNKVKVTTTTRVRKLARARLSKAAVERRNWSKFGDAASGDDASARLTVVSTEEILLERPRAPGSKADEPSASGDPLAMASKGGAVLMVCRTCGKKGDHWTSKCPYKDLAPPTDASDMPPTSDGPAALSGPAKGSYVAPRLRAGAVHTDAGHDMRRRNDENSVRVTNLSEDTREPDLLELFRTFGPVSRVYVAVDQKTGMSRGFGFVNFVHREDAEKAISKLNGYGYDNLILHVEMAAPRPT

SEQ ID NO: 6637 - protein, 203 aa, Glycine max
  peptide (1)..(203): Ceres Seq. ID no. 13638880
  misc_feature (1)..(135): NCBI GI NO: 11359723 NR Description: proteophosphoglycan, membrane-associated
  misc_feature (1)..(135): NCBI GI NO: 13592175 NR Description: ppg3 [Leishmania major]
TKARAPVSPPSHAAAHRTLAPQRASERQPCRRTRRSGGGSSRRTTGATSTSCCRRGWSSGPTRTASRRRSSTASTTTATRSRSPPPPASASSRARASPRPPSSVATGPSSATPPAATTPPRASPSSPPRRSSSSARAPQGAKLMNQVRLVTHWQWQAREVLFSWFAEPVVRRVTTGPQSAPTRTSLHQPMHRTCLLLLTALQH

SEQ ID NO: 6638 - DNA, 892 bp, Glycine max
  misc_feature (1)..(892): Ceres Seq. ID no. 13594992
cccgcccccgtccggcacctctctcgcttcttcctccggcccatgcgacggcgctgacatctttgcccgcctgacctttcgatggccgccgccgccaccgccgccgccgcgaccggcacacttcttccccacgcactattgaatcatcgctcgcctccgccgccgcagctccttgcgctgtcctcctccttccgccgcctctccttatccacctcccatcgcaggaccacccatttagtcgcccactcagacgccggcgccgttgagccggagcccgtgtctgagcctgctcctgagggcgagcctgtcgctgcctctgctgactccgaggagggggaggcggagggggctgtggcattggcggaggaagaggaggagccggcgccgaggcccaagccgattaagttcggcgagatcatcgggattctgaacaagcagttcatcgaggaggctgagaaggtgaaagtgcttccggatttgaagcctggtgacatcatcgagcttagaatgcaacgtcccaacaagaggagattgtctctctttaagggtataatcattgcaaagcacaaatctggtgttcacaccacgatccgcgtcaggaggattattgccggtgttggagttgaaattacattccccatatactcaccaaggatcaaggagatcaaagtaatcagacacaagaaggtgaggagggcaaagttgtactacctgaagtacaagcttccccgtttctcaactttcaagtgagattagatacgcggcttctcacactagcatgtcgatttctccttggcaaacgagttttcacgatcatgttcagatctgtgcatccactgtaatgatctctgaacctcgagtcgcataattttacatctttttttaattggcg

SEQ ID NO: 6639 - protein, 222 aa, Glycine max
  peptide (1)..(222): Ceres Seq. ID no. 13594993
  misc_feature (114)..(222): Pfam Name: Pfam Description:  Ribosomal protein L19
  misc_feature (1)..(222): NCBI GI NO: 14140122 NR Description: putative plastid ribosomal protein L19 precursor
  misc_feature (9)..(222): NCBI GI NO: 18422764 NR Description: ribosomal protein L19, putative
  misc_feature (9)..(222): NCBI GI NO: 21592584 NR Description: contains similarity to plastid ribosomal proteinL19
  misc_feature (67)..(222): NCBI GI NO: 8809601 NR Description: contains similarity to plastid ribosomal proteinL19~gene_id:MQL5
  misc_feature (21)..(222): NCBI GI NO: 7582403 NR Description: plastid ribosomal protein L19 precursor
  misc_feature (70)..(222): NCBI GI NO: 18414915 NR Description: ribosomal protein L19, putative
  misc_feature (112)..(215): NCBI GI NO: 15234249 NR Description: ribosomal protein L19, putative
  misc_feature (112)..(215): NCBI GI NO: 15239778 NR Description: ribosomal protein L19, putative
  misc_feature (38)..(215): NCBI GI NO: 18395422 NR Description: ribosomal protein L19, putative
  misc_feature (130)..(212): NCBI GI NO: 14285714 NR Description: 50S RIBOSOMAL PROTEIN L19
MAAAATAAAATGTLLPHALLNHRSPPPPQLLALSSSFRRLSLSTSHRRTTHLVAHSDAGAVEPEPVSEPAPEGEPVAASADSEEGEAEGAVALAEEEEEPAPRPKPIKFGEIIGILNKQFIEEAEKVKVLPDLKPGDIIELRMQRPNKRRLSLFKGIIIAKHKSGVHTTIRVRRIIAGVGVEITFPIYSPRIKEIKVIRHKKVRRAKLYYLKYKLPRFSTFK

SEQ ID NO: 6640 - DNA, 1156 bp, Glycine max
  misc_feature (1)..(1156): Ceres Seq. ID no. 13594929
ccatcgtacggtacactcgtaccaatcagcgttagcgcgaagggataacgtacgtccgttccatcctcgcgcgcgcggccgctccggctccggctccggccatggcgtccacctccgcctccctcggcgccatcctccagcgcttcccgctgctcgcgccccgccccgcctcccgccgcgcgcccaccgcccgccgcgccgtcgccaacaagatctcctgcatcggatgggacccggagggcatcctggcgccgccgcagccgggccacatcgcgcgcctcgagttccggcgccgcctcgacagcgacgccgacgcgcgcgccgccttcgacctccaggtcaaggaggagcaggagcgccgccgcaaggagcgcgaggcgcgggtgatacctgagacggacgccgggctggtggagttcttcctggacacggacgcgcgggagatcgagatcgagatcggcaggctccggcccaggctcaacaagggcttcttcgaccacatccagcgcgagatcgcgcagatcaagttcgcagtcaccagaacagcggcaaatgaagacagactgatcgagctggaggcgatgcagaaggtcatcggggagggagtcgaggcctacgacaagctgcaaaacgacctggtcacggccaaggagcggctcaccaacatcctgcaatccaaagataggaagaaaactctgctcgacatggttgaacggaacgagctcaacatgtccatattaacgcttctcgacgagaacatagcgagcgccaagaccagtaaccaggaggaggccgtggctttcatggaggatgtgcgctcatctatgctgaaatacataacagtataaattttgcctacatacaccggtgaccagttatctctgctatggcactggagtcgtcttcggcgcatagttgttcgaattaattcaatggagctgtaattcacaagtccatcttgtgtgttgtaattttgtttcggttgtatctagttgttctgtctgatatatgttgcaattgtcagtagctttactggcaaaaagagattgtacaatcatatatacatgcacggctgtaccagaaacaaatacaacaagactatgatctaaaaaaaaaaaaaaaaaagcttatcgataccgtcgacctcgaggggggg

SEQ ID NO: 6641 - protein, 248 aa, Glycine max
  peptide (1)..(248): Ceres Seq. ID no. 13594930
  misc_feature (1)..(248): NCBI GI NO: 29368099 NR Description: unknown [Oryza sativa (japonica cultivar-group)]
  misc_feature (15)..(248): NCBI GI NO: 15221583 NR Description: expressed protein [Arabidopsis thaliana]
  misc_feature (93)..(248): NCBI GI NO: 25373192 NR Description: protein F23N19.15
MASTSASLGAILQRFPLLAPRPASRRAPTARRAVANKISCIGWDPEGILAPPQPGHIARLEFRRRLDSDADARAAFDLQVKEEQERRRKEREARVIPETDAGLVEFFLDTDAREIEIEIGRLRPRLNKGFFDHIQREIAQIKFAVTRTAANEDRLIELEAMQKVIGEGVEAYDKLQNDLVTAKERLTNILQSKDRKKTLLDMVERNELNMSILTLLDENIASAKTSNQEEAVAFMEDVRSSMLKYITV

SEQ ID NO: 6642 - protein, 130 aa, Glycine max
  peptide (1)..(130): Ceres Seq. ID no. 13594931
HRTVHSYQSALARRDNVRPFHPRARGRSGSGSGHGVHLRLPRRHPPALPAARAPPRLPPRAHRPPRRRQQDLLHRMGPGGHPGAAAAGPHRAPRVPAPPRQRRRRARRLRPPGQGGAGAPPQGARGAGDT

SEQ ID NO: 6643 - DNA, 963 bp, Glycine max
  misc_feature (1)..(963): Ceres Seq. ID no. 13638885
acagacgcgagcgcgttaaacgagagaagaacagagagacagatcagacaacaatggcagccaaaccagacctgaagttgttgggcatgtcggtgagtccattcgtcatccgtgttcgcatggcgctgcacatgaagggcgtgagccacgagtacatcgagcaggacctcttcaacaagagcgagctcctcctcgagtccagcccggtggagaagaaggtgcccgtgctcatccacgacggcaagcccgtatgcgactcgccggccatcgtgcagtacatcgacgaggtctgggccgccacggggccgccgatcctccccgccgacccctatgagcgcgccgtcgctcgtttctggaccgcctacgtggacgacaagctattccctgcttacgctggcactgctaaggcagccacggaggaggagaggacgcaacagattaacgagatgttcgcggtgatggggcagctggaggaggcatttgcccagtgctcaaacgggaaggccttcttcgccggcgactccatcggcaacctcgacatcgccgttggatgcaatctgctcttgctcgaggtgctacgcagtatgtatggcgtggagttcgtcgacactgggaggaccccgctcttggcagcgtgggcgaagcggttcggggaaaccgatgcggcgagggaggtggtgcccgacgtgcacgtcgccgtggagtacgccaagaagcgtcaggcttattgggctgctgccgcggctacaaagtgacatgattcagatcagatcagtccgagtactacggactgaaaattatctcaagtccataggatgttgctccaacaataaagaggacaaatcatggatacaccatcttaaacatgatgattaacttacctcacggggttatccaacaatcgctgatttagttattgatcctagtagtagtctagatacgcaacgaagtgacatttttttc

SEQ ID NO: 6644 - protein, 250 aa, Glycine max
  peptide (1)..(250): Ceres Seq. ID no. 13638886
  misc_feature (105)..(220): Pfam Name: Pfam Description:  Glutathione S-transferase, C-terminal domain
  misc_feature (18)..(250): NCBI GI NO: 22022398 NR Description: glutathione-S-transferase Cla47
  misc_feature (18)..(249): NCBI GI NO: 37536354 NR Description: putative glutathione S-transferase
  misc_feature (18)..(249): NCBI GI NO: 37536352 NR Description: putative glutathione S-transferase
  misc_feature (24)..(246): NCBI GI NO: 11385503 NR Description: glutathione S-transferase GST 26 [Zea mays]
  misc_feature (20)..(248): NCBI GI NO: 37536308 NR Description: putative glutathione S-transferase
  misc_feature (23)..(247): NCBI GI NO: 33304612 NR Description: tau class GST protein 3
  misc_feature (23)..(247): NCBI GI NO: 37536312 NR Description: putative glutathione S-transferase
  misc_feature (18)..(248): NCBI GI NO: 11385517 NR Description: glutathione S-transferase GST 33 [Zea mays]
  misc_feature (18)..(250): NCBI GI NO: 21730248 NR Description: Chain A
  misc_feature (23)..(248): NCBI GI NO: 37536280 NR Description: putative glutathione S-transferase
RRERVKREKNRETDQTTMAAKPDLKLLGMSVSPFVIRVRMALHMKGVSHEYIEQDLFNKSELLLESSPVEKKVPVLIHDGKPVCDSPAIVQYIDEVWAATGPPILPADPYERAVARFWTAYVDDKLFPAYAGTAKAATEEERTQQINEMFAVMGQLEEAFAQCSNGKAFFAGDSIGNLDIAVGCNLLLLEVLRSMYGVEFVDTGRTPLLAAWAKRFGETDAAREVVPDVHVAVEYAKKRQAYWAAAAATK

SEQ ID NO: 6645 - protein, 233 aa, Glycine max
  peptide (1)..(233): Ceres Seq. ID no. 13638887
  misc_feature (88)..(203): Pfam Name: Pfam Description:  Glutathione S-transferase, C-terminal domain
  misc_feature (1)..(233): NCBI GI NO: 22022398 NR Description: glutathione-S-transferase Cla47
  misc_feature (1)..(232): NCBI GI NO: 37536354 NR Description: putative glutathione S-transferase
  misc_feature (1)..(232): NCBI GI NO: 37536352 NR Description: putative glutathione S-transferase
  misc_feature (7)..(229): NCBI GI NO: 11385503 NR Description: glutathione S-transferase GST 26 [Zea mays]
  misc_feature (3)..(231): NCBI GI NO: 37536308 NR Description: putative glutathione S-transferase
  misc_feature (6)..(230): NCBI GI NO: 33304612 NR Description: tau class GST protein 3
  misc_feature (6)..(230): NCBI GI NO: 37536312 NR Description: putative glutathione S-transferase
  misc_feature (1)..(231): NCBI GI NO: 11385517 NR Description: glutathione S-transferase GST 33 [Zea mays]
  misc_feature (1)..(233): NCBI GI NO: 21730248 NR Description: Chain A
  misc_feature (6)..(231): NCBI GI NO: 37536280 NR Description: putative glutathione S-transferase
MAAKPDLKLLGMSVSPFVIRVRMALHMKGVSHEYIEQDLFNKSELLLESSPVEKKVPVLIHDGKPVCDSPAIVQYIDEVWAATGPPILPADPYERAVARFWTAYVDDKLFPAYAGTAKAATEEERTQQINEMFAVMGQLEEAFAQCSNGKAFFAGDSIGNLDIAVGCNLLLLEVLRSMYGVEFVDTGRTPLLAAWAKRFGETDAAREVVPDVHVAVEYAKKRQAYWAAAAATK

SEQ ID NO: 6646 - protein, 222 aa, Glycine max
  peptide (1)..(222): Ceres Seq. ID no. 13638888
  misc_feature (77)..(192): Pfam Name: Pfam Description:  Glutathione S-transferase, C-terminal domain
  misc_feature (1)..(222): NCBI GI NO: 22022398 NR Description: glutathione-S-transferase Cla47
  misc_feature (1)..(221): NCBI GI NO: 37536354 NR Description: putative glutathione S-transferase
  misc_feature (1)..(221): NCBI GI NO: 37536352 NR Description: putative glutathione S-transferase
  misc_feature (1)..(218): NCBI GI NO: 11385503 NR Description: glutathione S-transferase GST 26 [Zea mays]
  misc_feature (1)..(220): NCBI GI NO: 37536308 NR Description: putative glutathione S-transferase
  misc_feature (1)..(219): NCBI GI NO: 33304612 NR Description: tau class GST protein 3
  misc_feature (1)..(219): NCBI GI NO: 37536312 NR Description: putative glutathione S-transferase
  misc_feature (1)..(220): NCBI GI NO: 11385517 NR Description: glutathione S-transferase GST 33 [Zea mays]
  misc_feature (1)..(222): NCBI GI NO: 21730248 NR Description: Chain A
  misc_feature (1)..(220): NCBI GI NO: 37536280 NR Description: putative glutathione S-transferase
MSVSPFVIRVRMALHMKGVSHEYIEQDLFNKSELLLESSPVEKKVPVLIHDGKPVCDSPAIVQYIDEVWAATGPPILPADPYERAVARFWTAYVDDKLFPAYAGTAKAATEEERTQQINEMFAVMGQLEEAFAQCSNGKAFFAGDSIGNLDIAVGCNLLLLEVLRSMYGVEFVDTGRTPLLAAWAKRFGETDAAREVVPDVHVAVEYAKKRQAYWAAAAATK

SEQ ID NO: 6647 - DNA, 793 bp, Glycine max
  misc_feature (1)..(793): Ceres Seq. ID no. 13594932
aggacaggccaagcggagaatcgagggtttcggcttccttgtcatctcgccgtctccgacgccggcgacccgggagcgagacctccaaccgccgccctctcgccggcggcgtatttccccgttccgtagaccaggtatgaagagggccgcgccgtcggaggagccggtggagctctcttcgggcgacgacctgagctcggattccgacgatgaggccgggaacgggaaaggcgagaactccttccggctgcccatgtcctccaaatctacagctccagcaaaaggtgcattgatcaggagggctgaaatgtatcaagagtacatgaagcacatcccaattcctgatcactgcagctccttgatcccatccacatcatggctgggactcggaagatcggtgaagcagttgtacgagcagcccttgcattacctcaccaacatcctcttgagacagtgggatcaacagagggttgggagcgataatgagcaccagcctctggatgctatcattcaccctatgaaagctcaggccctcatttgggccactgaagaagtccataggctgaccacctctagtgaccacttagagaagctctgggccaaagaccccatgtatcatgctaacatagatccagtgttcccttccctaaagttgcattagcaaacatcgcaagttggaccgtcttatcctgtctattttgtttctgcctgctgtaatctggcacattttggttgttagcgaagtaatatgaaccatatgtcactgatgttaaaagtatgatatgtgatggcc

SEQ ID NO: 6648 - protein, 219 aa, Glycine max
  peptide (1)..(219): Ceres Seq. ID no. 13594933
  misc_feature (52)..(214): NCBI GI NO: 30686741 NR Description: expressed protein [Arabidopsis thaliana]
  misc_feature (52)..(172): NCBI GI NO: 30102560 NR Description: At3g22680 [Arabidopsis thaliana]
GQAKRRIEGFGFLVISPSPTPATRERDLQPPPSRRRRISPFRRPGMKRAAPSEEPVELSSGDDLSSDSDDEAGNGKGENSFRLPMSSKSTAPAKGALIRRAEMYQEYMKHIPIPDHCSSLIPSTSWLGLGRSVKQLYEQPLHYLTNILLRQWDQQRVGSDNEHQPLDAIIHPMKAQALIWATEEVHRLTTSSDHLEKLWAKDPMYHANIDPVFPSLKLH

SEQ ID NO: 6649 - protein, 174 aa, Glycine max
  peptide (1)..(174): Ceres Seq. ID no. 13594934
  misc_feature (7)..(169): NCBI GI NO: 30686741 NR Description: expressed protein [Arabidopsis thaliana]
  misc_feature (7)..(127): NCBI GI NO: 30102560 NR Description: At3g22680 [Arabidopsis thaliana]
MKRAAPSEEPVELSSGDDLSSDSDDEAGNGKGENSFRLPMSSKSTAPAKGALIRRAEMYQEYMKHIPIPDHCSSLIPSTSWLGLGRSVKQLYEQPLHYLTNILLRQWDQQRVGSDNEHQPLDAIIHPMKAQALIWATEEVHRLTTSSDHLEKLWAKDPMYHANIDPVFPSLKLH

SEQ ID NO: 6650 - protein, 135 aa, Glycine max
  peptide (1)..(135): Ceres Seq. ID no. 13594935
  misc_feature (1)..(130): NCBI GI NO: 30686741 NR Description: expressed protein [Arabidopsis thaliana]
  misc_feature (1)..(88): NCBI GI NO: 30102560 NR Description: At3g22680 [Arabidopsis thaliana]
MSSKSTAPAKGALIRRAEMYQEYMKHIPIPDHCSSLIPSTSWLGLGRSVKQLYEQPLHYLTNILLRQWDQQRVGSDNEHQPLDAIIHPMKAQALIWATEEVHRLTTSSDHLEKLWAKDPMYHANIDPVFPSLKLH

SEQ ID NO: 6651 - DNA, 830 bp, Glycine max
  misc_feature (1)..(830): Ceres Seq. ID no. 12610031
atcacttaaacaagccaactgtgaccgcaagcttagacaaagaaacagagagagagagagaaacagaaagatggtgctaaaggtgtacggacctcactttgcttcaccgaagcgagctctggtaacgctcatcgagaagggcgtcgccttcgagaccgtccccgtcgatctcatgaaaggagaacacaagcagcctgcttatctcgccttacagcctttcggtaccgtccctgctgttgtcgacggcgactacaaaatctttgagtcacgtgccgtcatgaggtacgtagctgagaagtacaggtcacaaggacctgaccttttggggaaaaccgtggaagaaagaggtcaagttgagcaatggctagacgtggaggcgaccacttaccacccaccgctacttaacctgacacttcacataatgttcgcgtcagttatgggattcccatctgatgagaagctgatcaaggagagcgaagagaagctctcggctgttctcgatgtctacgaggcacatctctcaaagagcaagtacttggccggtgatttcgtgagcttggctgacttggctcacctcccgttcactgattacttggtgggtccgatcgggaaggcttacatgatcaaagataggaagcacgtgagcgcgtggtgggacagtattagcagccgtcctgcgtggaaggagactcttgagaagtattcattcccggcttaagaacatgatgttctttgttgttgttgtttgtgtgtttatgtgaggtttaataataatgtggcaatgtatgcttcttcttatattatgttacctctactctgtttcgttttgg

SEQ ID NO: 6652 - protein, 238 aa, Glycine max
  peptide (1)..(238): Ceres Seq. ID no. 12610032
  misc_feature (24)..(238): NCBI GI NO: 15224581 NR Description: glutathione transferase, putative
  misc_feature (24)..(238): NCBI GI NO: 2462929 NR Description: glutathione transferase [Arabidopsis thaliana]
  misc_feature (24)..(237): NCBI GI NO: 15224582 NR Description: glutathione transferase, putative
  misc_feature (29)..(237): NCBI GI NO: 11385459 NR Description: glutathione S-transferase GST 22 [Glycine max]
  misc_feature (24)..(237): NCBI GI NO: 11385463 NR Description: glutathione S-transferase GST 24 [Glycine max]
  misc_feature (24)..(237): NCBI GI NO: 21217741 NR Description: putative glutathione S-transferase
  misc_feature (24)..(232): NCBI GI NO: 1524316 NR Description: glutathione S-transferase [Petunia x hybrida]
  misc_feature (24)..(232): NCBI GI NO: 15228488 NR Description: glutathione transferase, putative
  misc_feature (24)..(230): NCBI GI NO: 18150415 NR Description: glutathione S-transferase [Allium cepa]
  misc_feature (28)..(237): NCBI GI NO: 11177845 NR Description: putative glutathione S-transferase OsGSTF3
SLKQANCDRKLRQRNRERERNRKMVLKVYGPHFASPKRALVTLIEKGVAFETVPVDLMKGEHKQPAYLALQPFGTVPAVVDGDYKIFESRAVMRYVAEKYRSQGPDLLGKTVEERGQVEQWLDVEATTYHPPLLNLTLHIMFASVMGFPSDEKLIKESEEKLSAVLDVYEAHLSKSKYLAGDFVSLADLAHLPFTDYLVGPIGKAYMIKDRKHVSAWWDSISSRPAWKETLEKYSFPA

SEQ ID NO: 6653 - protein, 215 aa, Glycine max
  peptide (1)..(215): Ceres Seq. ID no. 12610033
  misc_feature (1)..(215): NCBI GI NO: 15224581 NR Description: glutathione transferase, putative
  misc_feature (1)..(215): NCBI GI NO: 2462929 NR Description: glutathione transferase [Arabidopsis thaliana]
  misc_feature (1)..(214): NCBI GI NO: 15224582 NR Description: glutathione transferase, putative
  misc_feature (6)..(214): NCBI GI NO: 11385459 NR Description: glutathione S-transferase GST 22 [Glycine max]
  misc_feature (1)..(214): NCBI GI NO: 11385463 NR Description: glutathione S-transferase GST 24 [Glycine max]
  misc_feature (1)..(214): NCBI GI NO: 21217741 NR Description: putative glutathione S-transferase
  misc_feature (1)..(209): NCBI GI NO: 1524316 NR Description: glutathione S-transferase [Petunia x hybrida]
  misc_feature (1)..(209): NCBI GI NO: 15228488 NR Description: glutathione transferase, putative
  misc_feature (1)..(207): NCBI GI NO: 18150415 NR Description: glutathione S-transferase [Allium cepa]
  misc_feature (5)..(214): NCBI GI NO: 11177845 NR Description: putative glutathione S-transferase OsGSTF3
MVLKVYGPHFASPKRALVTLIEKGVAFETVPVDLMKGEHKQPAYLALQPFGTVPAVVDGDYKIFESRAVMRYVAEKYRSQGPDLLGKTVEERGQVEQWLDVEATTYHPPLLNLTLHIMFASVMGFPSDEKLIKESEEKLSAVLDVYEAHLSKSKYLAGDFVSLADLAHLPFTDYLVGPIGKAYMIKDRKHVSAWWDSISSRPAWKETLEKYSFPA

SEQ ID NO: 6654 - protein, 181 aa, Glycine max
  peptide (1)..(181): Ceres Seq. ID no. 12610034
  misc_feature (1)..(181): NCBI GI NO: 15224581 NR Description: glutathione transferase, putative
  misc_feature (1)..(181): NCBI GI NO: 2462929 NR Description: glutathione transferase [Arabidopsis thaliana]
  misc_feature (1)..(180): NCBI GI NO: 15224582 NR Description: glutathione transferase, putative
  misc_feature (1)..(180): NCBI GI NO: 11385459 NR Description: glutathione S-transferase GST 22 [Glycine max]
  misc_feature (1)..(180): NCBI GI NO: 11385463 NR Description: glutathione S-transferase GST 24 [Glycine max]
  misc_feature (1)..(180): NCBI GI NO: 21217741 NR Description: putative glutathione S-transferase
  misc_feature (1)..(175): NCBI GI NO: 1524316 NR Description: glutathione S-transferase [Petunia x hybrida]
  misc_feature (1)..(175): NCBI GI NO: 15228488 NR Description: glutathione transferase, putative
  misc_feature (1)..(173): NCBI GI NO: 18150415 NR Description: glutathione S-transferase [Allium cepa]
  misc_feature (1)..(180): NCBI GI NO: 11177845 NR Description: putative glutathione S-transferase OsGSTF3
MKGEHKQPAYLALQPFGTVPAVVDGDYKIFESRAVMRYVAEKYRSQGPDLLGKTVEERGQVEQWLDVEATTYHPPLLNLTLHIMFASVMGFPSDEKLIKESEEKLSAVLDVYEAHLSKSKYLAGDFVSLADLAHLPFTDYLVGPIGKAYMIKDRKHVSAWWDSISSRPAWKETLEKYSFPA

SEQ ID NO: 6655 - DNA, 742 bp, Glycine max
  misc_feature (1)..(742): Ceres Seq. ID no. 13595021
attacctagaacatcctaatcgaaaaaaacaaacacaaaaaaaaaaacatggcagctcaagcctcgggtctctttagctccgccgtaacaaccgccgctacctccggcgtaaaaaaactccaccttttcacaacaacccaccgtccaagatccctctccttccccaaaaccgcaatccgcgccgagaaaacagactccgccgccgccgccgccgccccggccgccgccgtgaaagaagaagctccggtgggattcacgccgccgcagctggacccgaacacgccgtctccgatcttcgcgggaagcacgggtggtcttctccgcaaggcccaggtggaggagttctacgtcatcacgtggaactcgccgaaggagcagatcttcgagatgccgacgggaggcgcggcgatcatgagggaaggtccgaacctgctgaagctggcgaggaaggagcagtgcttggcgttggggacgaggctcaggtccaagtacaagattaactaccagttctacagggtgttccctaacggtgaggttcagtatcttcatcctaaagatggggtttatccggagaaggcgaatgcgggaagagaaggtgtcggtcagaacatgagatctattgggaaaaatgttagtcccattgaagttaagtttactgggaaacaaagttatgatttgtaagttgtggaaacttaaaatgtgaaaaaacaaaaatcatgtggatgtgactatgtttggtttt

SEQ ID NO: 6656 - protein, 210 aa, Glycine max
  peptide (1)..(210): Ceres Seq. ID no. 15221456
  misc_feature (72)..(209): Pfam Name: Pfam Description:  PsaD
  misc_feature (1)..(210): NCBI GI NO: 15235503 NR Description: photosystem I reaction center subunit II precursor-related
  misc_feature (1)..(210): NCBI GI NO: 21595031 NR Description: putative photosystem I reaction center subunit IIprecursor
  misc_feature (1)..(210): NCBI GI NO: 15218708 NR Description: photosystem I reaction center subunit II precursor-related
  misc_feature (1)..(210): NCBI GI NO: 5732201 NR Description: photosystem I subunit II precursor
  misc_feature (1)..(210): NCBI GI NO: 72680 NR Description: photosystem I chain II precursor - spinach
  misc_feature (1)..(210): NCBI GI NO: 19855891 NR Description: Photosystem I reaction center subunit II
  misc_feature (1)..(210): NCBI GI NO: 21293 NR Description: 20 kDa protein (AA 1-212) [Spinacia oleracea]
  misc_feature (1)..(210): NCBI GI NO: 34787117 NR Description: putative photosystem I reaction centre PSI-D subunit precursor
  misc_feature (12)..(210): NCBI GI NO: 29367391 NR Description: chloroplast photosystem I reaction center subunitII precursor-like protein
  misc_feature (1)..(210): NCBI GI NO: 131167 NR Description: Photosystem I reaction center subunit II
MAAQASGLFSSAVTTAATSGVKKLHLFTTTHRPRSLSFPKTAIRAEKTDSAAAAAAPAAAVKEEAPVGFTPPQLDPNTPSPIFAGSTGGLLRKAQVEEFYVITWNSPKEQIFEMPTGGAAIMREGPNLLKLARKEQCLALGTRLRSKYKINYQFYRVFPNGEVQYLHPKDGVYPEKANAGREGVGQNMRSIGKNVSPIEVKFTGKQSYDL

SEQ ID NO: 6657 - DNA, 1240 bp, Glycine max
  misc_feature (1)..(1240): Ceres Seq. ID no. 15177057
actccatttagattctgcttgctcaccaatagaagtgtggtatagccggtggaaatgcagctcctaccgacactctgcttcttgttcttgcagctgctgccgagaggagacgcatccacctctcactctaatcgccacagatcagccccacattggctccccgccacggccacctggtacggaagtcctgagggcgatggcagcagcggaggagcatgcgggtatgggtcgctggtggacgtgaagccgttcaaggctcgcgttggagcagtgagtccgttgctgttcaagagcggcgaaggctgcggtgcttgctacaaggtcaggtgtctggacaagaccatctgctcaaagagagcagtcacaataattgtcacagaccagtcaccgtcaggaccatctgctcgagcaaagcacattcactttgaccttagtggcgccgcatttggccatttggctatccccggccattccggcatcatccgcaaccgcggcctcatctccctcctctatcgccggacggcatgcaaatacagagagaagaacatagcattccatgtgaacgcaggatcaacagcttattggttatctcttctcattgagtatgaagacggagaaggtgacattggctctatgcacattcgtcaagcggggtcgaaggagtggatagcaatgaagcacatatggggagcaaactggtgcatcgtcggaggaccactaaagggaccactctccgttaagctcaccactttgtcaaacaacaaaacgctctccgcagctgacgtcatccccaaaaaatgggttcccaaagctacttacacctcccgcctcaacttctcccctgtcctctaactaaactgaagctccccacccccatttctctgtcctcacttcttttttgttgggagagagaatcggtgaggatactgagtgagtgagagtgagaggatgctctcctccctcttccctcgtttttctttttctgttttgtttggggttgtgtttatgtgtgttggtgaaggaagccatcagagcttgattctgtgactacttactatagtacttactacttactaatgttggacctactctttatgtaatcctttttttaatattttttcttatttgcttctaaaccttgtaaaaggcgataggagtaaagtactgtattatcatcatatttagtgtcatttgtgggacattattatataatgagacagcctacaaatgcataaataat

SEQ ID NO: 6658 - protein, 265 aa, Glycine max
  peptide (1)..(265): Ceres Seq. ID no. 15177058
  misc_feature (165)..(246): Pfam Name: Pfam Description:  Pollen allergen
  misc_feature (3)..(265): NCBI GI NO: 15225423 NR Description: beta-expansin, putative (EXPB1)
  misc_feature (10)..(265): NCBI GI NO: 11357194 NR Description: beta-expansin
  misc_feature (1)..(265): NCBI GI NO: 18417157 NR Description: beta-expansin, putative (EXPB3)
  misc_feature (3)..(265): NCBI GI NO: 21592834 NR Description: putative beta-expansin/allergen protein
  misc_feature (1)..(234): NCBI GI NO: 7484871 NR Description: cim1 protein homolog F26K10
  misc_feature (6)..(265): NCBI GI NO: 38346623 NR Description: OSJNBa0074L08.17
  misc_feature (6)..(198): NCBI GI NO: 21666634 NR Description: beta-expansin [Oryza sativa]
  misc_feature (30)..(262): NCBI GI NO: 1076486 NR Description: cim1 protein - soybean
  misc_feature (34)..(261): NCBI GI NO: 20138423 NR Description: Putative beta-expansin 2 precursor
  misc_feature (34)..(261): NCBI GI NO: 14193767 NR Description: beta-expansin 4 [Zea mays]
MQLLPTLCFLFLQLLPRGDASTSHSNRHRSAPHWLPATATWYGSPEGDGSSGGACGYGSLVDVKPFKARVGAVSPLLFKSGEGCGACYKVRCLDKTICSKRAVTIIVTDQSPSGPSARAKHIHFDLSGAAFGHLAIPGHSGIIRNRGLISLLYRRTACKYREKNIAFHVNAGSTAYWLSLLIEYEDGEGDIGSMHIRQAGSKEWIAMKHIWGANWCIVGGPLKGPLSVKLTTLSNNKTLSAADVIPKKWVPKATYTSRLNFSPVL

SEQ ID NO: 6659 - DNA, 1037 bp, Glycine max
  misc_feature (1)..(1037): Ceres Seq. ID no. 13594940
aatttctccttcctctctgcccatacatatctctctctccatcgatctaacctacacacacagagaaagagagagaagcagcagtagcacatgtaacctagctagcctgcggttctccacggcaacgcttcttcttcttggctgccgcctggtgaacctcgccgtagtctgaacggctaggggggcagcgaggcggcggcgccaggggataatcaggaggaatgtcgtcgtcgggccagatcgcgccggcagaacaagtctgctacgtccactgcaacttctgcaacaccgtactcgcggtgagtgtccctgggaacagcatgctcaacattgtgacagtccggtgtgggcactgtacaaacctactttcggtgagcctgagagggcagatgcactcaccagtccctcctgcagcacaggtccaggagagcagcctgagcaagcccaatggcagcaacggcttcattcgcgatcacagcgtctacaatagcccggagtttggttcgtcttcttcttcgtcgtcgtccaaattccggatgccgacgatgatgttctcgtcgcaaaatgatctgctgcaggaacagacgctgcacgcacgtcctccggagaagaggcagcgtgttccttcagcgtacaacagattcatcaaggaagagatacgaaggataaaggcaaacaaccccgacattagccacagggaagccttcagcactgccgcaaagaactgggcacattacccaaacatccatttcggtctaaaccccgagcgcgacggtggcaagaggctcgccgtcgacgatgccgcgccggctgccaagaagatccaaggtttctgttcatagacacgacggttgggagtccaaacaagaacaattgtatctatatatagtattagtatatcgcatatgtgtatacgtaccgcatgtgagtaagtaaagatgcaaaggaaaagagaagaagtcactacgtaccttaccttatacaattgtacgtacatatacggtgatcgagtgaataaataattagtctgtcttttt

SEQ ID NO: 6660 - protein, 206 aa, Glycine max
  peptide (1)..(206): Ceres Seq. ID no. 13594941
  misc_feature (11)..(65): Pfam Name: Pfam Description:  YABBY protein
  misc_feature (126)..(191): NCBI GI NO: 37551421 NR Description: FIL-like protein [Triticum aestivum]
  misc_feature (8)..(73): NCBI GI NO: 37551421 NR Description: FIL-like protein [Triticum aestivum]
  misc_feature (126)..(191): NCBI GI NO: 37535908 NR Description: hypothetical protein
  misc_feature (11)..(65): NCBI GI NO: 37535908 NR Description: hypothetical protein
  misc_feature (7)..(206): NCBI GI NO: 27804377 NR Description: MADS-box transcription factor CDM51
  misc_feature (1)..(188): NCBI GI NO: 18406725 NR Description: abnormal floral organs protein
  misc_feature (10)..(204): NCBI GI NO: 4928751 NR Description: YABBY2 [Arabidopsis thaliana]
  misc_feature (11)..(191): NCBI GI NO: 18411242 NR Description: YABBY3 axial regulator -related
  misc_feature (89)..(202): NCBI GI NO: 11280864 NR Description: hypothetical protein 2 [imported] - rice
  misc_feature (12)..(176): NCBI GI NO: 8778574 NR Description: F28C11.6 [Arabidopsis thaliana]
MSSSGQIAPAEQVCYVHCNFCNTVLAVSVPGNSMLNIVTVRCGHCTNLLSVSLRGQMHSPVPPAAQVQESSLSKPNGSNGFIRDHSVYNSPEFGSSSSSSSSKFRMPTMMFSSQNDLLQEQTLHARPPEKRQRVPSAYNRFIKEEIRRIKANNPDISHREAFSTAAKNWAHYPNIHFGLNPERDGGKRLAVDDAAPAAKKIQGFCS

SEQ ID NO: 6661 - protein, 173 aa, Glycine max
  peptide (1)..(173): Ceres Seq. ID no. 13594942
  misc_feature (93)..(146): Pfam Name: Pfam Description:  YABBY protein
  misc_feature (93)..(158): NCBI GI NO: 37551421 NR Description: FIL-like protein [Triticum aestivum]
  misc_feature (1)..(40): NCBI GI NO: 37551421 NR Description: FIL-like protein [Triticum aestivum]
  misc_feature (93)..(158): NCBI GI NO: 37535908 NR Description: hypothetical protein
  misc_feature (1)..(32): NCBI GI NO: 37535908 NR Description: hypothetical protein
  misc_feature (1)..(173): NCBI GI NO: 27804377 NR Description: MADS-box transcription factor CDM51
  misc_feature (1)..(155): NCBI GI NO: 18406725 NR Description: abnormal floral organs protein
  misc_feature (1)..(171): NCBI GI NO: 4928751 NR Description: YABBY2 [Arabidopsis thaliana]
  misc_feature (1)..(158): NCBI GI NO: 18411242 NR Description: YABBY3 axial regulator -related
  misc_feature (56)..(169): NCBI GI NO: 11280864 NR Description: hypothetical protein 2 [imported] - rice
  misc_feature (1)..(143): NCBI GI NO: 8778574 NR Description: F28C11.6 [Arabidopsis thaliana]
MLNIVTVRCGHCTNLLSVSLRGQMHSPVPPAAQVQESSLSKPNGSNGFIRDHSVYNSPEFGSSSSSSSSKFRMPTMMFSSQNDLLQEQTLHARPPEKRQRVPSAYNRFIKEEIRRIKANNPDISHREAFSTAAKNWAHYPNIHFGLNPERDGGKRLAVDDAAPAAKKIQGFCS

SEQ ID NO: 6662 - protein, 150 aa, Glycine max
  peptide (1)..(150): Ceres Seq. ID no. 13594943
  misc_feature (70)..(123): Pfam Name: Pfam Description:  YABBY protein
  misc_feature (70)..(135): NCBI GI NO: 37551421 NR Description: FIL-like protein [Triticum aestivum]
  misc_feature (1)..(17): NCBI GI NO: 37551421 NR Description: FIL-like protein [Triticum aestivum]
  misc_feature (70)..(135): NCBI GI NO: 37535908 NR Description: hypothetical protein
  misc_feature (1)..(150): NCBI GI NO: 27804377 NR Description: MADS-box transcription factor CDM51
  misc_feature (1)..(132): NCBI GI NO: 18406725 NR Description: abnormal floral organs protein
  misc_feature (1)..(148): NCBI GI NO: 4928751 NR Description: YABBY2 [Arabidopsis thaliana]
  misc_feature (1)..(135): NCBI GI NO: 18411242 NR Description: YABBY3 axial regulator -related
  misc_feature (33)..(146): NCBI GI NO: 11280864 NR Description: hypothetical protein 2 [imported] - rice
  misc_feature (1)..(120): NCBI GI NO: 8778574 NR Description: F28C11.6 [Arabidopsis thaliana]
  misc_feature (1)..(120): NCBI GI NO: 18395240 NR Description: F28C11.5 [Arabidopsis thaliana]
MHSPVPPAAQVQESSLSKPNGSNGFIRDHSVYNSPEFGSSSSSSSSKFRMPTMMFSSQNDLLQEQTLHARPPEKRQRVPSAYNRFIKEEIRRIKANNPDISHREAFSTAAKNWAHYPNIHFGLNPERDGGKRLAVDDAAPAAKKIQGFCS

SEQ ID NO: 6663 - DNA, 1181 bp, Glycine max
  misc_feature (1)..(1181): Ceres Seq. ID no. 12610002
aaagtaaaagtcttatagatctctacagatcccaccactgaaaggaccattttgattcttccatcaaatttctctcgacgtccggcggattttgaggaagtggagagcaaaagcttgattttagcaactatggagagcttctggcaactgggtgatgagctccgaggtcagtcaagagcatcagaggatcacaagtggtccactgttgctacaaagttagctgagcagactaggatgaaaggggagaggacgaacaaccttgatctctccaaaagctactctgagttcagaccaagcgacaagtttagtttccaggagaacaacaacctcaacttcaacatgaatctgatgcagggcaatgtttacaacaacatgaatggatttaaaagtggaggcaacatgaaagttaacaagtacattggcaatgttgttgctaacaaagagatgagcaatgatagtgttgttgacaagaggtttaaaacgctgcctgcatcagagacgcttccgaggaatgaagttcttggcgggtacatctttgtttgcaacaatgataccatgcaggacgacttgaaacgtcacctatttggtttacctccgagatatagggactctgtaagggctataacacctgggttgcctctgtttctttacaattacactactcaccagttgcatggtatcttcgaggcaacaacttttggaggtactaacattgatgccactgcttgggaagacaaaaagtgcaaaggagagtctagatttccagctcaggtaaggatcagagtgaggaaaatatgcaaagccttggaagaggattctttcaggcctgttcttcaccattatgatggtccaaagttccgccttgagctcactgttcccgagacattggatctgctagatctctgtgaacaagctggctctccataagccggggatcaacctttgcaataccacgttgctaagtttgtctgaaacggcgaaacctatctaaatatatatatgcatattaccataagagcgtaagcttttggggtttagttaagagtctagttcaaatgtatggtttactaagaagcgactattctcagttcttgttgtgtctagtgtgtgagtttgtctgtgtctgtaagagtcttgataacccttttgagacgatgatttatgtagagagaaagtaaaag

SEQ ID NO: 6664 - protein, 265 aa, Glycine max
  peptide (1)..(265): Ceres Seq. ID no. 12610003
  misc_feature (42)..(264): NCBI GI NO: 15232081 NR Description: gda-1, putative; protein id: At3g27090
  misc_feature (42)..(264): NCBI GI NO: 21592623 NR Description: gda-1, putative [Arabidopsis thaliana]
  misc_feature (70)..(264): NCBI GI NO: 21665866 NR Description: GDA2 protein [Pisum sativum]
  misc_feature (69)..(264): NCBI GI NO: 2369766 NR Description: hypothetical protein [Citrus x paradisi]
  misc_feature (62)..(261): NCBI GI NO: 584825 NR Description: B2 PROTEIN
  misc_feature (69)..(258): NCBI GI NO: 9757950 NR Description: gene_id:MJC20
  misc_feature (69)..(258): NCBI GI NO: 18422167 NR Description: putative protein; protein id: At5g42050
  misc_feature (48)..(252): NCBI GI NO: 34913876 NR Description: B1156H12.22
  misc_feature (1)..(129): NCBI GI NO: 21592623 NR Description: gda-1, putative [Arabidopsis thaliana]
  misc_feature (1)..(104): NCBI GI NO: 15232081 NR Description: gda-1, putative; protein id: At3g27090
MESFWQLGDELRGQSRASEDHKWSTVATKLAEQTRMKGERTNNLDLSKSYSEFRPSDKFSFQENNNLNFNMNLMQGNVYNNMNGFKSGGNMKVNKYIGNVVANKEMSNDSVVDKRFKTLPASETLPRNEVLGGYIFVCNNDTMQDDLKRHLFGLPPRYRDSVRAITPGLPLFLYNYTTHQLHGIFEATTFGGTNIDATAWEDKKCKGESRFPAQVRIRVRKICKALEEDSFRPVLHHYDGPKFRLELTVPETLDLLDLCEQAGSP

SEQ ID NO: 6665 - protein, 230 aa, Glycine max
  peptide (1)..(230): Ceres Seq. ID no. 12610004
  misc_feature (7)..(229): NCBI GI NO: 15232081 NR Description: gda-1, putative; protein id: At3g27090
  misc_feature (7)..(229): NCBI GI NO: 21592623 NR Description: gda-1, putative [Arabidopsis thaliana]
  misc_feature (35)..(229): NCBI GI NO: 21665866 NR Description: GDA2 protein [Pisum sativum]
  misc_feature (34)..(229): NCBI GI NO: 2369766 NR Description: hypothetical protein [Citrus x paradisi]
  misc_feature (27)..(226): NCBI GI NO: 584825 NR Description: B2 PROTEIN
  misc_feature (34)..(223): NCBI GI NO: 9757950 NR Description: gene_id:MJC20
  misc_feature (34)..(223): NCBI GI NO: 18422167 NR Description: putative protein; protein id: At5g42050
  misc_feature (13)..(217): NCBI GI NO: 34913876 NR Description: B1156H12.22
  misc_feature (1)..(94): NCBI GI NO: 21592623 NR Description: gda-1, putative [Arabidopsis thaliana]
  misc_feature (1)..(69): NCBI GI NO: 15232081 NR Description: gda-1, putative; protein id: At3g27090
MKGERTNNLDLSKSYSEFRPSDKFSFQENNNLNFNMNLMQGNVYNNMNGFKSGGNMKVNKYIGNVVANKEMSNDSVVDKRFKTLPASETLPRNEVLGGYIFVCNNDTMQDDLKRHLFGLPPRYRDSVRAITPGLPLFLYNYTTHQLHGIFEATTFGGTNIDATAWEDKKCKGESRFPAQVRIRVRKICKALEEDSFRPVLHHYDGPKFRLELTVPETLDLLDLCEQAGSP

SEQ ID NO: 6666 - protein, 195 aa, Glycine max
  peptide (1)..(195): Ceres Seq. ID no. 12610005
  misc_feature (1)..(194): NCBI GI NO: 15232081 NR Description: gda-1, putative; protein id: At3g27090
  misc_feature (1)..(194): NCBI GI NO: 21592623 NR Description: gda-1, putative [Arabidopsis thaliana]
  misc_feature (1)..(194): NCBI GI NO: 21665866 NR Description: GDA2 protein [Pisum sativum]
  misc_feature (1)..(194): NCBI GI NO: 2369766 NR Description: hypothetical protein [Citrus x paradisi]
  misc_feature (1)..(191): NCBI GI NO: 584825 NR Description: B2 PROTEIN
  misc_feature (1)..(188): NCBI GI NO: 9757950 NR Description: gene_id:MJC20
  misc_feature (1)..(188): NCBI GI NO: 18422167 NR Description: putative protein; protein id: At5g42050
  misc_feature (1)..(182): NCBI GI NO: 34913876 NR Description: B1156H12.22
  misc_feature (1)..(59): NCBI GI NO: 21592623 NR Description: gda-1, putative [Arabidopsis thaliana]
  misc_feature (1)..(34): NCBI GI NO: 15232081 NR Description: gda-1, putative; protein id: At3g27090
MNLMQGNVYNNMNGFKSGGNMKVNKYIGNVVANKEMSNDSVVDKRFKTLPASETLPRNEVLGGYIFVCNNDTMQDDLKRHLFGLPPRYRDSVRAITPGLPLFLYNYTTHQLHGIFEATTFGGTNIDATAWEDKKCKGESRFPAQVRIRVRKICKALEEDSFRPVLHHYDGPKFRLELTVPETLDLLDLCEQAGSP

SEQ ID NO: 6667 - DNA, 981 bp, Glycine max
  misc_feature (1)..(981): Ceres Seq. ID no. 12610286
aaaaaatcaaaaatctcagccatggcgattgcttcaacctccactcttatcttctcctgcgccaaacccgatctccggccatttccgtcccattttcgttcttcttctccgtctccctctcctcttgtgagtcagctccgtatccctagcctaacccatgacccgatttctctgtcgggtcttatcggaaccggtttggtggctgcgacgttcatggcggcaggaccaggtagtactgctatggcggcggttgattctcttcagctaagcgaaccggcgaatgcgttgtctttacccacttgggctgttcatgtttccagcgttgtcgaatggattacggcgatggtgttggtatggaaatatggagaaagagagggttacgagtcatggaaaggtctctcatggggaatggtgcctttgcttggtggagctctttgcgcatgcacatggcatttcttttacaatgctgaatctcttgaggtgttggtagcgcttcagggagcactaactgtgattggtaatattactctgtgcattgctgcctttcgaatcaacaagtctgcatccaaaatggaaacctctgaagagccgtgagggctaaatacacatctatgtgtttaaaataaaggtcaaaggaatgatttgttttcagtaatttctacaggcaggaatctgaggtgtagcctttttggagagtggtgatggttagagaagcaactggatctttggatgtggtattagcggaaagatctttttgctttatatctctagtgattgcactaaacatgtttcttgagcgtgtgtgtgtatatacttttatattgtagtgtattgtattgtattatcctgattatattcctggtgagtgaggccagtgcttcatgttcataacctattatgtaaacattcttcttctgcaatcgttgtagtcctgacttcattattttcggtcttaggcttggatgatcacagagttcatgc

SEQ ID NO: 6668 - protein, 197 aa, Glycine max
  peptide (1)..(197): Ceres Seq. ID no. 12610287
  misc_feature (8)..(197): NCBI GI NO: 30685952 NR Description: expressed protein [Arabidopsis thaliana]
  misc_feature (32)..(190): NCBI GI NO: 32489057 NR Description: OSJNBb0089B03.1
  misc_feature (8)..(114): NCBI GI NO: 7486889 NR Description: hypothetical protein T12H17
  misc_feature (94)..(190): NCBI GI NO: 16331563 NR Description: hypothetical protein [Synechocystis sp. PCC 6803]
  misc_feature (94)..(195): NCBI GI NO: 17232000 NR Description: hypothetical protein [Nostoc sp. PCC 7120]
  misc_feature (95)..(190): NCBI GI NO: 37521445 NR Description: hypothetical protein glr1876
  misc_feature (94)..(192): NCBI GI NO: 23041345 NR Description: hypothetical protein
  misc_feature (94)..(181): NCBI GI NO: 22298980 NR Description: ORF_ID:tlr1437~hypothetical protein
  misc_feature (96)..(192): NCBI GI NO: 33861461 NR Description: conserved hypothetical protein
  misc_feature (94)..(194): NCBI GI NO: 33865822 NR Description: conserved hypothetical protein
KKSKISAMAIASTSTLIFSCAKPDLRPFPSHFRSSSPSPSPLVSQLRIPSLTHDPISLSGLIGTGLVAATFMAAGPGSTAMAAVDSLQLSEPANALSLPTWAVHVSSVVEWITAMVLVWKYGEREGYESWKGLSWGMVPLLGGALCACTWHFFYNAESLEVLVALQGALTVIGNITLCIAAFRINKSASKMETSEEP

SEQ ID NO: 6669 - protein, 190 aa, Glycine max
  peptide (1)..(190): Ceres Seq. ID no. 12610288
  misc_feature (1)..(190): NCBI GI NO: 30685952 NR Description: expressed protein [Arabidopsis thaliana]
  misc_feature (25)..(183): NCBI GI NO: 32489057 NR Description: OSJNBb0089B03.1
  misc_feature (1)..(107): NCBI GI NO: 7486889 NR Description: hypothetical protein T12H17
  misc_feature (87)..(183): NCBI GI NO: 16331563 NR Description: hypothetical protein [Synechocystis sp. PCC 6803]
  misc_feature (87)..(188): NCBI GI NO: 17232000 NR Description: hypothetical protein [Nostoc sp. PCC 7120]
  misc_feature (88)..(183): NCBI GI NO: 37521445 NR Description: hypothetical protein glr1876
  misc_feature (87)..(185): NCBI GI NO: 23041345 NR Description: hypothetical protein
  misc_feature (87)..(174): NCBI GI NO: 22298980 NR Description: ORF_ID:tlr1437~hypothetical protein
  misc_feature (89)..(185): NCBI GI NO: 33861461 NR Description: conserved hypothetical protein
  misc_feature (87)..(187): NCBI GI NO: 33865822 NR Description: conserved hypothetical protein
MAIASTSTLIFSCAKPDLRPFPSHFRSSSPSPSPLVSQLRIPSLTHDPISLSGLIGTGLVAATFMAAGPGSTAMAAVDSLQLSEPANALSLPTWAVHVSSVVEWITAMVLVWKYGEREGYESWKGLSWGMVPLLGGALCACTWHFFYNAESLEVLVALQGALTVIGNITLCIAAFRINKSASKMETSEEP

SEQ ID NO: 6670 - protein, 126 aa, Glycine max
  peptide (1)..(126): Ceres Seq. ID no. 12610289
  misc_feature (1)..(126): NCBI GI NO: 30685952 NR Description: expressed protein [Arabidopsis thaliana]
  misc_feature (1)..(119): NCBI GI NO: 32489057 NR Description: OSJNBb0089B03.1
  misc_feature (1)..(43): NCBI GI NO: 7486889 NR Description: hypothetical protein T12H17
  misc_feature (23)..(119): NCBI GI NO: 16331563 NR Description: hypothetical protein [Synechocystis sp. PCC 6803]
  misc_feature (23)..(124): NCBI GI NO: 17232000 NR Description: hypothetical protein [Nostoc sp. PCC 7120]
  misc_feature (24)..(119): NCBI GI NO: 37521445 NR Description: hypothetical protein glr1876
  misc_feature (23)..(121): NCBI GI NO: 23041345 NR Description: hypothetical protein
  misc_feature (23)..(110): NCBI GI NO: 22298980 NR Description: ORF_ID:tlr1437~hypothetical protein
  misc_feature (25)..(121): NCBI GI NO: 33861461 NR Description: conserved hypothetical protein
  misc_feature (23)..(123): NCBI GI NO: 33865822 NR Description: conserved hypothetical protein
MAAGPGSTAMAAVDSLQLSEPANALSLPTWAVHVSSVVEWITAMVLVWKYGEREGYESWKGLSWGMVPLLGGALCACTWHFFYNAESLEVLVALQGALTVIGNITLCIAAFRINKSASKMETSEEP

SEQ ID NO: 6671 - DNA, 870 bp, Glycine max
  misc_feature (1)..(870): Ceres Seq. ID no. 13638889
atcatcgataaaagcaaagaaacaagattcgaaaaagttagcgttaaacaatctccacttctctctcccacaagaaaatcaccaagaaaccgttaatcatctatggcgaacatgaacactcttcaacagatgatcttccctgacgagaacgctccgattcatcgcaaaaagagtgttactgctgcttctcttaagaccaaaggaactgtacttggtcagaagaaacctggaggggctcgtaaggctctgaatgatatcacaaacaagtctggtgttcttcccaaagcttcttctaagaacaagcaactcgcgtctgctgcaaagggagaaatcaacatagctggagagatgttcttgcatgatcacagcaagtgcatcaaagagcagcagagtctctgggatgatcacttctctgctgacattctactccaccatgattcgtccagcgtcaagggaaagaatctcaagtatgacaaagaagtgatggatggtaagaacaatctgacttgtgaggaaccagaagagattccatctcccaagctgactgattggctcaagagctcaaccccctggcgctctccaatacgtcatggctctatgatgatgccttccacacctctggcttggcggtttgattcagacgaattcactctcaaggaagactttgacgacctcttctgaatgtctgtttcttaagtgtctaagcttttcatccttcggatgaagtagtagtagtagtaatagcaagcaactttctttcgtttcagctcatcaatgcttcagttctttatgtacttaacaactctgtgtccgtccatcactctctttaactgatttcatgaattaaaaaagttggaatcttttcaagcg

SEQ ID NO: 6672 - protein, 192 aa, Glycine max
  peptide (1)..(192): Ceres Seq. ID no. 13638890
  misc_feature (1)..(192): NCBI GI NO: 18400304 NR Description: expressed protein [Arabidopsis thaliana]
  misc_feature (1)..(192): NCBI GI NO: 27808526 NR Description: At3g14190 [Arabidopsis thaliana]
  misc_feature (1)..(192): NCBI GI NO: 21536825 NR Description: unknown [Arabidopsis thaliana]
  misc_feature (1)..(189): NCBI GI NO: 18416846 NR Description: hypothetical protein [Arabidopsis thaliana]
MANMNTLQQMIFPDENAPIHRKKSVTAASLKTKGTVLGQKKPGGARKALNDITNKSGVLPKASSKNKQLASAAKGEINIAGEMFLHDHSKCIKEQQSLWDDHFSADILLHHDSSSVKGKNLKYDKEVMDGKNNLTCEEPEEIPSPKLTDWLKSSTPWRSPIRHGSMMMPSTPLAWRFDSDEFTLKEDFDDLF

SEQ ID NO: 6673 - protein, 189 aa, Glycine max
  peptide (1)..(189): Ceres Seq. ID no. 13638891
  misc_feature (1)..(189): NCBI GI NO: 18400304 NR Description: expressed protein [Arabidopsis thaliana]
  misc_feature (1)..(189): NCBI GI NO: 27808526 NR Description: At3g14190 [Arabidopsis thaliana]
  misc_feature (1)..(189): NCBI GI NO: 21536825 NR Description: unknown [Arabidopsis thaliana]
  misc_feature (1)..(186): NCBI GI NO: 18416846 NR Description: hypothetical protein [Arabidopsis thaliana]
MNTLQQMIFPDENAPIHRKKSVTAASLKTKGTVLGQKKPGGARKALNDITNKSGVLPKASSKNKQLASAAKGEINIAGEMFLHDHSKCIKEQQSLWDDHFSADILLHHDSSSVKGKNLKYDKEVMDGKNNLTCEEPEEIPSPKLTDWLKSSTPWRSPIRHGSMMMPSTPLAWRFDSDEFTLKEDFDDLF

SEQ ID NO: 6674 - protein, 183 aa, Glycine max
  peptide (1)..(183): Ceres Seq. ID no. 13638892
  misc_feature (1)..(183): NCBI GI NO: 18400304 NR Description: expressed protein [Arabidopsis thaliana]
  misc_feature (1)..(183): NCBI GI NO: 27808526 NR Description: At3g14190 [Arabidopsis thaliana]
  misc_feature (1)..(183): NCBI GI NO: 21536825 NR Description: unknown [Arabidopsis thaliana]
  misc_feature (1)..(180): NCBI GI NO: 18416846 NR Description: hypothetical protein [Arabidopsis thaliana]
MIFPDENAPIHRKKSVTAASLKTKGTVLGQKKPGGARKALNDITNKSGVLPKASSKNKQLASAAKGEINIAGEMFLHDHSKCIKEQQSLWDDHFSADILLHHDSSSVKGKNLKYDKEVMDGKNNLTCEEPEEIPSPKLTDWLKSSTPWRSPIRHGSMMMPSTPLAWRFDSDEFTLKEDFDDLF

SEQ ID NO: 6675 - DNA, 766 bp, Glycine max
  misc_feature (1)..(766): Ceres Seq. ID no. 13638893
actcttcaaagtctccgccagacacttctccatcaaaactcctctcacacaatggccacttccttccctaccttgacaccttttcttttcatcctccttctctccatcccctccgttcttgaagcagctcatcaccacacggcggcgccggctccggctgtagactgttcgatgctcatactcaacatggctgattgtttgtcctttgtttccgctggaggcacggaggccaagccggctagttcgtgttgcaacggccttaagacggtgctcaagactgacgcagagtgtctatgtgaggcgtttaaaagcagtgcttctctaggagttactttgaacatgactaaagcagctacacttcccgctgcatgcaagcttcacgctccttctatggctgcttgtggattgtccgccgctcctactatggctccaggtcttgctccaggaggagctgctggacccgacttaagttttctatctccaaacccatctccagggaaccgcggatcttccttgcttcccttctccttcaccaccgtactcggtgctatgtccttcgtattgttattcttgtctcgtgtctgaagaagccagctagatttggttgtatgaaatggctttgggtttgggttttcgtgactttagttttgcgtgtcttttgagtctacttctgttttagaccatgtcggtttctgttcgtagtttatttaatcttaattacgtttcacattggtccttttatctaagaacatctctgatccctcgt

SEQ ID NO: 6676 - protein, 194 aa, Glycine max
  peptide (1)..(194): Ceres Seq. ID no. 13638894
  misc_feature (56)..(134): Pfam Name: Pfam Description:  Protease inhibitor/seed storage/LTP family
  misc_feature (18)..(192): NCBI GI NO: 21618136 NR Description: nonspecific lipid-transfer protein-like protein
  misc_feature (18)..(192): NCBI GI NO: 18424785 NR Description: protease inhibitor/seed storage/lipid transfer
  misc_feature (18)..(192): NCBI GI NO: 10176956 NR Description: contains similarity to nonspecific lipid-transferprotein~gene_id:MHJ24
  misc_feature (31)..(181): NCBI GI NO: 15225509 NR Description: protease inhibitor/seed storage/lipid transfer
  misc_feature (31)..(181): NCBI GI NO: 27765012 NR Description: At2g13820 [Arabidopsis thaliana]
  misc_feature (22)..(186): NCBI GI NO: 30682659 NR Description: lipid transfer protein family
  misc_feature (49)..(192): NCBI GI NO: 7487610 NR Description: hypothetical protein T3F12
  misc_feature (22)..(149): NCBI GI NO: 18415958 NR Description: lipid transfer protein family
  misc_feature (49)..(171): NCBI GI NO: 30680828 NR Description: protease inhibitor/seed storage/lipid transfer
  misc_feature (47)..(161): NCBI GI NO: 15220327 NR Description: protease inhibitor/seed storage/lipid transfer
TLQSLRQTLLHQNSSHTMATSFPTLTPFLFILLLSIPSVLEAAHHHTAAPAPAVDCSMLILNMADCLSFVSAGGTEAKPASSCCNGLKTVLKTDAECLCEAFKSSASLGVTLNMTKAATLPAACKLHAPSMAACGLSAAPTMAPGLAPGGAAGPDLSFLSPNPSPGNRGSSLLPFSFTTVLGAMSFVLLFLSRV

SEQ ID NO: 6677 - protein, 177 aa, Glycine max
  peptide (1)..(177): Ceres Seq. ID no. 13638895
  misc_feature (39)..(117): Pfam Name: Pfam Description:  Protease inhibitor/seed storage/LTP family
  misc_feature (1)..(175): NCBI GI NO: 21618136 NR Description: nonspecific lipid-transfer protein-like protein
  misc_feature (1)..(175): NCBI GI NO: 18424785 NR Description: protease inhibitor/seed storage/lipid transfer
  misc_feature (1)..(175): NCBI GI NO: 10176956 NR Description: contains similarity to nonspecific lipid-transferprotein~gene_id:MHJ24
  misc_feature (14)..(164): NCBI GI NO: 15225509 NR Description: protease inhibitor/seed storage/lipid transfer
  misc_feature (14)..(164): NCBI GI NO: 27765012 NR Description: At2g13820 [Arabidopsis thaliana]
  misc_feature (5)..(169): NCBI GI NO: 30682659 NR Description: lipid transfer protein family
  misc_feature (32)..(175): NCBI GI NO: 7487610 NR Description: hypothetical protein T3F12
  misc_feature (5)..(132): NCBI GI NO: 18415958 NR Description: lipid transfer protein family
  misc_feature (32)..(154): NCBI GI NO: 30680828 NR Description: protease inhibitor/seed storage/lipid transfer
  misc_feature (30)..(144): NCBI GI NO: 15220327 NR Description: protease inhibitor/seed storage/lipid transfer
MATSFPTLTPFLFILLLSIPSVLEAAHHHTAAPAPAVDCSMLILNMADCLSFVSAGGTEAKPASSCCNGLKTVLKTDAECLCEAFKSSASLGVTLNMTKAATLPAACKLHAPSMAACGLSAAPTMAPGLAPGGAAGPDLSFLSPNPSPGNRGSSLLPFSFTTVLGAMSFVLLFLSRV

SEQ ID NO: 6678 - protein, 137 aa, Glycine max
  peptide (1)..(137): Ceres Seq. ID no. 13638896
  misc_feature (1)..(77): Pfam Name: Pfam Description:  Protease inhibitor/seed storage/LTP family
  misc_feature (1)..(135): NCBI GI NO: 21618136 NR Description: nonspecific lipid-transfer protein-like protein
  misc_feature (1)..(135): NCBI GI NO: 18424785 NR Description: protease inhibitor/seed storage/lipid transfer
  misc_feature (1)..(135): NCBI GI NO: 10176956 NR Description: contains similarity to nonspecific lipid-transferprotein~gene_id:MHJ24
  misc_feature (1)..(124): NCBI GI NO: 15225509 NR Description: protease inhibitor/seed storage/lipid transfer
  misc_feature (1)..(124): NCBI GI NO: 27765012 NR Description: At2g13820 [Arabidopsis thaliana]
  misc_feature (1)..(129): NCBI GI NO: 30682659 NR Description: lipid transfer protein family
  misc_feature (1)..(135): NCBI GI NO: 7487610 NR Description: hypothetical protein T3F12
  misc_feature (1)..(92): NCBI GI NO: 18415958 NR Description: lipid transfer protein family
  misc_feature (1)..(114): NCBI GI NO: 30680828 NR Description: protease inhibitor/seed storage/lipid transfer
  misc_feature (1)..(104): NCBI GI NO: 15220327 NR Description: protease inhibitor/seed storage/lipid transfer
MLILNMADCLSFVSAGGTEAKPASSCCNGLKTVLKTDAECLCEAFKSSASLGVTLNMTKAATLPAACKLHAPSMAACGLSAAPTMAPGLAPGGAAGPDLSFLSPNPSPGNRGSSLLPFSFTTVLGAMSFVLLFLSRV

SEQ ID NO: 6679 - DNA, 957 bp, Glycine max
  misc_feature (1)..(957): Ceres Seq. ID no. 13638897
agacacgcgaaagcaaacacacagggagcgaagaagaaacccagctaggggcgtctggtgcattggcgcaggagaccaatggcgggcctcgggtttgaggagaccaagctccggctcggcctgccaggcggcagcaacgaggccgaggaggcggccgccgcggtgaggagctccggcaagaggggctacgccgagaccatcgacctcgtgctgaagctggagccagcgtcggcggccgcgccgccgtccgaggacgacgaggaagtggccgatggtgtcgcggaggcgcagccctctccggctgctgccgacgggcagttgaagcggtcgccgagccagtgcagcgtggtcaccgccgcgcagccggacgcgggaccccgagaagccgcgcgcgcccaaggcgcaggcggtggggtggccgccggtgcggtcgttccggaggaacatgctggcggcgacggcggagagagggggggcggcgctggtgaaggtgagcatggacggcgcgccctacctgcgcaaggtggacatgggcacctacaagagctaccaggagctgtccaaggccctggagaagatgttcagctccttcaccatcggcaacgactgctcgcaggctcaggggatgacgggcatgaacgagagcaagctggtggacctgctcaacggctccgactatgtgcccacctacgaggacaaggacggcgactggatgctcgtcggcgacgtcccctgggagatgttcgtcgcgtcctgcaagcgcctccggataatgaaaggatcagaagccatcggcctggcaccaagggcaatggagaaatgcaagagcaggagctgaccgtttgctaccaattcaagattatggctctgcttgcccaactatgtaccatactatactgcgtactcctacttcctatgttttatcttgttgttatatatgtgtagtatgtatacgtg

SEQ ID NO: 6680 - protein, 288 aa, Glycine max
  peptide (1)..(288): Ceres Seq. ID no. 13638898
  misc_feature (4)..(91): Pfam Name: Pfam Description:  AUX/IAA family
  misc_feature (4)..(91): NCBI GI NO: 20385508 NR Description: auxin-regulated protein
  misc_feature (2)..(91): NCBI GI NO: 20269059 NR Description: aux/IAA protein
  misc_feature (1)..(103): NCBI GI NO: 40539038 NR Description: putative auxin-responsive protein
MAGLGFEETKLRLGLPGGSNEAEEAAAAVRSSGKRGYAETIDLVLKLEPASAAAPPSEDDEEVADGVAEAQPSPAAADGQLKRSPSQCSVVTAAQPDAGPREAARAQGAGGGVAAGAVVPEEHAGGDGGERGGGAGEGEHGRRALPAQGGHGHLQELPGAVQGPGEDVQLLHHRQRLLAGSGDDGHEREQAGGPAQRLRLCAHLRGQGRRLDARRRRPLGDVRRVLQAPPDNERIRSHRPGTKGNGEMQEQELTVCYQFKIMALLAQLCTILYCVLLLPMFYLVVIYV

SEQ ID NO: 6681 - DNA, 844 bp, Glycine max
  misc_feature (1)..(844): Ceres Seq. ID no. 12610046
atttttcttttcaaaacgctttacctctcagttctcttcgtccctggacattcttccggtcaccatcggagccggcgaccggtggcgaccgcgcggggacgccgttccctctcataactgtcgcacgccgggacgccgagcgatctcctacccccacccccatcccagtctaccacagcgacaccgtgtgagatccgtgcttcatcggtaggctcagttggtgccttggtggactagtgaactgaaactgtattaatatcttcaggctctggtgcaatggcctacgagatcagtgagatcaaaaaaattggcataggtctggtgggctttggcatcctgttctcgttcctaggtgttatccttttctttgacaggggtttgttggctctgggtaatattttcttcttgactggagtaggccttcttctcggttggcaatctatgtggcagctatttacaaagaaggcaaacattaagggatctgtacctttcttccttggtctctttcttctatttgtcagatggcctgttgctggtataatcctggaactgtatggatcttttgtcctcttcagtggttacgggcctcctatccaagccttcctatatcagattccaatcattggatggattctgcaatacccctttcagctatttggtctgaggcgtaagcgtgcttgacaattatggtggcagaaattcatgataattcatggggaaatagcatattgcccaatgttaaattgtcagtagaaaattattgtagccttcatcttttgtaactaagctctttaacactgcatctgcatgacatgggctttctaaccttggttgtgatgactcc

SEQ ID NO: 6682 - protein, 134 aa, Glycine max
  peptide (1)..(134): Ceres Seq. ID no. 12610047
  misc_feature (29)..(126): Pfam Name: Pfam Description:  Got1-like family
  misc_feature (1)..(126): NCBI GI NO: 22329359 NR Description: unknown protein; protein id: At1g05785.1
  misc_feature (1)..(124): NCBI GI NO: 12324443 NR Description: unknown protein; 50647-51606
  misc_feature (1)..(124): NCBI GI NO: 15229139 NR Description: putative protein; protein id: At3g49420
  misc_feature (4)..(124): NCBI GI NO: 30678779 NR Description: expressed protein [Arabidopsis thaliana]
  misc_feature (10)..(123): NCBI GI NO: 33146513 NR Description: NFkB activating protein-like
  misc_feature (4)..(124): NCBI GI NO: 17945675 NR Description: RE29988p [Drosophila melanogaster]
  misc_feature (4)..(124): NCBI GI NO: 24642432 NR Description: CG32576-PA [Drosophila melanogaster]
  misc_feature (3)..(123): NCBI GI NO: 31207271 NR Description: ENSANGP00000015000 [Anopheles gambiae]
  misc_feature (1)..(123): NCBI GI NO: 26384022 NR Description: unnamed protein product [Mus musculus]
  misc_feature (5)..(123): NCBI GI NO: 7705636 NR Description: CGI-141 protein [Homo sapiens]
MAYEISEIKKIGIGLVGFGILFSFLGVILFFDRGLLALGNIFFLTGVGLLLGWQSMWQLFTKKANIKGSVPFFLGLFLLFVRWPVAGIILELYGSFVLFSGYGPPIQAFLYQIPIIGWILQYPFQLFGLRRKRA

SEQ ID NO: 6683 - protein, 79 aa, Glycine max
  peptide (1)..(79): Ceres Seq. ID no. 12610048
  misc_feature (1)..(71): Pfam Name: Pfam Description:  Got1-like family
  misc_feature (1)..(71): NCBI GI NO: 22329359 NR Description: unknown protein; protein id: At1g05785.1
  misc_feature (1)..(69): NCBI GI NO: 12324443 NR Description: unknown protein; 50647-51606
  misc_feature (1)..(69): NCBI GI NO: 15229139 NR Description: putative protein; protein id: At3g49420
  misc_feature (1)..(69): NCBI GI NO: 30678779 NR Description: expressed protein [Arabidopsis thaliana]
  misc_feature (1)..(68): NCBI GI NO: 33146513 NR Description: NFkB activating protein-like
  misc_feature (1)..(69): NCBI GI NO: 17945675 NR Description: RE29988p [Drosophila melanogaster]
  misc_feature (1)..(69): NCBI GI NO: 24642432 NR Description: CG32576-PA [Drosophila melanogaster]
  misc_feature (1)..(68): NCBI GI NO: 31207271 NR Description: ENSANGP00000015000 [Anopheles gambiae]
  misc_feature (1)..(68): NCBI GI NO: 26384022 NR Description: unnamed protein product [Mus musculus]
  misc_feature (1)..(68): NCBI GI NO: 7705636 NR Description: CGI-141 protein [Homo sapiens]
MWQLFTKKANIKGSVPFFLGLFLLFVRWPVAGIILELYGSFVLFSGYGPPIQAFLYQIPIIGWILQYPFQLFGLRRKRA

SEQ ID NO: 6684 - protein, 69 aa, Glycine max
  peptide (1)..(69): Ceres Seq. ID no. 12610049
FFFSKRFTSQFSSSLDILPVTIGAGDRWRPRGDAVPSHNCRTPGRRAISYPHPHPSLPQRHRVRSVLHR

SEQ ID NO: 6685 - DNA, 797 bp, Glycine max
  misc_feature (1)..(797): Ceres Seq. ID no. 13595847
acattttctttacactgaaccatcacttagagagtgcgcttcacacaagaaacaaaacaaaatggctaggcgatttgccattgttgcgatctgcatcgtcctcatcgccggcgtcggaggtcaagctccgtcgtcaccaccaaccaccacaccagcaccacccaccacaacaacccccccgccagcagccactcctcctcctgtctcagctcctccaccagtcacaacttctcctcctccagccaccaccgctcctcctcctgctactcctcctccagttgcttctcctcctccggccactcctcctccagtggcaactcctcctccagcaactccccctcccgtcgcttctcctccaccagcaactcctccacccgtcgcatctcctcctccagcaactcctcctccagctcctcttgcatctcctcccgctcaggttccagctcttgctcctacgacgccagaagctccctctacatctccgtcgtctagcccgcctctcccggcgactgatggccctggaccgagcgtcgaagggccaggaccttccacagattcgaatgaccagaatggagcaagcaagacagtttcaagcttggtacttggatctgttctcgtttggtttatgatctaagcgtgggagcctttcgctcggtgttccttgcatttgttttcatgttgatgtttgtttgttccattgttattactttcggaaccgtattcttttggattattatcttttggagaggatattattgaggagttgagatggagatatcaggatatatttcgtttgg

SEQ ID NO: 6686 - protein, 210 aa, Glycine max
  peptide (1)..(210): Ceres Seq. ID no. 13595848
  misc_feature (42)..(184): Pfam Name: Pfam Description:  Formin Homology 2 Domain
  misc_feature (21)..(210): NCBI GI NO: 15226024 NR Description: arabinogalactan-protein (AGP9)
  misc_feature (21)..(210): NCBI GI NO: 13265426 NR Description: At2g14890 [Arabidopsis thaliana]
  misc_feature (44)..(210): NCBI GI NO: 7441828 NR Description: extensin-like cell wall protein
  misc_feature (44)..(210): NCBI GI NO: 7441829 NR Description: proline-rich cell wall protein - upland cotton
  misc_feature (25)..(210): NCBI GI NO: 7441828 NR Description: extensin-like cell wall protein
  misc_feature (25)..(210): NCBI GI NO: 7441829 NR Description: proline-rich cell wall protein - upland cotton
  misc_feature (43)..(204): NCBI GI NO: 1084362 NR Description: extensin-like protein S3 - alfalfa
  misc_feature (27)..(176): NCBI GI NO: 1084362 NR Description: extensin-like protein S3 - alfalfa
  misc_feature (26)..(202): NCBI GI NO: 5139695 NR Description: expressed in cucumber hypocotyls [Cucumis sativus]
  misc_feature (42)..(186): NCBI GI NO: 5917664 NR Description: extensin-like protein [Lycopersicon esculentum]
HFLYTEPSLRECASHKKQNKMARRFAIVAICIVLIAGVGGQAPSSPPTTTPAPPTTTTPPPAATPPPVSAPPPVTTSPPPATTAPPPATPPPVASPPPATPPPVATPPPATPPPVASPPPATPPPVASPPPATPPPAPLASPPAQVPALAPTTPEAPSTSPSSSPPLPATDGPGPSVEGPGPSTDSNDQNGASKTVSSLVLGSVLVWFMI

SEQ ID NO: 6687 - protein, 208 aa, Glycine max
  peptide (1)..(208): Ceres Seq. ID no. 13595849
IFFTLNHHLESALHTRNKTKWLGDLPLLRSASSSSPASEVKLRRHHQPPHQHHPPQQPPRQQPLLLLSQLLHQSQLLLLQPPPLLLLLLLLQLLLLLRPLLLQWQLLLQQLPLPSLLLHQQLLHPSHLLLQQLLLQLLLHLLPLRFQLLLLRRQKLPLHLRRLARLSRRLMALDRASKGQDLPQIRMTRMEQARQFQAWYLDLFSFGL

SEQ ID NO: 6688 - protein, 190 aa, Glycine max
  peptide (1)..(190): Ceres Seq. ID no. 13595850
  misc_feature (22)..(164): Pfam Name: Pfam Description:  Formin Homology 2 Domain
  misc_feature (1)..(190): NCBI GI NO: 15226024 NR Description: arabinogalactan-protein (AGP9)
  misc_feature (1)..(190): NCBI GI NO: 13265426 NR Description: At2g14890 [Arabidopsis thaliana]
  misc_feature (24)..(190): NCBI GI NO: 7441828 NR Description: extensin-like cell wall protein
  misc_feature (24)..(190): NCBI GI NO: 7441829 NR Description: proline-rich cell wall protein - upland cotton
  misc_feature (5)..(190): NCBI GI NO: 7441828 NR Description: extensin-like cell wall protein
  misc_feature (5)..(190): NCBI GI NO: 7441829 NR Description: proline-rich cell wall protein - upland cotton
  misc_feature (23)..(184): NCBI GI NO: 1084362 NR Description: extensin-like protein S3 - alfalfa
  misc_feature (7)..(156): NCBI GI NO: 1084362 NR Description: extensin-like protein S3 - alfalfa
  misc_feature (6)..(182): NCBI GI NO: 5139695 NR Description: expressed in cucumber hypocotyls [Cucumis sativus]
  misc_feature (22)..(166): NCBI GI NO: 5917664 NR Description: extensin-like protein [Lycopersicon esculentum]
MARRFAIVAICIVLIAGVGGQAPSSPPTTTPAPPTTTTPPPAATPPPVSAPPPVTTSPPPATTAPPPATPPPVASPPPATPPPVATPPPATPPPVASPPPATPPPVASPPPATPPPAPLASPPAQVPALAPTTPEAPSTSPSSSPPLPATDGPGPSVEGPGPSTDSNDQNGASKTVSSLVLGSVLVWFMI

SEQ ID NO: 6689 - DNA, 1281 bp, Glycine max
  misc_feature (1)..(1281): Ceres Seq. ID no. 13595066
ctttttcttcagaaacagtaaaccaaaaactatccattgctttccccctagcgttttcttctcggtcgatcttcttctccaactcacactccggcgtctcttagtcgaccgaccgctccttcagcagagaaagtcattccggaaacatgccgggtcagaagattgaaacaggtcatgaggacatggtccatgatgtgcagatggactactacggaaagagagttgcaactgcctcatctgactgcaccatcaagataaccggcgtcagcaacaacggtggatcccagcacctagctacattaaccggccaccgtggtcccgtctggcaggtcgcgtgggcccaccctaagtttggatcattccttgcttcatgctcctatgacggtcaggtcatactctggaaagaaggcagccaaaaccagtggacccaagctcatgtcttcacggaccataaatcttcggtcaactccatcgcttgggctcctcatgacctcggactgtccttggcttgtgggtcatccgacggaaacatttcggtattcacaggccgtgctgatggtggttgggacacgacgaagatcgaccaagcgcatccggtyggagtcacttctgtctcatgggcaccagccactgcgcctggtgctcttgtcagctctggattgcttgatccggtttacaagctggcttccggtgggtgtgataatactgtgaaagtgtggaagctctcaaatgggtcgtggaagatggattgctttccggctcttcagaagcatactgattgggttcgtgatgtggcttgggcaccgaacttgggtctccctaagtccaccatagccagtggctcacaggatgggaaagtgatcatatggacagtggggaaagaaggtgagcagtgggaaggtaaggttctgaaggactttatgaccccggtgtggcgggtatcgtggtcgttgacaggtaacatgttggctgtgtccgatgggaacaacaacatgacggtgtggaaagaggctgttgatggagagtgggaacaggtcaccgttatggaatgatacgtttcgctatttactttactgaattaaagtctttttaaaaggatcctttttctcaggctggtttggtggtctatctgtgagggaatgtggatgtgtttttttcttcttcttaatttgggtttcggaacattttggtcattttcatctttcctagcgactttttcttttgtttttcctttttaaaaacactatcttcgtgaaatataatatcttagttttaaactgg

SEQ ID NO: 6690 - protein, 301 aa, Glycine max
  peptide (1)..(301): Ceres Seq. ID no. 15221470
  misc_feature (1)..(301): NCBI GI NO: 15227692 NR Description: transducin / WD-40 repeat protein family
  misc_feature (1)..(301): NCBI GI NO: 21593146 NR Description: putative protein transport protein SEC13
  misc_feature (1)..(301): NCBI GI NO: 15232095 NR Description: protein transport protein SEC13 family / WD-40repeat protein family
  misc_feature (1)..(301): NCBI GI NO: 21593236 NR Description: transport protein SEC13, putative
  misc_feature (1)..(301): NCBI GI NO: 18147582 NR Description: Sec13p [Oryza sativa]
  misc_feature (1)..(301): NCBI GI NO: 34393220 NR Description: putative Sec13p
  misc_feature (1)..(301): NCBI GI NO: 34897242 NR Description: putative coat protein complex II (COPII) component
  misc_feature (6)..(294): NCBI GI NO: 38174439 NR Description: Unknown (protein for MGC:76017)
  misc_feature (6)..(294): NCBI GI NO: 12805321 NR Description: SEC13 related gene [Mus musculus]
  misc_feature (6)..(294): NCBI GI NO: 27712890 NR Description: similar to SEC13 (S
  misc_feature (151)..(151): Xaa is any aa, unknown or other
MPGQKIETGHEDMVHDVQMDYYGKRVATASSDCTIKITGVSNNGGSQHLATLTGHRGPVWQVAWAHPKFGSFLASCSYDGQVILWKEGSQNQWTQAHVFTDHKSSVNSIAWAPHDLGLSLACGSSDGNISVFTGRADGGWDTTKIDQAHPXGVTSVSWAPATAPGALVSSGLLDPVYKLASGGCDNTVKVWKLSNGSWKMDCFPALQKHTDWVRDVAWAPNLGLPKSTIASGSQDGKVIIWTVGKEGEQWEGKVLKDFMTPVWRVSWSLTGNMLAVSDGNNNMTVWKEAVDGEWEQVTVME

SEQ ID NO: 6691 - protein, 289 aa, Glycine max
  peptide (1)..(289): Ceres Seq. ID no. 15221471
  misc_feature (1)..(289): NCBI GI NO: 15227692 NR Description: transducin / WD-40 repeat protein family
  misc_feature (1)..(289): NCBI GI NO: 21593146 NR Description: putative protein transport protein SEC13
  misc_feature (1)..(289): NCBI GI NO: 15232095 NR Description: protein transport protein SEC13 family / WD-40repeat protein family
  misc_feature (1)..(289): NCBI GI NO: 21593236 NR Description: transport protein SEC13, putative
  misc_feature (1)..(289): NCBI GI NO: 18147582 NR Description: Sec13p [Oryza sativa]
  misc_feature (1)..(289): NCBI GI NO: 34393220 NR Description: putative Sec13p
  misc_feature (1)..(289): NCBI GI NO: 34897242 NR Description: putative coat protein complex II (COPII) component
  misc_feature (1)..(282): NCBI GI NO: 38174439 NR Description: Unknown (protein for MGC:76017)
  misc_feature (1)..(282): NCBI GI NO: 12805321 NR Description: SEC13 related gene [Mus musculus]
  misc_feature (1)..(282): NCBI GI NO: 29150272 NR Description: SEC13 related gene [Mus musculus]
  misc_feature (139)..(139): Xaa is any aa, unknown or other
MVHDVQMDYYGKRVATASSDCTIKITGVSNNGGSQHLATLTGHRGPVWQVAWAHPKFGSFLASCSYDGQVILWKEGSQNQWTQAHVFTDHKSSVNSIAWAPHDLGLSLACGSSDGNISVFTGRADGGWDTTKIDQAHPXGVTSVSWAPATAPGALVSSGLLDPVYKLASGGCDNTVKVWKLSNGSWKMDCFPALQKHTDWVRDVAWAPNLGLPKSTIASGSQDGKVIIWTVGKEGEQWEGKVLKDFMTPVWRVSWSLTGNMLAVSDGNNNMTVWKEAVDGEWEQVTVME

SEQ ID NO: 6692 - protein, 283 aa, Glycine max
  peptide (1)..(283): Ceres Seq. ID no. 15221472
  misc_feature (1)..(283): NCBI GI NO: 15227692 NR Description: transducin / WD-40 repeat protein family
  misc_feature (1)..(283): NCBI GI NO: 21593146 NR Description: putative protein transport protein SEC13
  misc_feature (1)..(283): NCBI GI NO: 15232095 NR Description: protein transport protein SEC13 family / WD-40repeat protein family
  misc_feature (1)..(283): NCBI GI NO: 21593236 NR Description: transport protein SEC13, putative
  misc_feature (1)..(283): NCBI GI NO: 18147582 NR Description: Sec13p [Oryza sativa]
  misc_feature (1)..(283): NCBI GI NO: 34393220 NR Description: putative Sec13p
  misc_feature (1)..(283): NCBI GI NO: 34897242 NR Description: putative coat protein complex II (COPII) component
  misc_feature (1)..(276): NCBI GI NO: 38174439 NR Description: Unknown (protein for MGC:76017)
  misc_feature (1)..(276): NCBI GI NO: 12805321 NR Description: SEC13 related gene [Mus musculus]
  misc_feature (1)..(276): NCBI GI NO: 27712890 NR Description: similar to SEC13 (S
  misc_feature (133)..(133): Xaa is any aa, unknown or other
MDYYGKRVATASSDCTIKITGVSNNGGSQHLATLTGHRGPVWQVAWAHPKFGSFLASCSYDGQVILWKEGSQNQWTQAHVFTDHKSSVNSIAWAPHDLGLSLACGSSDGNISVFTGRADGGWDTTKIDQAHPXGVTSVSWAPATAPGALVSSGLLDPVYKLASGGCDNTVKVWKLSNGSWKMDCFPALQKHTDWVRDVAWAPNLGLPKSTIASGSQDGKVIIWTVGKEGEQWEGKVLKDFMTPVWRVSWSLTGNMLAVSDGNNNMTVWKEAVDGEWEQVTVME

SEQ ID NO: 6693 - DNA, 935 bp, Glycine max
  misc_feature (1)..(935): Ceres Seq. ID no. 12611082
attgttcacgtactgtgtcaagagcaaagagccaagagggtgcaattacatgagctgaaagaagtaacgcaaaagcccctttatttttaatggttagaacttagaagctgattgtgacaatggatgctcgtggagaagggtcttctacttcttactacaacgttcttggtgttagctcagattctaacgtggatgagattagacgtgcttataggaagctggctatgcaatggcatcctgataagtgcacaaggtcgccttctttgctgggtgaagctaagcgcaaattccagcaaattcaagaagcctattcagtgttgtctgatagtaagaaaagaactatgtatgatgcgggcttgtatgatcctcaagaggaagaggatgagggcttttctgattttgtggaagaaatgttgtcccatatggctcaagtgaggcgagagggaaagcattacggtttggaagagttgcagggcatgttaatggaaatggctaaaggatttgagtgtccttcaatgtattgtggggtgaactctgtgattgatgagtctccatgcgtaaagagaacgcgttttgacacaaacatgatggagaataaggggtcacatttccaagtacctgatcttaacctctattgcagttaagatgtttttcacggatcgatatcaagaaaaaacagatgggtagtgatgatgaattttggtagttattttcaacattttgacaatggatttatctgtacatattccttgtatggtgctaaattcccagggctttgtctcagtttttctagttgtaaatgatatatatcttctgaaggggaagagaggagaaaataatgattgagtagtttggaaattatgttttgagtaaggattttctgccacgggattgttcactttttgtatttctttgatttggataagaagttttgc

SEQ ID NO: 6694 - protein, 174 aa, Glycine max
  peptide (1)..(174): Ceres Seq. ID no. 12611083
  misc_feature (11)..(80): Pfam Name: Pfam Description:  DnaJ domain
  misc_feature (1)..(156): NCBI GI NO: 21554587 NR Description: DnaJ protein, putative [Arabidopsis thaliana]
  misc_feature (1)..(156): NCBI GI NO: 18405757 NR Description: DnaJ protein, putative; protein id: At1g56300
  misc_feature (1)..(124): NCBI GI NO: 23428796 NR Description: DnaJ-like protein [Glycine max]
  misc_feature (1)..(95): NCBI GI NO: 25404111 NR Description: probable DnaJ protein
  misc_feature (10)..(124): NCBI GI NO: 7484474 NR Description: probable heat shock protein EMB1 - white spruce
  misc_feature (10)..(145): NCBI GI NO: 34912486 NR Description: heat shock protein-like
  misc_feature (7)..(122): NCBI GI NO: 15223307 NR Description: heat shock protein DnaJ, putative
  misc_feature (3)..(171): NCBI GI NO: 15231803 NR Description: hypothetical protein; protein id: At3g14200
  misc_feature (11)..(79): NCBI GI NO: 9910416 NR Description: DnaJ
  misc_feature (11)..(79): NCBI GI NO: 23503241 NR Description: hypothetical protein MGC33884 [Homo sapiens]
MDARGEGSSTSYYNVLGVSSDSNVDEIRRAYRKLAMQWHPDKCTRSPSLLGEAKRKFQQIQEAYSVLSDSKKRTMYDAGLYDPQEEEDEGFSDFVEEMLSHMAQVRREGKHYGLEELQGMLMEMAKGFECPSMYCGVNSVIDESPCVKRTRFDTNMMENKGSHFQVPDLNLYCS

SEQ ID NO: 6695 - protein, 139 aa, Glycine max
  peptide (1)..(139): Ceres Seq. ID no. 12611084
  misc_feature (1)..(121): NCBI GI NO: 21554587 NR Description: DnaJ protein, putative [Arabidopsis thaliana]
  misc_feature (1)..(121): NCBI GI NO: 18405757 NR Description: DnaJ protein, putative; protein id: At1g56300
  misc_feature (1)..(89): NCBI GI NO: 23428796 NR Description: DnaJ-like protein [Glycine max]
  misc_feature (1)..(60): NCBI GI NO: 25404111 NR Description: probable DnaJ protein
  misc_feature (1)..(89): NCBI GI NO: 7484474 NR Description: probable heat shock protein EMB1 - white spruce
  misc_feature (1)..(110): NCBI GI NO: 34912486 NR Description: heat shock protein-like
  misc_feature (1)..(87): NCBI GI NO: 15223307 NR Description: heat shock protein DnaJ, putative
  misc_feature (1)..(136): NCBI GI NO: 15231803 NR Description: hypothetical protein; protein id: At3g14200
  misc_feature (1)..(44): NCBI GI NO: 9910416 NR Description: DnaJ
  misc_feature (1)..(44): NCBI GI NO: 23503241 NR Description: hypothetical protein MGC33884 [Homo sapiens]
MQWHPDKCTRSPSLLGEAKRKFQQIQEAYSVLSDSKKRTMYDAGLYDPQEEEDEGFSDFVEEMLSHMAQVRREGKHYGLEELQGMLMEMAKGFECPSMYCGVNSVIDESPCVKRTRFDTNMMENKGSHFQVPDLNLYCS

SEQ ID NO: 6696 - protein, 103 aa, Glycine max
  peptide (1)..(103): Ceres Seq. ID no. 12611085
MLVEKGLLLLTTTFLVLAQILTWMRLDVLIGSWLCNGILISAQGRLLCWVKLSANSSKFKKPIQCCLIVRKELCMMRACMILKRKRMRAFLILWKKCCPIWLK

SEQ ID NO: 6697 - DNA, 743 bp, Glycine max
  misc_feature (1)..(743): Ceres Seq. ID no. 13595067
attgttcctgcgtctccccccttccttccaaacagcggtgacctccaccacctccaccaccacccaagagccgagcgaggagaagagagaagaggagatcgaccatggctgcggacggcgggaggtgggtgggcctggcggtggacttctcggaggggagccgcgcggcgctgcagtgggcggcggacaacctgctccgcgccggcgacaacctgctcctcctgcacgtcctcaaggaccccgactacgagcagggcgagaccctcctctgggaggcctccggctcgcctttgatccccctctcggagttctctcacccttcaattgcaaagaagtatggtgtgaagcctgatgctgaaacgctggacatgctcaacactatagcgaagcagaaggaggttgccgtggtttccaaagtcctgtttggagatccccgcgagaagctgtgccaagccatccatgacatgcccatcagctccctggtcattgggagcaggggccttggcaagctcaagagggtgctcttgggcagcgtcagcgattacgtcgtgaacaacgccgcctgcccggtcaccgttgtcaagccagcgagtaaccatgcctgatctcatggtcgcaaatgtctacatgtgttttagtttgccggagtcctatatatccagttggccgcaacttattgaaccatccagtgttattcgtaataataattgacaattagcctgtggatgattcccaggttgtgc

SEQ ID NO: 6698 - protein, 166 aa, Glycine max
  peptide (1)..(166): Ceres Seq. ID no. 13595068
  misc_feature (6)..(160): Pfam Name: Pfam Description:  Universal stress protein family
  misc_feature (1)..(160): NCBI GI NO: 18401345 NR Description: expressed protein [Arabidopsis thaliana]
  misc_feature (5)..(160): NCBI GI NO: 15528707 NR Description: P0583G08.8
  misc_feature (3)..(160): NCBI GI NO: 20160561 NR Description: P0414E03.3
  misc_feature (7)..(160): NCBI GI NO: 30678807 NR Description: expressed protein [Arabidopsis thaliana]
  misc_feature (7)..(160): NCBI GI NO: 30693971 NR Description: expressed protein [Arabidopsis thaliana]
  misc_feature (7)..(164): NCBI GI NO: 11602747 NR Description: early nodulin ENOD18 [Vicia faba]
  misc_feature (7)..(164): NCBI GI NO: 11602751 NR Description: ENOD18 protein [Vicia faba]
  misc_feature (7)..(164): NCBI GI NO: 11602749 NR Description: early nodulin ENOD18 [Vicia faba]
  misc_feature (7)..(138): NCBI GI NO: 18396497 NR Description: expressed protein [Arabidopsis thaliana]
  misc_feature (2)..(165): NCBI GI NO: 40539010 NR Description: putative stress-related protein
MAADGGRWVGLAVDFSEGSRAALQWAADNLLRAGDNLLLLHVLKDPDYEQGETLLWEASGSPLIPLSEFSHPSIAKKYGVKPDAETLDMLNTIAKQKEVAVVSKVLFGDPREKLCQAIHDMPISSLVIGSRGLGKLKRVLLGSVSDYVVNNAACPVTVVKPASNHA

SEQ ID NO: 6699 - protein, 116 aa, Glycine max
  peptide (1)..(116): Ceres Seq. ID no. 13595069
LFLRLPPSFQTAVTSTTSTTTQEPSEEKREEEIDHGCGRREVGGPGGGLLGGEPRGAAVGGGQPAPRRRQPAPPARPQGPRLRAGRDPPLGGLRLAFDPPLGVLSPFNCKEVWCEA

SEQ ID NO: 6700 - protein, 97 aa, Glycine max
  peptide (1)..(97): Ceres Seq. ID no. 13595070
IVPASPPFLPNSGDLHHLHHHPRAERGEERRGDRPWLRTAGGGWAWRWTSRRGAARRCSGRRTTCSAPATTCSSCTSSRTPTTSRARPSSGRPPARL

SEQ ID NO: 6701 - DNA, 972 bp, Glycine max
  misc_feature (1)..(972): Ceres Seq. ID no. 12610896
cgaaaaatcacattcaccttcaaacatcaaacatcacatctcttaaaagagtttctttgtatcaatggcaggtatcaaagttttcggacacgctgcttccatttccaccagaagagtcctcctcaccctccacgagaaaaacctcgactttgagctcgttcatgtcgacctcaaggacggtgagcacaagaaagagtctttcctatcccacaacccttttggtaaagttccggcctttgaagatggagacctcaaaatcttcgagtcaagagctatcactcagtacatagctcaccgatacgaaggccaaggaactaaccttctccagcccgactccaagaacctggcccactatgcaatcatggccatgggaatgcaagtagaagctcaccagttcgacccactggcttcaaagcttgcttgggaacatgtatttaagctcatctatggcttgaccacagaccaagccgttgttgccgaagaagaggctaagttagccaaggtccttaatgtatacgaggctcggctcaaggagttcaagtatttggctggtgacacttttactttgaccgatcttcaccacattcctgcggttcaatacttgcttgaaactcccaccaagaagcttttcaccgagcgtccacatgtcaacaagtgggtggctgagatcaccaagaggccagcttcacagaagatccttcagtgaggaatttctaaaaggctctgcttcagtaacagtaataatgctcagactaaataagtggctgcttcactgcccaatttctcattaatctgtttttctttctcagttatgtgtgtgtgtgttcttgagagatctttgttgaatcaaaaactatctatctaatctttaagctcttttataataaaaaggttagttaattaatacaaaggttgcaatgtcttaactgcaatgtcttaactgcagagttattactgagaatattatacatt

SEQ ID NO: 6702 - protein, 213 aa, Glycine max
  peptide (1)..(213): Ceres Seq. ID no. 12610897
  misc_feature (98)..(206): Pfam Name: Pfam Description:  Glutathione S-transferase, C-terminal domain
  misc_feature (1)..(213): NCBI GI NO: 31790099 NR Description: glutathione S-transferase 4 [Brassica juncea]
  misc_feature (1)..(213): NCBI GI NO: 31790097 NR Description: glutathione S-transferase 3 [Brassica juncea]
  misc_feature (1)..(213): NCBI GI NO: 31790095 NR Description: glutathione S-transferase 2 [Brassica juncea]
  misc_feature (1)..(211): NCBI GI NO: 15235401 NR Description: glutathione transferase, putative
  misc_feature (1)..(213): NCBI GI NO: 31790093 NR Description: glutathione S-transferase 1 [Brassica juncea]
  misc_feature (1)..(212): NCBI GI NO: 15227063 NR Description: glutathione transferase, putative
  misc_feature (2)..(211): NCBI GI NO: 2554769 NR Description: Chain A, Structure Of Glutathione S-Transferase
  misc_feature (1)..(211): NCBI GI NO: 21555418 NR Description: Atpm24.1 glutathione S transferase
  misc_feature (1)..(213): NCBI GI NO: 31790105 NR Description: glutathione S-transferase 6 [Brassica juncea]
  misc_feature (1)..(213): NCBI GI NO: 31790103 NR Description: glutathione S-transferase 5 [Brassica juncea]
MAGIKVFGHAASISTRRVLLTLHEKNLDFELVHVDLKDGEHKKESFLSHNPFGKVPAFEDGDLKIFESRAITQYIAHRYEGQGTNLLQPDSKNLAHYAIMAMGMQVEAHQFDPLASKLAWEHVFKLIYGLTTDQAVVAEEEAKLAKVLNVYEARLKEFKYLAGDTFTLTDLHHIPAVQYLLETPTKKLFTERPHVNKWVAEITKRPASQKILQ

SEQ ID NO: 6703 - protein, 114 aa, Glycine max
  peptide (1)..(114): Ceres Seq. ID no. 12610898
  misc_feature (1)..(107): Pfam Name: Pfam Description:  Glutathione S-transferase, C-terminal domain
  misc_feature (1)..(114): NCBI GI NO: 31790099 NR Description: glutathione S-transferase 4 [Brassica juncea]
  misc_feature (1)..(114): NCBI GI NO: 31790097 NR Description: glutathione S-transferase 3 [Brassica juncea]
  misc_feature (1)..(114): NCBI GI NO: 31790095 NR Description: glutathione S-transferase 2 [Brassica juncea]
  misc_feature (1)..(112): NCBI GI NO: 15235401 NR Description: glutathione transferase, putative
  misc_feature (1)..(114): NCBI GI NO: 31790093 NR Description: glutathione S-transferase 1 [Brassica juncea]
  misc_feature (1)..(113): NCBI GI NO: 15227063 NR Description: glutathione transferase, putative
  misc_feature (1)..(112): NCBI GI NO: 2554769 NR Description: Chain A, Structure Of Glutathione S-Transferase
  misc_feature (1)..(112): NCBI GI NO: 21555418 NR Description: Atpm24.1 glutathione S transferase
  misc_feature (1)..(114): NCBI GI NO: 31790105 NR Description: glutathione S-transferase 6 [Brassica juncea]
  misc_feature (1)..(114): NCBI GI NO: 31790103 NR Description: glutathione S-transferase 5 [Brassica juncea]
MAMGMQVEAHQFDPLASKLAWEHVFKLIYGLTTDQAVVAEEEAKLAKVLNVYEARLKEFKYLAGDTFTLTDLHHIPAVQYLLETPTKKLFTERPHVNKWVAEITKRPASQKILQ

SEQ ID NO: 6704 - protein, 112 aa, Glycine max
  peptide (1)..(112): Ceres Seq. ID no. 12610899
  misc_feature (1)..(105): Pfam Name: Pfam Description:  Glutathione S-transferase, C-terminal domain
  misc_feature (1)..(112): NCBI GI NO: 31790099 NR Description: glutathione S-transferase 4 [Brassica juncea]
  misc_feature (1)..(112): NCBI GI NO: 31790097 NR Description: glutathione S-transferase 3 [Brassica juncea]
  misc_feature (1)..(112): NCBI GI NO: 31790095 NR Description: glutathione S-transferase 2 [Brassica juncea]
  misc_feature (1)..(110): NCBI GI NO: 15235401 NR Description: glutathione transferase, putative
  misc_feature (1)..(112): NCBI GI NO: 31790093 NR Description: glutathione S-transferase 1 [Brassica juncea]
  misc_feature (1)..(111): NCBI GI NO: 15227063 NR Description: glutathione transferase, putative
  misc_feature (1)..(110): NCBI GI NO: 2554769 NR Description: Chain A, Structure Of Glutathione S-Transferase
  misc_feature (1)..(110): NCBI GI NO: 21555418 NR Description: Atpm24.1 glutathione S transferase
  misc_feature (1)..(112): NCBI GI NO: 31790105 NR Description: glutathione S-transferase 6 [Brassica juncea]
  misc_feature (1)..(112): NCBI GI NO: 31790103 NR Description: glutathione S-transferase 5 [Brassica juncea]
MGMQVEAHQFDPLASKLAWEHVFKLIYGLTTDQAVVAEEEAKLAKVLNVYEARLKEFKYLAGDTFTLTDLHHIPAVQYLLETPTKKLFTERPHVNKWVAEITKRPASQKILQ

SEQ ID NO: 6705 - DNA, 677 bp, Glycine max
  misc_feature (1)..(677): Ceres Seq. ID no. 12610904
atttttctagggttctgagattcaggagagagataacgaacagcaatggcgaatcaagtgatctccggaatcaaggaaacggttcaatcgatcaacggcgcggctcgtccatggggcgatttcctcgatctctccgctttcagcttcccgtcctccttctccgacgccacaactcgcctcactcagaaccttgctcatttccgcatcaactacaccatcatcctctccgtcctcctcgctctaaccttgatcacacgcccgatcgccatcctcgctttcgtagccgtcggcttagcttggttcttcctctatttcgctcgcgaggaggcgctcaccgtcttcgggttcaccgtcgacgatggcgtcgtggcggtgcttctcatcgttctaacgatcgcagcgctagttaccactggagtttggctcagtgctctcaccaccgttggattcggagctctggttttgatcttacacgcggcgctgagaggaacggaggatcttgtgacggatgatctggaatcgccttacggaccaatgctctctaccgccggcggagataacggtgattacagtgggatttgagctacatttggtgcttgtaactaaactctaattgttttctttgtgttcattattagacattgttcaagacgttaaggaatcaaatgaaagtttat

SEQ ID NO: 6706 - protein, 178 aa, Glycine max
  peptide (1)..(178): Ceres Seq. ID no. 12610905
  misc_feature (1)..(178): NCBI GI NO: 18379300 NR Description: expressed protein; protein id: At1g04260
  misc_feature (1)..(178): NCBI GI NO: 21555645 NR Description: unknown [Arabidopsis thaliana]
  misc_feature (1)..(171): NCBI GI NO: 21594668 NR Description: unknown [Arabidopsis thaliana]
  misc_feature (1)..(171): NCBI GI NO: 18390939 NR Description: expressed protein; protein id: At1g08770
  misc_feature (5)..(159): NCBI GI NO: 15220814 NR Description: hypothetical protein; protein id: At1g17700.1
  misc_feature (6)..(156): NCBI GI NO: 21617895 NR Description: unknown [Arabidopsis thaliana]
  misc_feature (6)..(156): NCBI GI NO: 18400140 NR Description: expressed protein; protein id: At3g13720
  misc_feature (6)..(170): NCBI GI NO: 15239101 NR Description: putative protein; protein id: At5g05380.1
  misc_feature (6)..(170): NCBI GI NO: 18072825 NR Description: prenylated Rab receptor 2 [Arabidopsis thaliana]
  misc_feature (1)..(169): NCBI GI NO: 40539036 NR Description: putative prenylated rab acceptor protein
MANQVISGIKETVQSINGAARPWGDFLDLSAFSFPSSFSDATTRLTQNLAHFRINYTIILSVLLALTLITRPIAILAFVAVGLAWFFLYFAREEALTVFGFTVDDGVVAVLLIVLTIAALVTTGVWLSALTTVGFGALVLILHAALRGTEDLVTDDLESPYGPMLSTAGGDNGDYSGI

SEQ ID NO: 6707 - protein, 169 aa, Glycine max
  peptide (1)..(169): Ceres Seq. ID no. 12610906
FSRVLRFRREITNSNGESSDLRNQGNGSIDQRRGSSMGRFPRSLRFQLPVLLLRRHNSPHSEPCSFPHQLHHHPLRPPRSNLDHTPDRHPRFRSRRLSLVLPLFRSRGGAHRLRVHRRRWRRGGASHRSNDRSASYHWSLAQCSHHRWIRSSGFDLTRGAERNGGSCDG

SEQ ID NO: 6708 - protein, 133 aa, Glycine max
  peptide (1)..(133): Ceres Seq. ID no. 12610907
MGRFPRSLRFQLPVLLLRRHNSPHSEPCSFPHQLHHHPLRPPRSNLDHTPDRHPRFRSRRLSLVLPLFRSRGGAHRLRVHRRRWRRGGASHRSNDRSASYHWSLAQCSHHRWIRSSGFDLTRGAERNGGSCDG

SEQ ID NO: 6709 - DNA, 1013 bp, Glycine max
  misc_feature (1)..(1013): Ceres Seq. ID no. 12610908
aaaatcgccttcgtctttccccgtcgtctccaccaacgccagtttttccccgtcgtctccaccaacgccagtccaaatccaaacccgaaggaggaagagaggctagctagctagggttccgcctcccgccggccggagagagggagagagaggatgacgacggcggcgcggccaacgtgggcgccagcgaagggcgggaacgagcagggcggcacgcgtatcttcgggccctccgggaagtactcctcccgcgacctcgccgcacacacctccctcaagcccagaaaagagggacaacaaactcaagaggaggtacagaagaggaatcttagggatgaacttgaggagcgtgaacgcaagcacttctcatccaaggataagtcctatgttgacgagagggaccggcgaaaaagttcaggcctgctcttagaaggttcaaaacgggatgaggataagatagttccacgtgaaattgatgcagatgactctgacgtggaactaaaaagtgatgatgaaagcgacgatgatgacgacgacgatgacactgaggcactaatggcagagcttgaaaggattaaaaaagaaagagccgaggacaggcttagaaaggagcgtcagcaagcagaagaagaggccaagatgaaggaggctgagctgatgcgaggaaacccactgatcaatatgaataattctggctccttcaatgtgaagagaaggtgggatgatgatgttgtattcaagaaccaggctcgtggagagactaagacaccgaaacggttcatcaatgacaccatcagaagtgatttccaccgcaagtttctgcataggtacatgaaatgatgctgctgtatgctttatgttgtctggacagtatgcatgctgaaagagcctgtgatgtttctgtattctgaagatcgatttgtatgacataactgtaacagctacgttatcttaatggtgatatgtttaccctgttcctaagagtaaagaaaagaacccactgcttgtgtatt

SEQ ID NO: 6710 - protein, 228 aa, Glycine max
  peptide (1)..(228): Ceres Seq. ID no. 12610909
  misc_feature (1)..(228): Pfam Name: Pfam Description:  Cwf15/Cwc15 cell cycle control protein
  misc_feature (1)..(228): NCBI GI NO: 34897750 NR Description: ESTs AU032852
  misc_feature (1)..(228): NCBI GI NO: 21592359 NR Description: unknown [Arabidopsis thaliana]
  misc_feature (1)..(228): NCBI GI NO: 15451186 NR Description: Unknown protein [Arabidopsis thaliana]
  misc_feature (1)..(228): NCBI GI NO: 18399903 NR Description: expressed protein; protein id: At3g13200
  misc_feature (1)..(228): NCBI GI NO: 12963537 NR Description: RIKEN cDNA 0610040D20 [Mus musculus]
  misc_feature (1)..(228): NCBI GI NO: 6523797 NR Description: adrenal gland protein AD-002 [Homo sapiens]
  misc_feature (1)..(228): NCBI GI NO: 27719369 NR Description: similar to RIKEN cDNA 0610040D20
  misc_feature (1)..(228): NCBI GI NO: 7705475 NR Description: hypothetical protein HSPC148 [Homo sapiens]
  misc_feature (1)..(228): NCBI GI NO: 39582427 NR Description: Hypothetical protein CBG22646
  misc_feature (1)..(228): NCBI GI NO: 17564200 NR Description: Adrenal gland protein AD-002 like (26.1 kD)
MTTAARPTWAPAKGGNEQGGTRIFGPSGKYSSRDLAAHTSLKPRKEGQQTQEEVQKRNLRDELEERERKHFSSKDKSYVDERDRRKSSGLLLEGSKRDEDKIVPREIDADDSDVELKSDDESDDDDDDDDTEALMAELERIKKERAEDRLRKERQQAEEEAKMKEAELMRGNPLINMNNSGSFNVKRRWDDDVVFKNQARGETKTPKRFINDTIRSDFHRKFLHRYMK

SEQ ID NO: 6711 - DNA, 841 bp, Glycine max
  misc_feature (1)..(841): Ceres Seq. ID no. 13595230
aaccaagcagccgctgcaacatactgtacaattactttgcactagcaacacaacgctcttactgagctcatagcgtttgcacctgcccatcttaactagttgatcaccgcagcaatggcctccaccaacagctggacccacgagatcgagtcgtcggtcgcggcaccgcgcctgttccgtgccggcgtcatggactggcacactctggcacccaagctcgcgccccacatcgtcgccagcgcccaccccgtggagggcgaaggcggcatcggcagcgtcaggcagttcaacttcacctcagtcatgccctttaccctcatgaaggagaggcttgagttcctggacacagacaagtgtgagtgcaagtcgaccctcgtcgagggcggcggcatcgacacggcgatcgagactgcgacgtcgcacatcaaggtggagccggcggccaacggagggtgcttcgtgaaggtggactcgacgtacaagctgctgccaggcgtggaggtgaatgacgaaatcaccaaggccaaggaatccgtcaccgccatctttaaagccgccgatgcctacctcatcgccaaccctgacgcctacaactgaatcagttgagagggatcatatatgattatgatgtccctagtttgattcttttgtgctttcttcccgatgtaataaagctgctccatctctaagctacaaatagtaacgccgagggcgagagcaccgaggagagtgtggacgtgagaagttgaaaatttagtatttgtaactactaaaggggcctgtttgtttgatgatgttggtgcttgctttatgtgaaatacctaaacgctcttgttttctt

SEQ ID NO: 6712 - protein, 160 aa, Glycine max
  peptide (1)..(160): Ceres Seq. ID no. 13595231
  misc_feature (2)..(155): Pfam Name: Pfam Description:  Pathogenesis-related protein Bet v I family
  misc_feature (1)..(160): NCBI GI NO: 16589076 NR Description: pathogen-related protein [Oryza sativa]
  misc_feature (1)..(160): NCBI GI NO: 7442203 NR Description: pathogenesis-related protein - sorghum
  misc_feature (3)..(159): NCBI GI NO: 1572683 NR Description: early flowering protein 1 [Asparagus officinalis]
  misc_feature (6)..(159): NCBI GI NO: 939857 NR Description: pathogenesis related protein
  misc_feature (3)..(159): NCBI GI NO: 4210626 NR Description: intracellular pathogenesis-related protein
  misc_feature (10)..(159): NCBI GI NO: 4325333 NR Description: intracellular pathogenesis-related protein PR-107
  misc_feature (10)..(159): NCBI GI NO: 6649904 NR Description: intracellular pathogenesis-related protein PR-106
  misc_feature (10)..(159): NCBI GI NO: 6649902 NR Description: intracellular pathogenesis-related protein PR-105
  misc_feature (3)..(159): NCBI GI NO: 548591 NR Description: Pathogenesis-related protein 1 (AOPR1)
  misc_feature (3)..(159): NCBI GI NO: 4210624 NR Description: intracellular pathogenesis-related protein
MASTNSWTHEIESSVAAPRLFRAGVMDWHTLAPKLAPHIVASAHPVEGEGGIGSVRQFNFTSVMPFTLMKERLEFLDTDKCECKSTLVEGGGIDTAIETATSHIKVEPAANGGCFVKVDSTYKLLPGVEVNDEITKAKESVTAIFKAADAYLIANPDAYN

SEQ ID NO: 6713 - protein, 135 aa, Glycine max
  peptide (1)..(135): Ceres Seq. ID no. 13595232
  misc_feature (1)..(130): Pfam Name: Pfam Description:  Pathogenesis-related protein Bet v I family
  misc_feature (1)..(135): NCBI GI NO: 16589076 NR Description: pathogen-related protein [Oryza sativa]
  misc_feature (1)..(135): NCBI GI NO: 7442203 NR Description: pathogenesis-related protein - sorghum
  misc_feature (1)..(134): NCBI GI NO: 1572683 NR Description: early flowering protein 1 [Asparagus officinalis]
  misc_feature (1)..(134): NCBI GI NO: 939857 NR Description: pathogenesis related protein
  misc_feature (1)..(134): NCBI GI NO: 4210626 NR Description: intracellular pathogenesis-related protein
  misc_feature (1)..(134): NCBI GI NO: 4325333 NR Description: intracellular pathogenesis-related protein PR-107
  misc_feature (1)..(134): NCBI GI NO: 6649902 NR Description: intracellular pathogenesis-related protein PR-105
  misc_feature (1)..(134): NCBI GI NO: 6649904 NR Description: intracellular pathogenesis-related protein PR-106
  misc_feature (1)..(134): NCBI GI NO: 548591 NR Description: Pathogenesis-related protein 1 (AOPR1)
  misc_feature (1)..(134): NCBI GI NO: 4210624 NR Description: intracellular pathogenesis-related protein
MDWHTLAPKLAPHIVASAHPVEGEGGIGSVRQFNFTSVMPFTLMKERLEFLDTDKCECKSTLVEGGGIDTAIETATSHIKVEPAANGGCFVKVDSTYKLLPGVEVNDEITKAKESVTAIFKAADAYLIANPDAYN

SEQ ID NO: 6714 - protein, 97 aa, Glycine max
  peptide (1)..(97): Ceres Seq. ID no. 13595233
  misc_feature (1)..(92): Pfam Name: Pfam Description:  Pathogenesis-related protein Bet v I family
  misc_feature (1)..(97): NCBI GI NO: 16589076 NR Description: pathogen-related protein [Oryza sativa]
  misc_feature (1)..(97): NCBI GI NO: 7442203 NR Description: pathogenesis-related protein - sorghum
  misc_feature (1)..(96): NCBI GI NO: 1572683 NR Description: early flowering protein 1 [Asparagus officinalis]
  misc_feature (1)..(96): NCBI GI NO: 939857 NR Description: pathogenesis related protein
  misc_feature (1)..(96): NCBI GI NO: 4210626 NR Description: intracellular pathogenesis-related protein
  misc_feature (1)..(96): NCBI GI NO: 4325333 NR Description: intracellular pathogenesis-related protein PR-107
  misc_feature (1)..(96): NCBI GI NO: 6649902 NR Description: intracellular pathogenesis-related protein PR-105
  misc_feature (1)..(96): NCBI GI NO: 6649904 NR Description: intracellular pathogenesis-related protein PR-106
  misc_feature (1)..(96): NCBI GI NO: 548591 NR Description: Pathogenesis-related protein 1 (AOPR1)
  misc_feature (1)..(96): NCBI GI NO: 4210624 NR Description: intracellular pathogenesis-related protein
MPFTLMKERLEFLDTDKCECKSTLVEGGGIDTAIETATSHIKVEPAANGGCFVKVDSTYKLLPGVEVNDEITKAKESVTAIFKAADAYLIANPDAYN

SEQ ID NO: 6715 - DNA, 788 bp, Glycine max
  misc_feature (1)..(788): Ceres Seq. ID no. 13595288
  misc_feature (121)..(121): n is a, c, t, g, unknown, or other
gtgaagataagaagttgaatgcaacatatataatcagtgtcgcccgaaaacttgggtgttccattttcctgttacctgaggacataatagaggtcaaccagaagatgattctcattttagntgctagtataatgtattggagcctcaagaaacctgaagaaaacatcacccctgaagcatcgcctaaagcttcagtagatggtgaaagcgaaacagatttagttgatgaggtatcccatttagccattgacgaggtatccaatttagccattgatgatacaacttcggagaatgctagctcttcttaagttagtaaggttgaagcaaaccatacccaatggagaatgagcgggaaaaaacgcatttttgtttatagggcaaaaggaagatgccaacctcttggttcccagttcgaaagaaagcttattgttatgaaaaaccacagataatagaaggatcttgtaaattattctttagaatttttttgtacttaggcatattctttcatgaaaattgcatgcaaattttcccaataataatgtgggcggaaggcatcattttattttcggtctgattgttaagattattcttaatgcgtgcatacggatacgggttgaagtggatgaactgaaccagtaatgattatgcacttcatttaagtggtttttctatttcaagtctgggattcaagtataatacatgtagttgatgctatagcaattggagacctttatgccaaaaaaaaaaaaaaaaaatatcgataccgtcgacctcgagggggggcccgg

SEQ ID NO: 6716 - protein, 101 aa, Glycine max
  peptide (1)..(101): Ceres Seq. ID no. 13595289
  misc_feature (1)..(86): NCBI GI NO: 15238586 NR Description: fimbrin [Arabidopsis thaliana]
  misc_feature (1)..(101): NCBI GI NO: 2811224 NR Description: fimbrin 1 [Arabidopsis thaliana]
  misc_feature (1)..(101): NCBI GI NO: 2905893 NR Description: fimbrin-like protein [Arabidopsis thaliana]
  misc_feature (1)..(101): NCBI GI NO: 15236837 NR Description: fimbrin-related protein (ATFIM1)
  misc_feature (1)..(83): NCBI GI NO: 2737926 NR Description: fimbrin-like protein AtFim2 [Arabidopsis thaliana]
  misc_feature (1)..(83): NCBI GI NO: 15238983 NR Description: fimbrin 2 (gb|AAB97844.1) [Arabidopsis thaliana]
  misc_feature (1)..(84): NCBI GI NO: 34914666 NR Description: fimbrin-like protein (actin binding motif)
  misc_feature (1)..(69): NCBI GI NO: 15240502 NR Description: fimbrin [Arabidopsis thaliana]
  misc_feature (1)..(87): NCBI GI NO: 15224051 NR Description: fimbrin -related [Arabidopsis thaliana]
  misc_feature (1)..(56): NCBI GI NO: 7489668 NR Description: fimbrin/plastin-like protein - wheat (fragment)
  misc_feature (40)..(40): Xaa is any aa, unknown or other
EDKKLNATYIISVARKLGCSIFLLPEDIIEVNQKMILILXASIMYWSLKKPEENITPEASPKASVDGESETDLVDEVSHLAIDEVSNLAIDDTTSENASSS

SEQ ID NO: 6717 - protein, 67 aa, Glycine max
  peptide (1)..(67): Ceres Seq. ID no. 13595290
  misc_feature (1)..(52): NCBI GI NO: 15238586 NR Description: fimbrin [Arabidopsis thaliana]
  misc_feature (1)..(67): NCBI GI NO: 2811224 NR Description: fimbrin 1 [Arabidopsis thaliana]
  misc_feature (1)..(67): NCBI GI NO: 2905893 NR Description: fimbrin-like protein [Arabidopsis thaliana]
  misc_feature (1)..(67): NCBI GI NO: 15236837 NR Description: fimbrin-related protein (ATFIM1)
  misc_feature (1)..(49): NCBI GI NO: 2737926 NR Description: fimbrin-like protein AtFim2 [Arabidopsis thaliana]
  misc_feature (1)..(49): NCBI GI NO: 15238983 NR Description: fimbrin 2 (gb|AAB97844.1) [Arabidopsis thaliana]
  misc_feature (1)..(50): NCBI GI NO: 34914666 NR Description: fimbrin-like protein (actin binding motif)
  misc_feature (1)..(35): NCBI GI NO: 15240502 NR Description: fimbrin [Arabidopsis thaliana]
  misc_feature (1)..(53): NCBI GI NO: 15224051 NR Description: fimbrin -related [Arabidopsis thaliana]
  misc_feature (1)..(22): NCBI GI NO: 7489668 NR Description: fimbrin/plastin-like protein - wheat (fragment)
  misc_feature (6)..(6): Xaa is any aa, unknown or other
MILILXASIMYWSLKKPEENITPEASPKASVDGESETDLVDEVSHLAIDEVSNLAIDDTTSENASSS

SEQ ID NO: 6718 - protein, 61 aa, Glycine max
  peptide (1)..(61): Ceres Seq. ID no. 13595291
MPTSWFPVRKKAYCYEKPQIIEGSCKLFFRIFLYLGIFFHENCMQIFPIIMWAEGIILFSV

SEQ ID NO: 6719 - DNA, 818 bp, Glycine max
  misc_feature (1)..(818): Ceres Seq. ID no. 13595292
tactcatccccactcctgtcccccgtccactccgccgccgccgccgccgccgcgaattccgcccgcgtccaccgccgcgcgtcgccccggcggactccaggacctccggatcggagccccgcgcctcgccatggcggtcgccgcgctcaaggtgcagctgaacgcgctcctctccaacatgttcgccacgggtatggtggacgagcagttccagcagctgcagtcgctggaggaggggggcaccgcgtcgggcttcgtcgccgaggtcgccaccctcttcatcgaagacgccgaccggatcatcgcctacatcgccgccctgctggaccagcccgtggtggatttcgacaaggtggacgcccacgtgcaccagctcaaggggagcagctcgagtgttggtgctcagaaagtgaagctcgcctgcatgcacttccgccagttctatgaggcaaaaagcaaagaagggtgcctcatggcgctggctcttgttaggagcgagttctgtgatgtgcgcaacaagttccagaccatgatgcagctggagcagcagatcgaggcgtgcagtccgaagtagagtagcagtaactgaagcaaaaggagcttagctccctccgtgtgacccctgacatgatggggggcagtgtgtatgtatctctgaagcttgtaggcagtgtaacgggcgtcgggggctttggagggcgtgtgcgcggaaccgggccgaccgattcccgcggcggaactccgggctcgcgacccccttggaacggaacttgcttgtaccgtgtcaacgctatacctgtttgtgttgtgcccgccct

SEQ ID NO: 6720 - protein, 190 aa, Glycine max
  peptide (1)..(190): Ceres Seq. ID no. 15221525
  misc_feature (44)..(186): NCBI GI NO: 5689238 NR Description: histidine-containing phosphotransfer protein
  misc_feature (44)..(190): NCBI GI NO: 33637784 NR Description: two-component phosphorelay mediator HP1
  misc_feature (44)..(190): NCBI GI NO: 33637786 NR Description: two-component phosphorelay mediator HP2
  misc_feature (52)..(189): NCBI GI NO: 22036126 NR Description: his-containing phosphotransfer protein [Zea mays]
  misc_feature (52)..(189): NCBI GI NO: 6009622 NR Description: histidine-containing phosphotransfer protein
  misc_feature (59)..(186): NCBI GI NO: 15233079 NR Description: two-component phosphorelay mediator -related
  misc_feature (44)..(186): NCBI GI NO: 13774348 NR Description: histidine-containing phosphotransfer protein
  misc_feature (44)..(184): NCBI GI NO: 18379097 NR Description: AHP2 -related [Arabidopsis thaliana]
  misc_feature (46)..(184): NCBI GI NO: 15228686 NR Description: ATHP2 -related [Arabidopsis thaliana]
  misc_feature (44)..(184): NCBI GI NO: 21593802 NR Description: putative AHP2 [Arabidopsis thaliana]
THPHSCPPSTPPPPPPPRIPPASTAARRPGGLQDLRIGAPRLAMAVAALKVQLNALLSNMFATGMVDEQFQQLQSLEEGGTASGFVAEVATLFIEDADRIIAYIAALLDQPVVDFDKVDAHVHQLKGSSSSVGAQKVKLACMHFRQFYEAKSKEGCLMALALVRSEFCDVRNKFQTMMQLEQQIEACSPK

SEQ ID NO: 6721 - protein, 148 aa, Glycine max
  peptide (1)..(148): Ceres Seq. ID no. 15221526
YSSPLLSPVHSAAAAAAANSARVHRRASPRRTPGPPDRSPAPRHGGRRAQGAAERAPLQHVRHGYGGRAVPAAAVAGGGGHRVGLRRRGRHPLHRRRRPDHRLHRRPAGPARGGFRQGGRPRAPAQGEQLECWCSESEARLHALPPVL

SEQ ID NO: 6722 - protein, 147 aa, Glycine max
  peptide (1)..(147): Ceres Seq. ID no. 15221527
  misc_feature (1)..(143): NCBI GI NO: 5689238 NR Description: histidine-containing phosphotransfer protein
  misc_feature (1)..(147): NCBI GI NO: 33637784 NR Description: two-component phosphorelay mediator HP1
  misc_feature (1)..(147): NCBI GI NO: 33637786 NR Description: two-component phosphorelay mediator HP2
  misc_feature (9)..(146): NCBI GI NO: 22036126 NR Description: his-containing phosphotransfer protein [Zea mays]
  misc_feature (9)..(146): NCBI GI NO: 6009622 NR Description: histidine-containing phosphotransfer protein
  misc_feature (16)..(143): NCBI GI NO: 15233079 NR Description: two-component phosphorelay mediator -related
  misc_feature (1)..(143): NCBI GI NO: 13774348 NR Description: histidine-containing phosphotransfer protein
  misc_feature (1)..(141): NCBI GI NO: 18379097 NR Description: AHP2 -related [Arabidopsis thaliana]
  misc_feature (3)..(141): NCBI GI NO: 15228686 NR Description: ATHP2 -related [Arabidopsis thaliana]
  misc_feature (1)..(141): NCBI GI NO: 21593802 NR Description: putative AHP2 [Arabidopsis thaliana]
MAVAALKVQLNALLSNMFATGMVDEQFQQLQSLEEGGTASGFVAEVATLFIEDADRIIAYIAALLDQPVVDFDKVDAHVHQLKGSSSSVGAQKVKLACMHFRQFYEAKSKEGCLMALALVRSEFCDVRNKFQTMMQLEQQIEACSPK

SEQ ID NO: 6723 - DNA, 1245 bp, Glycine max
  misc_feature (1)..(1245): Ceres Seq. ID no. 12609965
aatcgaaaatctctctctctctctagcctctccattccgtgtggcgaccgagcgaaccctagccgagattagactaccatccccaatctaccggaggaggacgaggacgacgccgacgagatgctgagggttgcggggaggaggctctcgtcttcgctctcctggcgccccgtggcgaccgtcggagccaggggcccgctcgctggcgccggcggccctgggagagacgacgacgacggttcggcctaccagcggcggttcgccatcgagtcccccttcttcaccgccgcgagaggcttttcttcagctgaaacacttgttccacggaaccaagatgctgggttggctgaactcccagccactgttgctgcactgaagaaccccaactcaaaaatcctttatgaccagtacaaccatgaaagatatcctcctggagatcccagcaagcgtgcctttgcctactttgttctgagtggtgggagattcgtatatgcatcactgctgcgtctccttgtcttgaagtttgtcttgagcatgtcagcaagtaaggatgtgcttgcacttgcttcccttgaggttgatctatccagcattgaacccggtagcacagtgactgtcaagtggcgtggaaagccagtcttcatcaggcgacggacagacgatgacatcaagctggccaacagcgtggatgttgcatccctgcgccacccagagcaagacgctgagcgtgtgaagaacccagagtggctggtggttattggtgtctgcactcatcttggttgcattccccttcccaactctggagactttggtggctggttctgcccgtgccatggctcccactatgacatctctggcagaatccgcaagggccctgccccgtacaaccttgaggtgcccacctacagtttcttggaagataacaagatgctcataggctaagagcctaaaaccagtacctaccgacatatattatccacaggagtgaattcctgttgcgctgttattttgttttcaatgtggctaggagtttttgtttcaggactattgcaacggtgatccactgttacctactgaagttcatttgcagtgcgaaataattatttctcctatgttgctactggattgcaagttgttttgtactgattttctgagaccctatcggaaggatattgtatacctcttctggtccttgctacctatatatttgttaaataagcaaacatactattcttcatctgtgtc

SEQ ID NO: 6724 - protein, 273 aa, Glycine max
  peptide (1)..(273): Ceres Seq. ID no. 12609966
  misc_feature (173)..(269): Pfam Name: Pfam Description:  Rieske [2Fe-2S] domain
  misc_feature (1)..(273): NCBI GI NO: 1717957 NR Description: Ubiquinol-cytochrome C reductase iron-sulfur subunit
  misc_feature (1)..(273): NCBI GI NO: 38347166 NR Description: OSJNBa0039C07.12
  misc_feature (1)..(273): NCBI GI NO: 1076675 NR Description: ubiquinol-cytochrome-c reductase (EC 1
  misc_feature (1)..(273): NCBI GI NO: 1717950 NR Description: Ubiquinol-cytochrome C reductase iron-sulfur subunit 2
  misc_feature (1)..(273): NCBI GI NO: 586145 NR Description: Ubiquinol-cytochrome C reductase iron-sulfur subunit
  misc_feature (1)..(273): NCBI GI NO: 1717953 NR Description: Ubiquinol-cytochrome C reductase iron-sulfur subunit 5
  misc_feature (1)..(273): NCBI GI NO: 1717951 NR Description: Ubiquinol-cytochrome C reductase iron-sulfur subunit 3
  misc_feature (36)..(273): NCBI GI NO: 1717949 NR Description: Ubiquinol-cytochrome C reductase iron-sulfur subunit 1
  misc_feature (1)..(273): NCBI GI NO: 18417067 NR Description: ubiquinol--cytochrome-c reductase - like protein
  misc_feature (1)..(273): NCBI GI NO: 21553507 NR Description: ubiquinol--cytochrome-c reductase-like protein
MLRVAGRRLSSSLSWRPVATVGARGPLAGAGGPGRDDDDGSAYQRRFAIESPFFTAARGFSSAETLVPRNQDAGLAELPATVAALKNPNSKILYDQYNHERYPPGDPSKRAFAYFVLSGGRFVYASLLRLLVLKFVLSMSASKDVLALASLEVDLSSIEPGSTVTVKWRGKPVFIRRRTDDDIKLANSVDVASLRHPEQDAERVKNPEWLVVIGVCTHLGCIPLPNSGDFGGWFCPCHGSHYDISGRIRKGPAPYNLEVPTYSFLEDNKMLIG

SEQ ID NO: 6725 - DNA, 798 bp, Glycine max
  misc_feature (1)..(798): Ceres Seq. ID no. 15178253
atattattccactcttaccctttctggctcagtcgctctcctctcaagtctcacttcaccgtaacgcgcatgcctttgtttgaagctagccttcgtcgaattcaatttgttttccctctcacgcggtcctaagtgctaacctgtatctgagtataacgtgggggaattgacccttagatgtcatatcttcctttaacagatacaaaatgccaaaagtaaagacaaaccgtgttacatacccagagggctgggaattaattgagcctactctccatgaacttcaagcaaagatgagggaagctgagaacgatccacatgatggcaagagaaactgtgagacattatggcctatatttaagattgcacaccagaagagccgctacatatttgacctctatcatcaaaggaaggagatttctaaagaattgtatgaattctgtttagatcaaggatatgctgaccacaatctaattgcaaaatggaagaagcctggttatgaacgtctatgctgcttggggtgtatgcagccacgcaatcacaattttgccaccacttgtgtttgcagagttcccaagaaccttagggaggagaaggttatagagtgtgttcattgtggttgcaagggctgtgctagcggggactgagtggacatcaattctattatcagttgccaaaaagggggtttcttaggattattttgttggtgtttttagcattctccagattgtgttaactatttactacatgaatactatactatgtaatgaaaaatattagttaattgttaactatctgcac

SEQ ID NO: 6726 - protein, 145 aa, Glycine max
  peptide (1)..(145): Ceres Seq. ID no. 15178254
  misc_feature (1)..(143): Pfam Name: Pfam Description:  G10 protein
  misc_feature (1)..(145): NCBI GI NO: 34908438 NR Description: putative G10 protein
  misc_feature (1)..(145): NCBI GI NO: 15233517 NR Description: G10 - like protein [Arabidopsis thaliana]
  misc_feature (1)..(144): NCBI GI NO: 544359 NR Description: G10 PROTEIN HOMOLOG
  misc_feature (1)..(130): NCBI GI NO: 5852181 NR Description: zhb0011.1 [Oryza sativa (indica cultivar-group)]
  misc_feature (1)..(142): NCBI GI NO: 15029378 NR Description: G10 protein [Branchiostoma belcheri]
  misc_feature (2)..(142): NCBI GI NO: 15128111 NR Description: G10-like protein [Branchiostoma belcheri]
  misc_feature (1)..(142): NCBI GI NO: 32171175 NR Description: maternal G10 transcript [Homo sapiens]
  misc_feature (1)..(142): NCBI GI NO: 120625 NR Description: G10 PROTEIN
  misc_feature (3)..(142): NCBI GI NO: 39590778 NR Description: Hypothetical protein CBG10019
  misc_feature (1)..(131): NCBI GI NO: 40740955 NR Description: hypothetical protein AN8857.2
MPKVKTNRVTYPEGWELIEPTLHELQAKMREAENDPHDGKRNCETLWPIFKIAHQKSRYIFDLYHQRKEISKELYEFCLDQGYADHNLIAKWKKPGYERLCCLGCMQPRNHNFATTCVCRVPKNLREEKVIECVHCGCKGCASGD

SEQ ID NO: 6727 - protein, 117 aa, Glycine max
  peptide (1)..(117): Ceres Seq. ID no. 15178255
  misc_feature (1)..(115): Pfam Name: Pfam Description:  G10 protein
  misc_feature (1)..(117): NCBI GI NO: 34908438 NR Description: putative G10 protein
  misc_feature (1)..(117): NCBI GI NO: 15233517 NR Description: G10 - like protein [Arabidopsis thaliana]
  misc_feature (1)..(116): NCBI GI NO: 544359 NR Description: G10 PROTEIN HOMOLOG
  misc_feature (1)..(102): NCBI GI NO: 5852181 NR Description: zhb0011.1 [Oryza sativa (indica cultivar-group)]
  misc_feature (1)..(114): NCBI GI NO: 15029378 NR Description: G10 protein [Branchiostoma belcheri]
  misc_feature (1)..(114): NCBI GI NO: 15128111 NR Description: G10-like protein [Branchiostoma belcheri]
  misc_feature (1)..(114): NCBI GI NO: 32171175 NR Description: maternal G10 transcript [Homo sapiens]
  misc_feature (1)..(114): NCBI GI NO: 120625 NR Description: G10 PROTEIN
  misc_feature (1)..(114): NCBI GI NO: 39590778 NR Description: Hypothetical protein CBG10019
  misc_feature (1)..(103): NCBI GI NO: 40740955 NR Description: hypothetical protein AN8857.2
MREAENDPHDGKRNCETLWPIFKIAHQKSRYIFDLYHQRKEISKELYEFCLDQGYADHNLIAKWKKPGYERLCCLGCMQPRNHNFATTCVCRVPKNLREEKVIECVHCGCKGCASGD

SEQ ID NO: 6728 - DNA, 989 bp, Glycine max
  misc_feature (1)..(989): Ceres Seq. ID no. 12610925
caattttcattccgaagtccctttcaacgagagagagggagagagagaggagcagttagttgagacccgagacggagatggatctgctggagaggagcgcagccactattaaggcggagcagggggaggcccagcgcaaggaagccgagaggaaggagcaggagcacaaggagcaggagacccagcagccagggctcaccggccgacccccgctcgccaacggcaggtctggaatgttgccaatgtcgagccctccagcaaatccgggacagcttaccattttttatggtgggtcagtatgtgtgtatgactcagtgccaccagagaaggctcaagcaatcatgctcattgcagcagcagcagctgcggcctcaaaaagcaatggcaccactgctgttaagcctccagcgatgtctgcgaccaatgctatccaagccatgcttacgcggtcgctctcactccagagcacttctgtagcaaatggacaacctcaggctgtcgcggatcctggctcgatttgcaagcttcaggctgatcttcccatcgccaggagacactcccttcagcgcttcctggagaagcgccgtgacagggtggtgagcaaagctccttacggcgccgggaagccatccgaaggcatgggagcatcttctgggatggaagtggtcgcggagggcaaggcccagtaaccatgaaagaagaaagacggccctgcccctgatgtttggaaggaaaggggcgtgtgttagctgatgtgatgttacaccgtagaaccatcatcgttcgtgacgataataatgatccgaccagaacctctattgtcattgttctgttgtcattgtgtagtttactctgtatctgaacttgttttggtctgcggaaccgtactgctatgatgaatgtgtcgatgatgtaaatcgtggctgtcgtgcctgtctgactgatacattgttatcgtagtcgataaatgatatcatctgtgccgtctc

SEQ ID NO: 6729 - protein, 203 aa, Glycine max
  peptide (1)..(203): Ceres Seq. ID no. 12610926
  misc_feature (59)..(92): Pfam Name: Pfam Description:  ZIM motif
  misc_feature (1)..(203): NCBI GI NO: 32488878 NR Description: OSJNBa0060D06.16
  misc_feature (50)..(179): NCBI GI NO: 15242096 NR Description: putative protein; protein id: At5g20900
  misc_feature (22)..(186): NCBI GI NO: 23237931 NR Description: contains ESTsC26074
  misc_feature (107)..(185): NCBI GI NO: 18401669 NR Description: expressed protein; protein id: At3g17860
  misc_feature (107)..(185): NCBI GI NO: 21618251 NR Description: unknown [Arabidopsis thaliana]
  misc_feature (38)..(92): NCBI GI NO: 18401669 NR Description: expressed protein; protein id: At3g17860
  misc_feature (38)..(92): NCBI GI NO: 21618251 NR Description: unknown [Arabidopsis thaliana]
  misc_feature (65)..(186): NCBI GI NO: 29788814 NR Description: unknown protein
  misc_feature (40)..(194): NCBI GI NO: 25406068 NR Description: hypothetical protein F5A18.12
  misc_feature (59)..(179): NCBI GI NO: 18410737 NR Description: expressed protein; protein id: At1g74950
MDLLERSAATIKAEQGEAQRKEAERKEQEHKEQETQQPGLTGRPPLANGRSGMLPMSSPPANPGQLTIFYGGSVCVYDSVPPEKAQAIMLIAAAAAAASKSNGTTAVKPPAMSATNAIQAMLTRSLSLQSTSVANGQPQAVADPGSICKLQADLPIARRHSLQRFLEKRRDRVVSKAPYGAGKPSEGMGASSGMEVVAEGKAQ

SEQ ID NO: 6730 - protein, 151 aa, Glycine max
  peptide (1)..(151): Ceres Seq. ID no. 12610927
  misc_feature (7)..(40): Pfam Name: Pfam Description:  ZIM motif
  misc_feature (1)..(151): NCBI GI NO: 32488878 NR Description: OSJNBa0060D06.16
  misc_feature (1)..(127): NCBI GI NO: 15242096 NR Description: putative protein; protein id: At5g20900
  misc_feature (1)..(134): NCBI GI NO: 23237931 NR Description: contains ESTsC26074
  misc_feature (55)..(133): NCBI GI NO: 18401669 NR Description: expressed protein; protein id: At3g17860
  misc_feature (55)..(133): NCBI GI NO: 21618251 NR Description: unknown [Arabidopsis thaliana]
  misc_feature (1)..(40): NCBI GI NO: 18401669 NR Description: expressed protein; protein id: At3g17860
  misc_feature (1)..(40): NCBI GI NO: 21618251 NR Description: unknown [Arabidopsis thaliana]
  misc_feature (13)..(134): NCBI GI NO: 29788814 NR Description: unknown protein
  misc_feature (1)..(142): NCBI GI NO: 25406068 NR Description: hypothetical protein F5A18.12
  misc_feature (7)..(127): NCBI GI NO: 18410737 NR Description: expressed protein; protein id: At1g74950
MLPMSSPPANPGQLTIFYGGSVCVYDSVPPEKAQAIMLIAAAAAAASKSNGTTAVKPPAMSATNAIQAMLTRSLSLQSTSVANGQPQAVADPGSICKLQADLPIARRHSLQRFLEKRRDRVVSKAPYGAGKPSEGMGASSGMEVVAEGKAQ

SEQ ID NO: 6731 - protein, 148 aa, Glycine max
  peptide (1)..(148): Ceres Seq. ID no. 12610928
  misc_feature (4)..(37): Pfam Name: Pfam Description:  ZIM motif
  misc_feature (1)..(148): NCBI GI NO: 32488878 NR Description: OSJNBa0060D06.16
  misc_feature (1)..(124): NCBI GI NO: 15242096 NR Description: putative protein; protein id: At5g20900
  misc_feature (1)..(131): NCBI GI NO: 23237931 NR Description: contains ESTsC26074
  misc_feature (52)..(130): NCBI GI NO: 18401669 NR Description: expressed protein; protein id: At3g17860
  misc_feature (52)..(130): NCBI GI NO: 21618251 NR Description: unknown [Arabidopsis thaliana]
  misc_feature (1)..(37): NCBI GI NO: 18401669 NR Description: expressed protein; protein id: At3g17860
  misc_feature (1)..(37): NCBI GI NO: 21618251 NR Description: unknown [Arabidopsis thaliana]
  misc_feature (10)..(131): NCBI GI NO: 29788814 NR Description: unknown protein
  misc_feature (1)..(139): NCBI GI NO: 25406068 NR Description: hypothetical protein F5A18.12
  misc_feature (4)..(124): NCBI GI NO: 18410737 NR Description: expressed protein; protein id: At1g74950
MSSPPANPGQLTIFYGGSVCVYDSVPPEKAQAIMLIAAAAAAASKSNGTTAVKPPAMSATNAIQAMLTRSLSLQSTSVANGQPQAVADPGSICKLQADLPIARRHSLQRFLEKRRDRVVSKAPYGAGKPSEGMGASSGMEVVAEGKAQ

SEQ ID NO: 6732 - DNA, 1164 bp, Glycine max
  misc_feature (1)..(1164): Ceres Seq. ID no. 12610930
agacaataacccacggagagggttagaagacggcgaaatatccgcaacgagctcgtggaaatggcgacgacggtggtgccgctcgccgcggccatggccgccgctccaaggtctctcctcctgggcgctccagaccccttcccgttcctcgggatccgcccgctcctctgccgctctccgcgcggcgtcgcctgcgcccttcgccgaccttccaagtacaagaataaaattaagaacgaggtggtggtagcagaggatgacattgatggcagtgacgaggatgacgacgacgacgagggtgggttggaagcgcttttcaagcagctggaagaagatctgaagaacgacgatttgtctgtcgaggatgatgaaatatcagaggaagacatggccaggtttgaacaggtattggcagaagccattggagatgtcgatgttgctgatgaatctgcagtagatttggtgtcaggctccgaagttgttggtaatgatgaggcagcagatccagtcgaacggccagagcttaaaagctggcagctccggagattggctcgtgcaatgcaaattggtcggcgtaaaactagtataaagaatcttgcaggggagcttggcctggataggggtttggtcattgaattgctccgcaatccgcctccagaacttctacttatgtctgattctttgcctgatgaagccccctctaaacctgaaactaaggaaatagagccctctccagtagctgatgaggttgtagttgatgagattgatgccactgaagccaatccacagatggaccttccggttcatgtcatgagcacagaatggtctgcgcagaaaaggctgaaaaaggcgcaactggaaacactggaaaaggtttacttcaaatccaaacgccccactaatactatgatcagtagcatagttcaagttacaagccttccacgaaagaccattattaagtggtttgaggatagaagggagcaagatggtgtaccagaccgtcgtgccgcatacatgagatccctatctgagacaatggctagttgataacttcagataagcttgtgttatagtgttctcttttaggtctgaactacgtaggaatttgtaaattcaaactgtgaaatgcaaccagtttcataaggccaacacggcgtatctttc

SEQ ID NO: 6733 - protein, 328 aa, Glycine max
  peptide (1)..(328): Ceres Seq. ID no. 12610931
  misc_feature (23)..(328): NCBI GI NO: 29367497 NR Description: unknown [Oryza sativa (japonica cultivar-group)]
  misc_feature (51)..(318): NCBI GI NO: 8953389 NR Description: putative protein [Arabidopsis thaliana]
  misc_feature (51)..(318): NCBI GI NO: 30683552 NR Description: expressed protein [Arabidopsis thaliana]
MATTVVPLAAAMAAAPRSLLLGAPDPFPFLGIRPLLCRSPRGVACALRRPSKYKNKIKNEVVVAEDDIDGSDEDDDDDEGGLEALFKQLEEDLKNDDLSVEDDEISEEDMARFEQVLAEAIGDVDVADESAVDLVSGSEVVGNDEAADPVERPELKSWQLRRLARAMQIGRRKTSIKNLAGELGLDRGLVIELLRNPPPELLLMSDSLPDEAPSKPETKEIEPSPVADEVVVDEIDATEANPQMDLPVHVMSTEWSAQKRLKKAQLETLEKVYFKSKRPTNTMISSIVQVTSLPRKTIIKWFEDRREQDGVPDRRAAYMRSLSETMAS

SEQ ID NO: 6734 - protein, 317 aa, Glycine max
  peptide (1)..(317): Ceres Seq. ID no. 12610932
  misc_feature (12)..(317): NCBI GI NO: 29367497 NR Description: unknown [Oryza sativa (japonica cultivar-group)]
  misc_feature (40)..(307): NCBI GI NO: 8953389 NR Description: putative protein [Arabidopsis thaliana]
  misc_feature (40)..(307): NCBI GI NO: 30683552 NR Description: expressed protein [Arabidopsis thaliana]
MAAAPRSLLLGAPDPFPFLGIRPLLCRSPRGVACALRRPSKYKNKIKNEVVVAEDDIDGSDEDDDDDEGGLEALFKQLEEDLKNDDLSVEDDEISEEDMARFEQVLAEAIGDVDVADESAVDLVSGSEVVGNDEAADPVERPELKSWQLRRLARAMQIGRRKTSIKNLAGELGLDRGLVIELLRNPPPELLLMSDSLPDEAPSKPETKEIEPSPVADEVVVDEIDATEANPQMDLPVHVMSTEWSAQKRLKKAQLETLEKVYFKSKRPTNTMISSIVQVTSLPRKTIIKWFEDRREQDGVPDRRAAYMRSLSETMAS

SEQ ID NO: 6735 - protein, 219 aa, Glycine max
  peptide (1)..(219): Ceres Seq. ID no. 12610933
  misc_feature (1)..(219): NCBI GI NO: 29367497 NR Description: unknown [Oryza sativa (japonica cultivar-group)]
  misc_feature (1)..(209): NCBI GI NO: 8953389 NR Description: putative protein [Arabidopsis thaliana]
  misc_feature (1)..(209): NCBI GI NO: 30683552 NR Description: expressed protein [Arabidopsis thaliana]
MARFEQVLAEAIGDVDVADESAVDLVSGSEVVGNDEAADPVERPELKSWQLRRLARAMQIGRRKTSIKNLAGELGLDRGLVIELLRNPPPELLLMSDSLPDEAPSKPETKEIEPSPVADEVVVDEIDATEANPQMDLPVHVMSTEWSAQKRLKKAQLETLEKVYFKSKRPTNTMISSIVQVTSLPRKTIIKWFEDRREQDGVPDRRAAYMRSLSETMAS

SEQ ID NO: 6736 - DNA, 864 bp, Glycine max
  misc_feature (1)..(864): Ceres Seq. ID no. 13582138
atggaagagaagagatcgatggagcaacccaccgatcgattcgccatggccacctttctgatcttcctcatacttgccctcgccgccggcagcagcaaccaaggaggagcagctgctgccgccgccggagcccgacctgaccttatcgtcatgaagctgcacggtcacgaccccgagggcccctccgtggccttccagacccacgacctctccttcgccggcttcaccaacgggggcggccactggcaggctttcccaggcctcgcccacctgttcccgacgtccacgcccctcccgttcggcagcagctacgacgacctcatcggcggcctcgccaacctgccgagggtgcctctggggcggcaggccatggccgacgccgcccgggtgctctccgcctacgacccgtccgcggccgcggccgccgacgtcgagccagtcaagcgcgcactggcagcgctcaaggtgatgctaggcgatgcccagcggctgcagcccatccacgagacggtcgttcgggggtgggagagcgagtcccgcgtcgcgcccgagcacctgccctacattgaccactgggacaccatctcctacgagatcatccgcgccaaccggacgggcaagtggaacgggcccttcgccaagatgctggaaacccaagccaacatccgcagccaggaggaggcgctcgccgtcgtccgggtgctgctccatgccgacttcgagcaggtgctccaggctcacggcaccaagatcaacttccagtgaacatgcatgcatgcatgcatgcttgctggcttagacttcagatttgtgctccatctcctattcgagtccatgtttctttaattaaccatgttcgttgtt

SEQ ID NO: 6737 - protein, 254 aa, Glycine max
  peptide (1)..(254): Ceres Seq. ID no. 13582139
  misc_feature (49)..(215): Pfam Name: Pfam Description:  Ribosome inactivating protein
  misc_feature (49)..(215): NCBI GI NO: 37537022 NR Description: putative ribosome inactivating toxin protein
  misc_feature (53)..(238): NCBI GI NO: 29150390 NR Description: hypothetical protein
  misc_feature (48)..(249): NCBI GI NO: 18150092 NR Description: RA39p [Oryza sativa]
  misc_feature (62)..(236): NCBI GI NO: 29244620 NR Description: hypothetical protein
  misc_feature (60)..(236): NCBI GI NO: 7442154 NR Description: protein synthesis inhibitor - rye
  misc_feature (60)..(236): NCBI GI NO: 479388 NR Description: tritin - wheat
  misc_feature (60)..(239): NCBI GI NO: 132580 NR Description: Protein synthesis inhibitor II
MEEKRSMEQPTDRFAMATFLIFLILALAAGSSNQGGAAAAAAGARPDLIVMKLHGHDPEGPSVAFQTHDLSFAGFTNGGGHWQAFPGLAHLFPTSTPLPFGSSYDDLIGGLANLPRVPLGRQAMADAARVLSAYDPSAAAAADVEPVKRALAALKVMLGDAQRLQPIHETVVRGWESESRVAPEHLPYIDHWDTISYEIIRANRTGKWNGPFAKMLETQANIRSQEEALAVVRVLLHADFEQVLQAHGTKINFQ

SEQ ID NO: 6738 - protein, 248 aa, Glycine max
  peptide (1)..(248): Ceres Seq. ID no. 13582140
  misc_feature (43)..(209): Pfam Name: Pfam Description:  Ribosome inactivating protein
  misc_feature (43)..(209): NCBI GI NO: 37537022 NR Description: putative ribosome inactivating toxin protein
  misc_feature (47)..(232): NCBI GI NO: 29150390 NR Description: hypothetical protein
  misc_feature (42)..(243): NCBI GI NO: 18150092 NR Description: RA39p [Oryza sativa]
  misc_feature (56)..(230): NCBI GI NO: 29244620 NR Description: hypothetical protein
  misc_feature (54)..(230): NCBI GI NO: 7442154 NR Description: protein synthesis inhibitor - rye
  misc_feature (54)..(230): NCBI GI NO: 479388 NR Description: tritin - wheat
  misc_feature (54)..(233): NCBI GI NO: 132580 NR Description: Protein synthesis inhibitor II
MEQPTDRFAMATFLIFLILALAAGSSNQGGAAAAAAGARPDLIVMKLHGHDPEGPSVAFQTHDLSFAGFTNGGGHWQAFPGLAHLFPTSTPLPFGSSYDDLIGGLANLPRVPLGRQAMADAARVLSAYDPSAAAAADVEPVKRALAALKVMLGDAQRLQPIHETVVRGWESESRVAPEHLPYIDHWDTISYEIIRANRTGKWNGPFAKMLETQANIRSQEEALAVVRVLLHADFEQVLQAHGTKINFQ

SEQ ID NO: 6739 - protein, 239 aa, Glycine max
  peptide (1)..(239): Ceres Seq. ID no. 13582141
  misc_feature (34)..(200): Pfam Name: Pfam Description:  Ribosome inactivating protein
  misc_feature (34)..(200): NCBI GI NO: 37537022 NR Description: putative ribosome inactivating toxin protein
  misc_feature (38)..(223): NCBI GI NO: 29150390 NR Description: hypothetical protein
  misc_feature (33)..(234): NCBI GI NO: 18150092 NR Description: RA39p [Oryza sativa]
  misc_feature (47)..(221): NCBI GI NO: 29244620 NR Description: hypothetical protein
  misc_feature (45)..(221): NCBI GI NO: 7442154 NR Description: protein synthesis inhibitor - rye
  misc_feature (45)..(221): NCBI GI NO: 479388 NR Description: tritin - wheat
  misc_feature (45)..(224): NCBI GI NO: 132580 NR Description: Protein synthesis inhibitor II
MATFLIFLILALAAGSSNQGGAAAAAAGARPDLIVMKLHGHDPEGPSVAFQTHDLSFAGFTNGGGHWQAFPGLAHLFPTSTPLPFGSSYDDLIGGLANLPRVPLGRQAMADAARVLSAYDPSAAAAADVEPVKRALAALKVMLGDAQRLQPIHETVVRGWESESRVAPEHLPYIDHWDTISYEIIRANRTGKWNGPFAKMLETQANIRSQEEALAVVRVLLHADFEQVLQAHGTKINFQ

SEQ ID NO: 6740 - DNA, 823 bp, Glycine max
  misc_feature (1)..(823): Ceres Seq. ID no. 12611052
atctagtgaggctagtccagacagataaccacaagtcggaaaggaaaaccaggcgagatgaacgcacgcgacctcctcttctccggcttcgacatcgtcaagcaacaggcgagcgccgtggcctccaccgtctcgctggccaagccgtacctcccggcaaagctaaccgagatgaacacgggcaacatcgtcgccggtctcggctacgtcaagaaccatacaggagcggccgtggcctccaccgtttcgttggccaagccgtacctccccgcaaggcttaccgggatgaacaccggcgacatcgtcgcaggtctcggctacgtcaagaaccatacgggagcggccatggtctccaccgtctcgttggccaagccgtacctgcccgcaaagctctccacgcgggacggtgccgtgggaaccgcggcgatggtcatcgggggcgccgtgggcgcctacttcctctggcccgctgcggccgcccccgccgcggccggcgccatgatgaaggcgcctggtgccgccggcttcctcatctcccgcacggcgttcctggccaacccgcaggtctactaccagatcctccgcaccgctggcgccgcggcggccgccgccgctttcgtgtagggaagcaagcaaacgcgccccttggatctctcccccgtttgctttgtttcgcgtagtgtgtttaattaagcgtggttcgactatatggtggttcattccatctattctactgctgtatacagtatactccttgccgtgggagcgagagaagatgggggtgataataagcggtgcctcgtactcgtgtttgccattttcc

SEQ ID NO: 6741 - protein, 225 aa, Glycine max
  peptide (1)..(225): Ceres Seq. ID no. 12611053
LVRLVQTDNHKSERKTRRDERTRPPLLRLRHRQATGERRGLHRLAGQAVPPGKANRDEHGQHRRRSRLRQEPYRSGRGLHRFVGQAVPPRKAYRDEHRRHRRRSRLRQEPYGSGHGLHRLVGQAVPARKALHAGRCRGNRGDGHRGRRGRLLPLARCGRPRRGRRHDEGAWCRRLPHLPHGVPGQPAGLLPDPPHRWRRGGRRRFRVGKQANAPLGSLPRLLCFA

SEQ ID NO: 6742 - protein, 188 aa, Glycine max
  peptide (1)..(188): Ceres Seq. ID no. 12611054
  misc_feature (77)..(188): NCBI GI NO: 34394582 NR Description: unknown protein
  misc_feature (117)..(187): NCBI GI NO: 34394580 NR Description: hypothetical protein
MNARDLLFSGFDIVKQQASAVASTVSLAKPYLPAKLTEMNTGNIVAGLGYVKNHTGAAVASTVSLAKPYLPARLTGMNTGDIVAGLGYVKNHTGAAMVSTVSLAKPYLPAKLSTRDGAVGTAAMVIGGAVGAYFLWPAAAAPAAAGAMMKAPGAAGFLISRTAFLANPQVYYQILRTAGAAAAAAAFV

SEQ ID NO: 6743 - protein, 150 aa, Glycine max
  peptide (1)..(150): Ceres Seq. ID no. 12611055
  misc_feature (39)..(150): NCBI GI NO: 34394582 NR Description: unknown protein
  misc_feature (79)..(149): NCBI GI NO: 34394580 NR Description: hypothetical protein
MNTGNIVAGLGYVKNHTGAAVASTVSLAKPYLPARLTGMNTGDIVAGLGYVKNHTGAAMVSTVSLAKPYLPAKLSTRDGAVGTAAMVIGGAVGAYFLWPAAAAPAAAGAMMKAPGAAGFLISRTAFLANPQVYYQILRTAGAAAAAAAFV

SEQ ID NO: 6744 - DNA, 743 bp, Glycine max
  misc_feature (1)..(743): Ceres Seq. ID no. 12610934
aaacacaacacacaatccaagttaaagaaaccgttaaaaagaaaaaaaaaactacgctgtttcttgaaaatggagattgttaggttcgcggtcatttttgtactttgctccatctcgtcttccaacgccgcaattacaccgccgagcggcggagcaggagatgctcactcaatgccatgtatacaaaaactgatgccgtgtcagccgtatcttcactcggcgactcccccgcctccagcgtcgtgttgtatgccgttgaaggagatcgtcgagaccgacgtgaactgtctttgctccgtcttcaacaacgtagatatgcttaaatcgcttaaccttactaaagaaaacgctcttgttctccccaaagcttgtggcgccaacgctgatgtgtcacaatgcaaagccagcaccggtactacgacgccttcgacgtcaccgggaactactaaaactcctccggcatctcccgctgaaagcggatctaccggaggtccagcctcttcaacggccaaaccatcagactcggctcccgccatcaacttttctggaattagcttcgcctccgctttcgtggcattggcaacaatcttattctgatatcctactaattagtcacgtctttattcagcttagttggtttaaaatgttggaaactactattatcagacaatattcggtaactgatgagtattaatatgtactatgaaaattctaataatagtaataatttccaacagctcttt

SEQ ID NO: 6745 - protein, 198 aa, Glycine max
  peptide (1)..(198): Ceres Seq. ID no. 12610935
  misc_feature (60)..(133): Pfam Name: Pfam Description:  Protease inhibitor/seed storage/LTP family
  misc_feature (24)..(198): NCBI GI NO: 15221052 NR Description: lipid transfer protein, putative
  misc_feature (24)..(155): NCBI GI NO: 18410388 NR Description: lipid transfer protein, putative
  misc_feature (24)..(155): NCBI GI NO: 21593596 NR Description: lipid transfer protein, putative
  misc_feature (24)..(133): NCBI GI NO: 25406276 NR Description: probable lipid transfer protein F6D5.5
  misc_feature (53)..(146): NCBI GI NO: 15219496 NR Description: hypothetical protein; protein id: At1g73550.1
  misc_feature (53)..(146): NCBI GI NO: 25406275 NR Description: hypothetical protein F6D5.6
  misc_feature (54)..(197): NCBI GI NO: 7484433 NR Description: lipid transfer protein - Norway spruce
  misc_feature (30)..(194): NCBI GI NO: 25553602 NR Description: OJ1656_E11.34
  misc_feature (60)..(170): NCBI GI NO: 30696757 NR Description: protease inhibitor/seed storage/lipid transfer
  misc_feature (60)..(171): NCBI GI NO: 15221585 NR Description: unknown protein; protein id: At1g62790.1
KHNTQSKLKKPLKRKKKLRCFLKMEIVRFAVIFVLCSISSSNAAITPPSGGAGDAHSMPCIQKLMPCQPYLHSATPPPPASCCMPLKEIVETDVNCLCSVFNNVDMLKSLNLTKENALVLPKACGANADVSQCKASTGTTTPSTSPGTTKTPPASPAESGSTGGPASSTAKPSDSAPAINFSGISFASAFVALATILF

SEQ ID NO: 6746 - protein, 175 aa, Glycine max
  peptide (1)..(175): Ceres Seq. ID no. 12610936
  misc_feature (37)..(110): Pfam Name: Pfam Description:  Protease inhibitor/seed storage/LTP family
  misc_feature (1)..(175): NCBI GI NO: 15221052 NR Description: lipid transfer protein, putative
  misc_feature (1)..(132): NCBI GI NO: 18410388 NR Description: lipid transfer protein, putative
  misc_feature (1)..(132): NCBI GI NO: 21593596 NR Description: lipid transfer protein, putative
  misc_feature (1)..(110): NCBI GI NO: 25406276 NR Description: probable lipid transfer protein F6D5.5
  misc_feature (30)..(123): NCBI GI NO: 15219496 NR Description: hypothetical protein; protein id: At1g73550.1
  misc_feature (30)..(123): NCBI GI NO: 25406275 NR Description: hypothetical protein F6D5.6
  misc_feature (31)..(174): NCBI GI NO: 7484433 NR Description: lipid transfer protein - Norway spruce
  misc_feature (7)..(171): NCBI GI NO: 25553602 NR Description: OJ1656_E11.34
  misc_feature (37)..(147): NCBI GI NO: 30696757 NR Description: protease inhibitor/seed storage/lipid transfer
  misc_feature (37)..(148): NCBI GI NO: 15221585 NR Description: unknown protein; protein id: At1g62790.1
MEIVRFAVIFVLCSISSSNAAITPPSGGAGDAHSMPCIQKLMPCQPYLHSATPPPPASCCMPLKEIVETDVNCLCSVFNNVDMLKSLNLTKENALVLPKACGANADVSQCKASTGTTTPSTSPGTTKTPPASPAESGSTGGPASSTAKPSDSAPAINFSGISFASAFVALATILF

SEQ ID NO: 6747 - protein, 141 aa, Glycine max
  peptide (1)..(141): Ceres Seq. ID no. 12610937
  misc_feature (3)..(76): Pfam Name: Pfam Description:  Protease inhibitor/seed storage/LTP family
  misc_feature (1)..(141): NCBI GI NO: 15221052 NR Description: lipid transfer protein, putative
  misc_feature (1)..(98): NCBI GI NO: 18410388 NR Description: lipid transfer protein, putative
  misc_feature (1)..(98): NCBI GI NO: 21593596 NR Description: lipid transfer protein, putative
  misc_feature (1)..(76): NCBI GI NO: 25406276 NR Description: probable lipid transfer protein F6D5.5
  misc_feature (1)..(89): NCBI GI NO: 15219496 NR Description: hypothetical protein; protein id: At1g73550.1
  misc_feature (1)..(89): NCBI GI NO: 25406275 NR Description: hypothetical protein F6D5.6
  misc_feature (1)..(140): NCBI GI NO: 7484433 NR Description: lipid transfer protein - Norway spruce
  misc_feature (1)..(137): NCBI GI NO: 25553602 NR Description: OJ1656_E11.34
  misc_feature (3)..(113): NCBI GI NO: 30696757 NR Description: protease inhibitor/seed storage/lipid transfer
  misc_feature (3)..(114): NCBI GI NO: 15221585 NR Description: unknown protein; protein id: At1g62790.1
MPCIQKLMPCQPYLHSATPPPPASCCMPLKEIVETDVNCLCSVFNNVDMLKSLNLTKENALVLPKACGANADVSQCKASTGTTTPSTSPGTTKTPPASPAESGSTGGPASSTAKPSDSAPAINFSGISFASAFVALATILF

SEQ ID NO: 6748 - DNA, 817 bp, Glycine max
  misc_feature (1)..(817): Ceres Seq. ID no. 13639161
aagttagtcagacaacgggccactctctcgcgcctttagaaaccacgagtacgtagatcaatcttgattgatttctctctccgtcccggccggccatgaggagctcagtgcacgtgccagccgcggtagaggcgctgctgggccacccggtggcggcactgtcggagaggccggcgccgcggctaacgcggctgctggtgaacgtgacggtggagcggagcctgtggccggtgcacgtgctgctgggcgccgatgccacggtggccgacctggcgcgcgccgccgtcgacgcctatgccgccgaggggcgcaggccgccgctccccaccgatgacggcgccaccgacgcggccgcgcggttcgaagctgcacctctccaagtacgccctcgacgctcttgacccggaagagaaggtgcttgacctgggctctcgcaacttcttcctttgcgccgccaggtcgacgctgggatcagatcatcatctgcgacttcgctcatcactgacatgtcttgatgtctgaaggaaaaaagtgtgtgccatgtaaaacgagttggcatgtcggcctatatatgtggagtatatataactcatgttcgatccttctttggttgatcggtctgccagatcctctgcatcagtgtgtacgtagtgttagcttaggtatacatacagttcggccaagcaacgatacatacagatacatgtccggcgtatttacgagctcaagatatgtacgtggcgacgctgtatgtatacagctgcaagatgcaacgtttatgtatgtacctagtgccatgatgttacgtttctggact

SEQ ID NO: 6749 - protein, 101 aa, Glycine max
  peptide (1)..(101): Ceres Seq. ID no. 13639162
  misc_feature (28)..(80): NCBI GI NO: 18401542 NR Description: expressed protein [Arabidopsis thaliana]
  misc_feature (31)..(99): NCBI GI NO: 38347592 NR Description: OSJNBa0042I15.5
MRSSVHVPAAVEALLGHPVAALSERPAPRLTRLLVNVTVERSLWPVHVLLGADATVADLARAAVDAYAAEGRRPPLPTDDGATDAAARFEAAPLQVRPRRS

SEQ ID NO: 6750 - protein, 101 aa, Glycine max
  peptide (1)..(101): Ceres Seq. ID no. 13639163
MSEGKKCVPCKTSWHVGLYMWSIYNSCSILLWLIGLPDPLHQCVRSVSLGIHTVRPSNDTYRYMSGVFTSSRYVRGDAVCIQLQDATFMYVPSAMMLRFWT

SEQ ID NO: 6751 - protein, 89 aa, Glycine max
  peptide (1)..(89): Ceres Seq. ID no. 13639164
  misc_feature (30)..(73): NCBI GI NO: 18401542 NR Description: expressed protein [Arabidopsis thaliana]
MPRWPTWRAPPSTPMPPRGAGRRSPPMTAPPTRPRGSKLHLSKYALDALDPEEKVLDLGSRNFFLCAARSTLGSDHHLRLRSSLTCLDV

SEQ ID NO: 6752 - DNA, 1013 bp, Glycine max
  misc_feature (1)..(1013): Ceres Seq. ID no. 13595000
cgttctccgctcgccgccgcgccgcaatatcgtcgggaacatgagcggcgcgacgggcaccgccgacttcttctaccgggaggcgctgcgcctcggctacgtcgcccgctctgccttcaagctgatccagatacagaagcagcacaagctcatcgccccgggcgccgccgtgctcgacctcgggtgcgcccccggcgcgtggctccaggtggcctgccagaaccttggcccgctcgagaagggcggcctggtcgtcggcgtcgatgtcaagaaggtgaaggtcccctcagcgcactgcgactggcgggtcaggacggtctgcaccgatgtgatggctttgatgaagcagcaagccagggcgatgtcgccgcaggaacggggattttctgtgatattatccgacatgtgtccggtagtttcagggatcacaaccagagacgaagctatatcttgtgagctgggcatgcgtgcgctctcgttggcagttggtaagataaaggtcaaagaatcggccgactatcgtgagactatggagaggtttcagagctccacaggcccagatcctgatgaggacggtgttcttagacgtggaggcagcctagtaatcaagtttcttgagaacgaggatataccagggtttaacaaattttgcaaagagaagtttaagaaagtatctctcctgaggcctaaggcgacgaggtctagttcgagggagatctacatgatctgcgaagggttgcggtagaagattggccaccactcacctcccatgagatcttgcaagcttgtgctgagcagagtggctggaccaagaactctacaaatttgccggtgagctgtaggcgtgtaggcctgagatgatgctaacttcatcggcaattcatgattactgagttgaggaaactccgatggtatctctcctggaggtgatttggtttggtgcctttgttaaagaacagccgtattggctttgcgttcgtgcttttagaagaaaaaaggttgtacctgtctcg

SEQ ID NO: 6753 - protein, 247 aa, Glycine max
  peptide (1)..(247): Ceres Seq. ID no. 13595001
  misc_feature (33)..(247): Pfam Name: Pfam Description:  FtsJ-like methyltransferase
  misc_feature (14)..(245): NCBI GI NO: 34897416 NR Description: putative FtsJ cell division protein
  misc_feature (14)..(247): NCBI GI NO: 15240727 NR Description: FtsJ (dbj|BAA83750.1) [Arabidopsis thaliana]
  misc_feature (22)..(166): NCBI GI NO: 15669566 NR Description: cell division protein FtsJ
  misc_feature (193)..(244): NCBI GI NO: 15669566 NR Description: cell division protein FtsJ
  misc_feature (22)..(168): NCBI GI NO: 23051065 NR Description: hypothetical protein [Methanosarcina barkeri]
  misc_feature (193)..(242): NCBI GI NO: 23051065 NR Description: hypothetical protein [Methanosarcina barkeri]
  misc_feature (22)..(167): NCBI GI NO: 23028204 NR Description: hypothetical protein
  misc_feature (194)..(247): NCBI GI NO: 23028204 NR Description: hypothetical protein
  misc_feature (22)..(161): NCBI GI NO: 23057977 NR Description: hypothetical protein
  misc_feature (193)..(247): NCBI GI NO: 23057977 NR Description: hypothetical protein
VLRSPPRRNIVGNMSGATGTADFFYREALRLGYVARSAFKLIQIQKQHKLIAPGAAVLDLGCAPGAWLQVACQNLGPLEKGGLVVGVDVKKVKVPSAHCDWRVRTVCTDVMALMKQQARAMSPQERGFSVILSDMCPVVSGITTRDEAISCELGMRALSLAVGKIKVKESADYRETMERFQSSTGPDPDEDGVLRRGGSLVIKFLENEDIPGFNKFCKEKFKKVSLLRPKATRSSSREIYMICEGLR

SEQ ID NO: 6754 - protein, 234 aa, Glycine max
  peptide (1)..(234): Ceres Seq. ID no. 13595002
  misc_feature (20)..(234): Pfam Name: Pfam Description:  FtsJ-like methyltransferase
  misc_feature (1)..(232): NCBI GI NO: 34897416 NR Description: putative FtsJ cell division protein
  misc_feature (1)..(234): NCBI GI NO: 15240727 NR Description: FtsJ (dbj|BAA83750.1) [Arabidopsis thaliana]
  misc_feature (9)..(153): NCBI GI NO: 15669566 NR Description: cell division protein FtsJ
  misc_feature (180)..(231): NCBI GI NO: 15669566 NR Description: cell division protein FtsJ
  misc_feature (9)..(155): NCBI GI NO: 23051065 NR Description: hypothetical protein [Methanosarcina barkeri]
  misc_feature (180)..(229): NCBI GI NO: 23051065 NR Description: hypothetical protein [Methanosarcina barkeri]
  misc_feature (9)..(154): NCBI GI NO: 23028204 NR Description: hypothetical protein
  misc_feature (181)..(234): NCBI GI NO: 23028204 NR Description: hypothetical protein
  misc_feature (9)..(148): NCBI GI NO: 23057977 NR Description: hypothetical protein
  misc_feature (180)..(234): NCBI GI NO: 23057977 NR Description: hypothetical protein
MSGATGTADFFYREALRLGYVARSAFKLIQIQKQHKLIAPGAAVLDLGCAPGAWLQVACQNLGPLEKGGLVVGVDVKKVKVPSAHCDWRVRTVCTDVMALMKQQARAMSPQERGFSVILSDMCPVVSGITTRDEAISCELGMRALSLAVGKIKVKESADYRETMERFQSSTGPDPDEDGVLRRGGSLVIKFLENEDIPGFNKFCKEKFKKVSLLRPKATRSSSREIYMICEGLR

SEQ ID NO: 6755 - protein, 151 aa, Glycine max
  peptide (1)..(151): Ceres Seq. ID no. 13595003
RSPLAAAPQYRREHERRDGHRRLLLPGGAAPRLRRPLCLQADPDTEAAQAHRPGRRRARPRVRPRRVAPGGLPEPWPAREGRPGRRRRCQEGEGPLSALRLAGQDGLHRCDGFDEAASQGDVAAGTGIFCDIIRHVSGSFRDHNQRRSYIL

SEQ ID NO: 6756 - DNA, 1153 bp, Glycine max
  misc_feature (1)..(1153): Ceres Seq. ID no. 13595190
atcaccggtttcgaaatccatccatccaaaccagcggaagaagaagaaaagaaaaagagaaaaatccacgcgaaagggcgagcgcaggacagggacgaacaaccttgcgtgcgaggcgaggccgctccgattcgacagacgcaggcgcagcgcagggatggacgccttctactcgacctcgtcggcggcggccagcggatggggctacgactccctcaagaacttccgcgagatctcccccgccgtgcagtcccacctcaagctcgtttacctgaccctatgctttgccctggcctcatctgccgtgggtgcttacctgcacattgccctgaacattggcgggatgctgacaatgctcgcgtgtatcggaaccatcgcctggatgttctcggtgccagtctatgaggagaggaagaggtttgggctgctgatgggtgcagccctcctggaaggggcttcagttggacctctgattgagcttgccatagactttgacccaagcatcctcgtgacagggtttgtcggaaccgccatcgccttcgggtgcttctctggcgccgccatcatcgccaagcgcagggagtacctgtacctcggcggcctgctctcctctggcctgtcgatcctgctctggctgcagtttgccacgtccatctttggccactcctctggcagcttcatgtttgaggtttactttggcctgttgatcttcctggggtacatggtgtacgacacgcaggagatcatcgagagggcgcaccacggtgacatggactacatcaagcacgcgctcaccctcttcaccgacttcgtcgccgtcctcgtccgcatcctcatcatcatgctcaagaacgcaggcgacaagtcggaggacaagaagaagtggaagaggaggtcctgaacgtgtcctctgcacatcgtagataccatcaccaccgcgctactggtaccaccaccactgctaagtacttgtaggaattaagctggcgcagtaacttggcgccgtgccacccttgttaattcgcgctcgtgtgaacattgtgtgagtttgatgctgctgatgaagcatttgcagatgctgtctgcgttccggatctcttgtgttcctgttaccgtcacgataatagaaacctgagacgatttggtttggttc

SEQ ID NO: 6757 - protein, 299 aa, Glycine max
  peptide (1)..(299): Ceres Seq. ID no. 13595191
  misc_feature (76)..(285): Pfam Name: Pfam Description:  Uncharacterised protein family UPF0005
  misc_feature (53)..(299): NCBI GI NO: 13940165 NR Description: BAX inhibitor 1 [Hordeum vulgare subsp. vulgare]
  misc_feature (53)..(297): NCBI GI NO: 12229685 NR Description: Bax inhibitor-1 (BI-1) (OsBI-1)
  misc_feature (56)..(299): NCBI GI NO: 14719276 NR Description: Bax inhibitor 1 [Nicotiana tabacum]
  misc_feature (53)..(299): NCBI GI NO: 21593125 NR Description: Bax inhibitor-1 like [Arabidopsis thaliana]
  misc_feature (53)..(299): NCBI GI NO: 15238017 NR Description: Bax inhibitor-1 (BI-1), putative
  misc_feature (53)..(297): NCBI GI NO: 14719274 NR Description: Bax inhibitor 1 [Brassica napus]
  misc_feature (53)..(294): NCBI GI NO: 17981376 NR Description: bax inhibitor-like protein [Brassica oleracea]
  misc_feature (59)..(204): NCBI GI NO: 27526517 NR Description: putative BAX inhibitor 1
  misc_feature (67)..(293): NCBI GI NO: 15236582 NR Description: Bax inhibitor-1 (BI1) family
  misc_feature (69)..(293): NCBI GI NO: 21311961 NR Description: testis enhanced gene transcript; Bax inhibitor-1
SPVSKSIHPNQRKKKKRKREKSTRKGERRTGTNNLACEARPLRFDRRRRSAGMDAFYSTSSAAASGWGYDSLKNFREISPAVQSHLKLVYLTLCFALASSAVGAYLHIALNIGGMLTMLACIGTIAWMFSVPVYEERKRFGLLMGAALLEGASVGPLIELAIDFDPSILVTGFVGTAIAFGCFSGAAIIAKRREYLYLGGLLSSGLSILLWLQFATSIFGHSSGSFMFEVYFGLLIFLGYMVYDTQEIIERAHHGDMDYIKHALTLFTDFVAVLVRILIIMLKNAGDKSEDKKKWKRRS

SEQ ID NO: 6758 - protein, 247 aa, Glycine max
  peptide (1)..(247): Ceres Seq. ID no. 13595192
  misc_feature (24)..(233): Pfam Name: Pfam Description:  Uncharacterised protein family UPF0005
  misc_feature (1)..(247): NCBI GI NO: 13940165 NR Description: BAX inhibitor 1 [Hordeum vulgare subsp. vulgare]
  misc_feature (1)..(245): NCBI GI NO: 12229685 NR Description: Bax inhibitor-1 (BI-1) (OsBI-1)
  misc_feature (4)..(247): NCBI GI NO: 14719276 NR Description: Bax inhibitor 1 [Nicotiana tabacum]
  misc_feature (1)..(247): NCBI GI NO: 21593125 NR Description: Bax inhibitor-1 like [Arabidopsis thaliana]
  misc_feature (1)..(247): NCBI GI NO: 15238017 NR Description: Bax inhibitor-1 (BI-1), putative
  misc_feature (1)..(245): NCBI GI NO: 14719274 NR Description: Bax inhibitor 1 [Brassica napus]
  misc_feature (1)..(242): NCBI GI NO: 17981376 NR Description: bax inhibitor-like protein [Brassica oleracea]
  misc_feature (7)..(152): NCBI GI NO: 27526517 NR Description: putative BAX inhibitor 1
  misc_feature (15)..(241): NCBI GI NO: 15236582 NR Description: Bax inhibitor-1 (BI1) family
  misc_feature (17)..(241): NCBI GI NO: 21311961 NR Description: testis enhanced gene transcript; Bax inhibitor-1
MDAFYSTSSAAASGWGYDSLKNFREISPAVQSHLKLVYLTLCFALASSAVGAYLHIALNIGGMLTMLACIGTIAWMFSVPVYEERKRFGLLMGAALLEGASVGPLIELAIDFDPSILVTGFVGTAIAFGCFSGAAIIAKRREYLYLGGLLSSGLSILLWLQFATSIFGHSSGSFMFEVYFGLLIFLGYMVYDTQEIIERAHHGDMDYIKHALTLFTDFVAVLVRILIIMLKNAGDKSEDKKKWKRRS

SEQ ID NO: 6759 - protein, 185 aa, Glycine max
  peptide (1)..(185): Ceres Seq. ID no. 13595193
  misc_feature (1)..(171): Pfam Name: Pfam Description:  Uncharacterised protein family UPF0005
  misc_feature (1)..(185): NCBI GI NO: 13940165 NR Description: BAX inhibitor 1 [Hordeum vulgare subsp. vulgare]
  misc_feature (1)..(183): NCBI GI NO: 12229685 NR Description: Bax inhibitor-1 (BI-1) (OsBI-1)
  misc_feature (1)..(185): NCBI GI NO: 14719276 NR Description: Bax inhibitor 1 [Nicotiana tabacum]
  misc_feature (1)..(185): NCBI GI NO: 21593125 NR Description: Bax inhibitor-1 like [Arabidopsis thaliana]
  misc_feature (1)..(185): NCBI GI NO: 15238017 NR Description: Bax inhibitor-1 (BI-1), putative
  misc_feature (1)..(183): NCBI GI NO: 14719274 NR Description: Bax inhibitor 1 [Brassica napus]
  misc_feature (1)..(180): NCBI GI NO: 17981376 NR Description: bax inhibitor-like protein [Brassica oleracea]
  misc_feature (1)..(90): NCBI GI NO: 27526517 NR Description: putative BAX inhibitor 1
  misc_feature (1)..(179): NCBI GI NO: 15236582 NR Description: Bax inhibitor-1 (BI1) family
  misc_feature (1)..(179): NCBI GI NO: 21311961 NR Description: testis enhanced gene transcript; Bax inhibitor-1
MLTMLACIGTIAWMFSVPVYEERKRFGLLMGAALLEGASVGPLIELAIDFDPSILVTGFVGTAIAFGCFSGAAIIAKRREYLYLGGLLSSGLSILLWLQFATSIFGHSSGSFMFEVYFGLLIFLGYMVYDTQEIIERAHHGDMDYIKHALTLFTDFVAVLVRILIIMLKNAGDKSEDKKKWKRRS

SEQ ID NO: 6760 - DNA, 960 bp, Glycine max
  misc_feature (1)..(960): Ceres Seq. ID no. 12611101
aacaaacacatcttcctctcagtactcgtcgtctctctactctattcttcttctctgacaaaagccaatacctgccccttgcaatatcatgggtcatgaatgtatcgatgcatcaaaggagttcaagtggggtgaggacgtcaaaagtgaagtgactgagattgttcttgttcgccatggagaaaccacttggaatgctgctggaagaatccagggacaaattgaatcggatcttaacgaaattggacaaaagcaggctgttgcaatcgctgagagattaggaaaagaggagagacccatagctatatattcatcagacctcaagcgagccaaagacactgctctcaagatcgcggaaacttgtttttgttccaaggtgactgaagtgcccgagttaaaggagaggcatgtgggtagtctccaagggttgtattggaaagaaggagcagagaaagaacctgaagcttactctgctttcttttcttcccaaaatgacctcgagattcctggaggaggagagagctttgaccaactttgtgagaggtccatgaatgcccttgagcgaattgcaaagaagcacaaaggggagagagtgatagtagtgactcatggaggagtgttaagggcaatctacatgaggatcacgcaagcttcctctgctgggaaactccttaatgcttcagtgaatgttgttcacttcagtgacgagaaatggatcattgattcatggagcgatgtttctcatctctcatcagttggattcctccaacgtggcttcgatggtgacgccaagccctagaggaccatcatccattctctagatctcctccataaataatattctctgtggtgcgtttaagatacgaagtgtttccattggtgcggtcgatgttcttgtggaaaagttgtttatctttttgtattttgcattaatcgattaataataaagctctcttcttg

SEQ ID NO: 6761 - protein, 236 aa, Glycine max
  peptide (1)..(236): Ceres Seq. ID no. 12611102
  misc_feature (23)..(214): Pfam Name: Pfam Description:  Phosphoglycerate mutase family
  misc_feature (1)..(236): NCBI GI NO: 15237633 NR Description: phosphoglycerate mutase - like protein
  misc_feature (1)..(236): NCBI GI NO: 9955567 NR Description: phosphoglycerate mutase-like protein
  misc_feature (88)..(236): NCBI GI NO: 26450240 NR Description: putative phosphoglycerate mutase
  misc_feature (16)..(233): NCBI GI NO: 15229783 NR Description: putative protein; protein id: At3g50520
  misc_feature (23)..(223): NCBI GI NO: 22976134 NR Description: hypothetical protein [Ralstonia metallidurans]
  misc_feature (22)..(222): NCBI GI NO: 33592552 NR Description: probable phosphoglycerate mutase 2
  misc_feature (21)..(220): NCBI GI NO: 17545218 NR Description: PUTATIVE PHOSPHOGLYCERATE MUTASE 2 PROTEIN
  misc_feature (22)..(222): NCBI GI NO: 33596671 NR Description: probable phosphoglycerate mutase 2
  misc_feature (23)..(222): NCBI GI NO: 22988026 NR Description: hypothetical protein [Burkholderia fungorum]
  misc_feature (19)..(223): NCBI GI NO: 15806410 NR Description: phosphoglycerate mutase, putative
MGHECIDASKEFKWGEDVKSEVTEIVLVRHGETTWNAAGRIQGQIESDLNEIGQKQAVAIAERLGKEERPIAIYSSDLKRAKDTALKIAETCFCSKVTEVPELKERHVGSLQGLYWKEGAEKEPEAYSAFFSSQNDLEIPGGGESFDQLCERSMNALERIAKKHKGERVIVVTHGGVLRAIYMRITQASSAGKLLNASVNVVHFSDEKWIIDSWSDVSHLSSVGFLQRGFDGDAKP

SEQ ID NO: 6762 - DNA, 820 bp, Glycine max
  misc_feature (1)..(820): Ceres Seq. ID no. 13595350
atcgctaatctcgtcattcgtctctcgaatccttaaaaagaaccgtaggaagaaacaatggatccagctgagatgaggtacttggaagaagaggacggccccatgatgaagaccatcaaaggcagcgtgactggtttcgccgccgggaccatctacggaaccattttggccacgtggaaagacgttccgagggtggagaggaacgtggctcttccggggctcatcagaaccctgaagatgatgggaactcacgggctcactttcgccgccattggaggagtttacatcggtgttgagcaggtggttcagggttatagaggcaagagagattttttcaatggtgctattggtgggtttgttgctggagcttctgtccttggctatagagcaaggagcatcccaacagcgatagctgcaggtgcaacactagcggttacatctgctttgattgactctggaggtcagaccacaagagtagacaacggcagagagtattatccttacgctcccgttgagaaaacagctaaagctgatgcttgatctctcttttggcgttcggaactcttaataaagctctgcatctgcttatcatgggctcttgagatcatctctcttccctgtcctctctatttttttgttttgtttctggagatataaaattgctcttgtttcctcctgtgtttatggagagtgacttacatcttttgtctgaacttttccttgcaataaaaaatcaactttgttttcaaaaaaaaaaaaaaaaaagcttatcgataccgtcgacctgtttaaacacaataaagtkggaactggagggggg

SEQ ID NO: 6763 - protein, 160 aa, Glycine max
  peptide (1)..(160): Ceres Seq. ID no. 15221551
  misc_feature (1)..(160): NCBI GI NO: 18405910 NR Description: expressed protein [Arabidopsis thaliana]
MDPAEMRYLEEEDGPMMKTIKGSVTGFAAGTIYGTILATWKDVPRVERNVALPGLIRTLKMMGTHGLTFAAIGGVYIGVEQVVQGYRGKRDFFNGAIGGFVAGASVLGYRARSIPTAIAAGATLAVTSALIDSGGQTTRVDNGREYYPYAPVEKTAKADA

SEQ ID NO: 6764 - protein, 155 aa, Glycine max
  peptide (1)..(155): Ceres Seq. ID no. 15221552
  misc_feature (1)..(155): NCBI GI NO: 18405910 NR Description: expressed protein [Arabidopsis thaliana]
MRYLEEEDGPMMKTIKGSVTGFAAGTIYGTILATWKDVPRVERNVALPGLIRTLKMMGTHGLTFAAIGGVYIGVEQVVQGYRGKRDFFNGAIGGFVAGASVLGYRARSIPTAIAAGATLAVTSALIDSGGQTTRVDNGREYYPYAPVEKTAKADA

SEQ ID NO: 6765 - protein, 145 aa, Glycine max
  peptide (1)..(145): Ceres Seq. ID no. 15221553
  misc_feature (1)..(145): NCBI GI NO: 18405910 NR Description: expressed protein [Arabidopsis thaliana]
MMKTIKGSVTGFAAGTIYGTILATWKDVPRVERNVALPGLIRTLKMMGTHGLTFAAIGGVYIGVEQVVQGYRGKRDFFNGAIGGFVAGASVLGYRARSIPTAIAAGATLAVTSALIDSGGQTTRVDNGREYYPYAPVEKTAKADA

SEQ ID NO: 6766 - DNA, 805 bp, Glycine max
  misc_feature (1)..(805): Ceres Seq. ID no. 12610699
aaaaagaatcattcaaatgaaatggtggttcagaaatgggggaaggaggagcctccctttctctctgtgtgtatgggttgcgagaaggagtagaaccatgcgttcagacgcggcgttggaagccatagccaaagcttcagaagacagagttcccaacatagttctctacaactacccttccttttctggagcatactctgctctctttgctcacctcttctacactcaccacaatctcccttccctcatattacccttctcttcggttccccttctcgctctcagggttgaagatttgtgctttgaaggcctggagacgtgttatctacttgactttattcctccgaaggaattccttttcgacctttctcgtaaatcaaaatgcaagattattgggtttgatcatcggaaatcggtacttggacatattccccctgccaatgattgccctgagaatattatgattaatgtaaatcttgagaagagtagctccagtgttgtttatgagtactttgccggcaaatgtgaggatgctaatatttctaatggtgaggctccatgtttggtggactcaaaagacaaaggccgagtggagccttccaaaattttggtttgttctgctgcttttgttttgttcctcatccctgaaggacgtcttatttcaagttataaaagttctactagatgaaaagataaagtagtcaggtgatcctgtgatatatttgttctcttatctatcgaaatctgctggaataataagcatttagatcaaaaaaaaaaaaaaatatcgataccgtcgacctcg

SEQ ID NO: 6767 - protein, 228 aa, Glycine max
  peptide (1)..(228): Ceres Seq. ID no. 12610700
  misc_feature (5)..(198): NCBI GI NO: 15242457 NR Description: putative protein; protein id: At5g09580.1
  misc_feature (54)..(197): NCBI GI NO: 21593117 NR Description: unknown [Arabidopsis thaliana]
  misc_feature (54)..(197): NCBI GI NO: 18404427 NR Description: Expressed protein; protein id: At1g53345
  misc_feature (54)..(197): NCBI GI NO: 25405983 NR Description: protein F12M16.25
KRIIQMKWWFRNGGRRSLPFSLCVWVARRSRTMRSDAALEAIAKASEDRVPNIVLYNYPSFSGAYSALFAHLFYTHHNLPSLILPFSSVPLLALRVEDLCFEGLETCYLLDFIPPKEFLFDLSRKSKCKIIGFDHRKSVLGHIPPANDCPENIMINVNLEKSSSSVVYEYFAGKCEDANISNGEAPCLVDSKDKGRVEPSKILVCSAAFVLFLIPEGRLISSYKSSTR

SEQ ID NO: 6768 - protein, 223 aa, Glycine max
  peptide (1)..(223): Ceres Seq. ID no. 12610701
  misc_feature (1)..(193): NCBI GI NO: 15242457 NR Description: putative protein; protein id: At5g09580.1
  misc_feature (49)..(192): NCBI GI NO: 21593117 NR Description: unknown [Arabidopsis thaliana]
  misc_feature (49)..(192): NCBI GI NO: 18404427 NR Description: Expressed protein; protein id: At1g53345
  misc_feature (49)..(192): NCBI GI NO: 25405983 NR Description: protein F12M16.25
MKWWFRNGGRRSLPFSLCVWVARRSRTMRSDAALEAIAKASEDRVPNIVLYNYPSFSGAYSALFAHLFYTHHNLPSLILPFSSVPLLALRVEDLCFEGLETCYLLDFIPPKEFLFDLSRKSKCKIIGFDHRKSVLGHIPPANDCPENIMINVNLEKSSSSVVYEYFAGKCEDANISNGEAPCLVDSKDKGRVEPSKILVCSAAFVLFLIPEGRLISSYKSSTR

SEQ ID NO: 6769 - protein, 196 aa, Glycine max
  peptide (1)..(196): Ceres Seq. ID no. 12610702
  misc_feature (1)..(166): NCBI GI NO: 15242457 NR Description: putative protein; protein id: At5g09580.1
  misc_feature (22)..(165): NCBI GI NO: 21593117 NR Description: unknown [Arabidopsis thaliana]
  misc_feature (22)..(165): NCBI GI NO: 18404427 NR Description: Expressed protein; protein id: At1g53345
  misc_feature (22)..(165): NCBI GI NO: 25405983 NR Description: protein F12M16.25
MRSDAALEAIAKASEDRVPNIVLYNYPSFSGAYSALFAHLFYTHHNLPSLILPFSSVPLLALRVEDLCFEGLETCYLLDFIPPKEFLFDLSRKSKCKIIGFDHRKSVLGHIPPANDCPENIMINVNLEKSSSSVVYEYFAGKCEDANISNGEAPCLVDSKDKGRVEPSKILVCSAAFVLFLIPEGRLISSYKSSTR

SEQ ID NO: 6770 - DNA, 743 bp, Glycine max
  misc_feature (1)..(743): Ceres Seq. ID no. 12610954
atagactctttcatttcctcttttctttgtgtactaacatttttttgttcaaatccatttgctcctttagacaccgatctccttcatggctccgattgctgtcggtagtgttttaccagacggaaaaattttcctctttgacgagaacgatcagctccagacggtcaccgttcactctctcttggctggtaagaaggtcattctctttggtgtccccggtgctttcacttccgcctgcagcttgcagcatgtgcctagtttcattgagaaagcggaccagctgaaagcaaagggtgttaatgagataatatgctatggcatgaatgatccgtatgtgatgaaagcatggggaaagacattcccagagaacaagcatgtcaagtttgtctcagacggctcaggagaatacacaaagctcctcggactggagcttgaccttaaggacaaaggtcttggtattaggacaaggagatttgctatgttgctcgataacctcaaggtgactgtcgccaacattgaaacaggtggcgagttcacggtttctagcgccgaggatatcctcaaggctctctaagaaactaccatgtgaaagtagaggatctctagcctgattttcagaataagaagttggcataataaattagttttagttgtttaattcctctttctaattataataacgtactagtttttgaaggcccggtttgtttccaaagtttaataaatttttaataaatttctct

SEQ ID NO: 6771 - protein, 162 aa, Glycine max
  peptide (1)..(162): Ceres Seq. ID no. 12610955
  misc_feature (6)..(160): Pfam Name: Pfam Description:  AhpC/TSA family
  misc_feature (1)..(162): NCBI GI NO: 4928472 NR Description: type 2 peroxiredoxin
  misc_feature (1)..(162): NCBI GI NO: 15218877 NR Description: type 2 peroxiredoxin, putative
  misc_feature (1)..(162): NCBI GI NO: 15218876 NR Description: type 2 peroxiredoxin, putative
  misc_feature (1)..(162): NCBI GI NO: 21593881 NR Description: type 2 peroxiredoxin, putative
  misc_feature (1)..(162): NCBI GI NO: 18406870 NR Description: peroxiredoxin, putative; protein id: At1g60740
  misc_feature (1)..(162): NCBI GI NO: 21553913 NR Description: peroxiredoxin, putative [Arabidopsis thaliana]
  misc_feature (1)..(162): NCBI GI NO: 4704732 NR Description: peroxiredoxin TPx2 [Arabidopsis thaliana]
  misc_feature (1)..(162): NCBI GI NO: 19548660 NR Description: peroxiredoxin
  misc_feature (1)..(162): NCBI GI NO: 18654477 NR Description: thioredoxin peroxidase [Capsicum annuum]
  misc_feature (1)..(162): NCBI GI NO: 30841938 NR Description: thioredoxin peroxidase 1 [Lycopersicon esculentum]
MAPIAVGSVLPDGKIFLFDENDQLQTVTVHSLLAGKKVILFGVPGAFTSACSLQHVPSFIEKADQLKAKGVNEIICYGMNDPYVMKAWGKTFPENKHVKFVSDGSGEYTKLLGLELDLKDKGLGIRTRRFAMLLDNLKVTVANIETGGEFTVSSAEDILKAL

SEQ ID NO: 6772 - protein, 93 aa, Glycine max
  peptide (1)..(93): Ceres Seq. ID no. 12610956
RLFHFLFSLCTNIFLFKSICSFRHRSPSWLRLLSVVFYQTEKFSSLTRTISSRRSPFTLSWLVRRSFSLVSPVLSLPPAACSMCLVSLRKRTS

SEQ ID NO: 6773 - protein, 84 aa, Glycine max
  peptide (1)..(84): Ceres Seq. ID no. 12610957
  misc_feature (1)..(82): Pfam Name: Pfam Description:  AhpC/TSA family
  misc_feature (1)..(84): NCBI GI NO: 4928472 NR Description: type 2 peroxiredoxin
  misc_feature (1)..(84): NCBI GI NO: 15218877 NR Description: type 2 peroxiredoxin, putative
  misc_feature (1)..(84): NCBI GI NO: 15218876 NR Description: type 2 peroxiredoxin, putative
  misc_feature (1)..(84): NCBI GI NO: 21593881 NR Description: type 2 peroxiredoxin, putative
  misc_feature (1)..(84): NCBI GI NO: 18406870 NR Description: peroxiredoxin, putative; protein id: At1g60740
  misc_feature (1)..(84): NCBI GI NO: 21553913 NR Description: peroxiredoxin, putative [Arabidopsis thaliana]
  misc_feature (1)..(84): NCBI GI NO: 4704732 NR Description: peroxiredoxin TPx2 [Arabidopsis thaliana]
  misc_feature (1)..(84): NCBI GI NO: 19548660 NR Description: peroxiredoxin
  misc_feature (1)..(84): NCBI GI NO: 18654477 NR Description: thioredoxin peroxidase [Capsicum annuum]
  misc_feature (1)..(84): NCBI GI NO: 30841938 NR Description: thioredoxin peroxidase 1 [Lycopersicon esculentum]
MNDPYVMKAWGKTFPENKHVKFVSDGSGEYTKLLGLELDLKDKGLGIRTRRFAMLLDNLKVTVANIETGGEFTVSSAEDILKAL

SEQ ID NO: 6774 - DNA, 1453 bp, Glycine max
  misc_feature (1)..(1453): Ceres Seq. ID no. 13595351
agaaccacaagcagttagcaccccgcattgtttctctgtagatcactaacaggttgtagagagagagagagagagagagagagagagagagaggaggaaggagggagagatggggagggatcagcaggcaggtgtaggtgcaggcgcggcggcggcgcaccgggagaaggtgaagctgttcatgggggtgctggcgctgcagttcctgctcgccggcttccacatcgtcagccgggcggcgctcaacatgggcatcagcaagctcgtcttcatcgtctaccgcaacgtcatctccctcgccctcctcgcccccttcgcctacttcctcgagaagaaggaccggccgccgctcaccttctcgctgctggcggagttcttcgtgctggcgctcatcgggatcacggcgaaccaggggttctacctgctggggctgtaccacctgtcgccgacctacgcgtcggcgatccagaacatggtgccagccatcaccttcgtgctggccacggtcctccggctggagcaggtggacctgggccggcggcacggggtggccaaggtggtgggcaccgtggtgagcatcggcggcgccacggtgatcacgctctacaagggcctgccgctcttcagccacaacctgcacgtgcaggccgtcctctcctggacctccggcagccccatcttcaactggaccctaggctgcgtcttcatcctcggccactgcctctcctggtccggctggatggtgctccaggtgccggtgctcaagcggtacccggcgaggctgtcggtcatctcgctcacctgcgtcttcgggctgctccagttcctcgtcatcgccgccttcaccgaggaggacctcagccggtggaaggtgcagtccggcggggagctgttcaccatcctctacgcggggctggtggcctccggcgtggcgttcgcgctgcagatctggtgcatcgaccgcggcggcccgctcttcaccgccgtgttccagcccgtgcagaccgtcgccgtcgccgtcatggccgccgtcatcctcggcgaccagctctacaccggagggatcatcggcgcggtgctgatcgtcatcgggctctacttcgtgctgtggggcaagagcgaggagaagaagacgaggagccaagacccggagatggcgaggcgcctgctcggggaagacggcggcgcagctgacaaagatcagcaagtgagcaccactgtcctggcgtgaaagctgctgcttgctggatttggagatgtgtgtactgatgtgggtgtttgtacctacgtttttaactagtgtttcaagcgtgcgaccaagaagaagaagactcgtactagttgacgatgtgaactgccaaacacactcagtcatatttggtacctactgtgtatagccccttgtcttcgagttgtgtgtgtgtctataaatacactatgctccctaattttc

SEQ ID NO: 6775 - protein, 373 aa, Glycine max
  peptide (1)..(373): Ceres Seq. ID no. 13595352
  misc_feature (205)..(334): Pfam Name: Pfam Description:  Integral membrane protein DUF6
  misc_feature (1)..(370): NCBI GI NO: 34895316 NR Description: putative nodulin
  misc_feature (1)..(367): NCBI GI NO: 9294076 NR Description: nodulin-like protein [Arabidopsis thaliana]
  misc_feature (19)..(367): NCBI GI NO: 15229596 NR Description: nodulin MtN21 family protein
  misc_feature (19)..(341): NCBI GI NO: 18410867 NR Description: nodulin MtN21 family protein
  misc_feature (19)..(348): NCBI GI NO: 18409794 NR Description: nodulin MtN21 family protein
  misc_feature (157)..(341): NCBI GI NO: 25404978 NR Description: protein F10A5.28 [imported] - Arabidopsis thaliana
  misc_feature (19)..(96): NCBI GI NO: 25404978 NR Description: protein F10A5.28 [imported] - Arabidopsis thaliana
  misc_feature (35)..(348): NCBI GI NO: 21593130 NR Description: nodulin-like protein [Arabidopsis thaliana]
  misc_feature (19)..(362): NCBI GI NO: 34908998 NR Description: nodulin-like protein
  misc_feature (22)..(341): NCBI GI NO: 15240683 NR Description: nodulin MtN21 family protein
MGRDQQAGVGAGAAAAHREKVKLFMGVLALQFLLAGFHIVSRAALNMGISKLVFIVYRNVISLALLAPFAYFLEKKDRPPLTFSLLAEFFVLALIGITANQGFYLLGLYHLSPTYASAIQNMVPAITFVLATVLRLEQVDLGRRHGVAKVVGTVVSIGGATVITLYKGLPLFSHNLHVQAVLSWTSGSPIFNWTLGCVFILGHCLSWSGWMVLQVPVLKRYPARLSVISLTCVFGLLQFLVIAAFTEEDLSRWKVQSGGELFTILYAGLVASGVAFALQIWCIDRGGPLFTAVFQPVQTVAVAVMAAVILGDQLYTGGIIGAVLIVIGLYFVLWGKSEEKKTRSQDPEMARRLLGEDGGAADKDQQVSTTVLA

SEQ ID NO: 6776 - protein, 349 aa, Glycine max
  peptide (1)..(349): Ceres Seq. ID no. 13595353
  misc_feature (181)..(310): Pfam Name: Pfam Description:  Integral membrane protein DUF6
  misc_feature (1)..(346): NCBI GI NO: 34895316 NR Description: putative nodulin
  misc_feature (1)..(343): NCBI GI NO: 9294076 NR Description: nodulin-like protein [Arabidopsis thaliana]
  misc_feature (1)..(343): NCBI GI NO: 15229596 NR Description: nodulin MtN21 family protein
  misc_feature (1)..(317): NCBI GI NO: 18410867 NR Description: nodulin MtN21 family protein
  misc_feature (1)..(324): NCBI GI NO: 18409794 NR Description: nodulin MtN21 family protein
  misc_feature (133)..(317): NCBI GI NO: 25404978 NR Description: protein F10A5.28 [imported] - Arabidopsis thaliana
  misc_feature (1)..(72): NCBI GI NO: 25404978 NR Description: protein F10A5.28 [imported] - Arabidopsis thaliana
  misc_feature (11)..(324): NCBI GI NO: 21593130 NR Description: nodulin-like protein [Arabidopsis thaliana]
  misc_feature (1)..(338): NCBI GI NO: 34908998 NR Description: nodulin-like protein
  misc_feature (1)..(317): NCBI GI NO: 15240683 NR Description: nodulin MtN21 family protein
MGVLALQFLLAGFHIVSRAALNMGISKLVFIVYRNVISLALLAPFAYFLEKKDRPPLTFSLLAEFFVLALIGITANQGFYLLGLYHLSPTYASAIQNMVPAITFVLATVLRLEQVDLGRRHGVAKVVGTVVSIGGATVITLYKGLPLFSHNLHVQAVLSWTSGSPIFNWTLGCVFILGHCLSWSGWMVLQVPVLKRYPARLSVISLTCVFGLLQFLVIAAFTEEDLSRWKVQSGGELFTILYAGLVASGVAFALQIWCIDRGGPLFTAVFQPVQTVAVAVMAAVILGDQLYTGGIIGAVLIVIGLYFVLWGKSEEKKTRSQDPEMARRLLGEDGGAADKDQQVSTTVLA

SEQ ID NO: 6777 - protein, 327 aa, Glycine max
  peptide (1)..(327): Ceres Seq. ID no. 13595354
  misc_feature (159)..(288): Pfam Name: Pfam Description:  Integral membrane protein DUF6
  misc_feature (1)..(324): NCBI GI NO: 34895316 NR Description: putative nodulin
  misc_feature (1)..(321): NCBI GI NO: 9294076 NR Description: nodulin-like protein [Arabidopsis thaliana]
  misc_feature (1)..(321): NCBI GI NO: 15229596 NR Description: nodulin MtN21 family protein
  misc_feature (1)..(295): NCBI GI NO: 18410867 NR Description: nodulin MtN21 family protein
  misc_feature (1)..(302): NCBI GI NO: 18409794 NR Description: nodulin MtN21 family protein
  misc_feature (111)..(295): NCBI GI NO: 25404978 NR Description: protein F10A5.28 [imported] - Arabidopsis thaliana
  misc_feature (1)..(50): NCBI GI NO: 25404978 NR Description: protein F10A5.28 [imported] - Arabidopsis thaliana
  misc_feature (1)..(302): NCBI GI NO: 21593130 NR Description: nodulin-like protein [Arabidopsis thaliana]
  misc_feature (1)..(316): NCBI GI NO: 34908998 NR Description: nodulin-like protein
  misc_feature (1)..(295): NCBI GI NO: 15240683 NR Description: nodulin MtN21 family protein
MGISKLVFIVYRNVISLALLAPFAYFLEKKDRPPLTFSLLAEFFVLALIGITANQGFYLLGLYHLSPTYASAIQNMVPAITFVLATVLRLEQVDLGRRHGVAKVVGTVVSIGGATVITLYKGLPLFSHNLHVQAVLSWTSGSPIFNWTLGCVFILGHCLSWSGWMVLQVPVLKRYPARLSVISLTCVFGLLQFLVIAAFTEEDLSRWKVQSGGELFTILYAGLVASGVAFALQIWCIDRGGPLFTAVFQPVQTVAVAVMAAVILGDQLYTGGIIGAVLIVIGLYFVLWGKSEEKKTRSQDPEMARRLLGEDGGAADKDQQVSTTVLA

SEQ ID NO: 6778 - DNA, 889 bp, Glycine max
  misc_feature (1)..(889): Ceres Seq. ID no. 12610385
aacctttttttctctcgtctccaattttctcagcttctgctggatctctccagcagagacgatccttcctacgggactgtttgatcaatcaaggcttctcgggcaaacaggtgaatagaagtgagattaggctatgtgggttttgtatgttttacagatttgctattgaaggttcatttctaagaaggaagaaatggaccacgacaagacaggatgccaaagcccacctgaaggtcccaagctatgcatcaacaactgcggtttcttcggaagctctgccacaatgaacatgtgttccaagtgtcacaaggctatcctgtttcaacaggaacagggggctaggtttgcatctgcagtgtctggtggtacatcttcatccagcaacatcttaaaggaaacctttgctgctaccgcgctggttgatgctgaaaccaaatccgttgagccggtggctgtctctttacagccatcttctgtccaagtcgtcgtcgcagaggtagtagctccagaagcagctgcatcaataccaaaggaaggaccaagccgatgtgctacttgcaataaacgggttggtctgactggattcaaatgtcgctgcggtgacctcttctgcgggacgcaccgctatgcagacatacacaactgctccttcaattaccatgccgctgcgcaagaagctatagctaaagcaaacccggttgtgaaggcagagaagcttgacaaaatctgaagaactcaaacaccaaagtgatagactacgacctccttaggagcatttagaattggaaaagaaggtttagaattttacatatttgttattattgcctactaaggtgtttactcctataagagggagacatttgattctaataaaatcatccattaagag

SEQ ID NO: 6779 - protein, 178 aa, Glycine max
  peptide (1)..(178): Ceres Seq. ID no. 12610386
  misc_feature (119)..(159): Pfam Name: Pfam Description:  AN1-like Zinc finger
  misc_feature (1)..(178): NCBI GI NO: 18403408 NR Description: expressed protein; protein id: At1g51200
  misc_feature (1)..(178): NCBI GI NO: 25082726 NR Description: expressed protein [Arabidopsis thaliana]
  misc_feature (1)..(178): NCBI GI NO: 11361253 NR Description: hypothetical protein p85RF
  misc_feature (1)..(178): NCBI GI NO: 35187687 NR Description: zinc-finger protein
  misc_feature (8)..(178): NCBI GI NO: 15231686 NR Description: zinc finger - like protein; protein id:At3g52800
  misc_feature (8)..(178): NCBI GI NO: 18404102 NR Description: expressed protein; protein id: At2g36320
  misc_feature (8)..(178): NCBI GI NO: 14596167 NR Description: zinc finger-like protein [Arabidopsis thaliana]
  misc_feature (11)..(178): NCBI GI NO: 15234402 NR Description: putative protein; protein id: At4g12040
  misc_feature (15)..(178): NCBI GI NO: 15225894 NR Description: putative zinc finger protein; protein id:At2g27580
  misc_feature (3)..(178): NCBI GI NO: 8778645 NR Description: F5O11.17 [Arabidopsis thaliana]
MDHDKTGCQSPPEGPKLCINNCGFFGSSATMNMCSKCHKAILFQQEQGARFASAVSGGTSSSSNILKETFAATALVDAETKSVEPVAVSLQPSSVQVVVAEVVAPEAAASIPKEGPSRCATCNKRVGLTGFKCRCGDLFCGTHRYADIHNCSFNYHAAAQEAIAKANPVVKAEKLDKI

SEQ ID NO: 6780 - protein, 148 aa, Glycine max
  peptide (1)..(148): Ceres Seq. ID no. 12610387
  misc_feature (89)..(129): Pfam Name: Pfam Description:  AN1-like Zinc finger
  misc_feature (1)..(148): NCBI GI NO: 18403408 NR Description: expressed protein; protein id: At1g51200
  misc_feature (1)..(148): NCBI GI NO: 25082726 NR Description: expressed protein [Arabidopsis thaliana]
  misc_feature (1)..(148): NCBI GI NO: 11361253 NR Description: hypothetical protein p85RF
  misc_feature (1)..(148): NCBI GI NO: 35187687 NR Description: zinc-finger protein
  misc_feature (1)..(148): NCBI GI NO: 15231686 NR Description: zinc finger - like protein; protein id:At3g52800
  misc_feature (1)..(148): NCBI GI NO: 18404102 NR Description: expressed protein; protein id: At2g36320
  misc_feature (1)..(148): NCBI GI NO: 14596167 NR Description: zinc finger-like protein [Arabidopsis thaliana]
  misc_feature (1)..(148): NCBI GI NO: 15234402 NR Description: putative protein; protein id: At4g12040
  misc_feature (1)..(148): NCBI GI NO: 15225894 NR Description: putative zinc finger protein; protein id:At2g27580
  misc_feature (1)..(148): NCBI GI NO: 8778645 NR Description: F5O11.17 [Arabidopsis thaliana]
MNMCSKCHKAILFQQEQGARFASAVSGGTSSSSNILKETFAATALVDAETKSVEPVAVSLQPSSVQVVVAEVVAPEAAASIPKEGPSRCATCNKRVGLTGFKCRCGDLFCGTHRYADIHNCSFNYHAAAQEAIAKANPVVKAEKLDKI

SEQ ID NO: 6781 - protein, 146 aa, Glycine max
  peptide (1)..(146): Ceres Seq. ID no. 12610388
  misc_feature (87)..(127): Pfam Name: Pfam Description:  AN1-like Zinc finger
  misc_feature (1)..(146): NCBI GI NO: 18403408 NR Description: expressed protein; protein id: At1g51200
  misc_feature (1)..(146): NCBI GI NO: 25082726 NR Description: expressed protein [Arabidopsis thaliana]
  misc_feature (1)..(146): NCBI GI NO: 11361253 NR Description: hypothetical protein p85RF
  misc_feature (1)..(146): NCBI GI NO: 35187687 NR Description: zinc-finger protein
  misc_feature (1)..(146): NCBI GI NO: 15231686 NR Description: zinc finger - like protein; protein id:At3g52800
  misc_feature (1)..(146): NCBI GI NO: 18404102 NR Description: expressed protein; protein id: At2g36320
  misc_feature (1)..(146): NCBI GI NO: 14596167 NR Description: zinc finger-like protein [Arabidopsis thaliana]
  misc_feature (1)..(146): NCBI GI NO: 15234402 NR Description: putative protein; protein id: At4g12040
  misc_feature (1)..(146): NCBI GI NO: 15225894 NR Description: putative zinc finger protein; protein id:At2g27580
  misc_feature (1)..(146): NCBI GI NO: 8778645 NR Description: F5O11.17 [Arabidopsis thaliana]
MCSKCHKAILFQQEQGARFASAVSGGTSSSSNILKETFAATALVDAETKSVEPVAVSLQPSSVQVVVAEVVAPEAAASIPKEGPSRCATCNKRVGLTGFKCRCGDLFCGTHRYADIHNCSFNYHAAAQEAIAKANPVVKAEKLDKI

SEQ ID NO: 6782 - DNA, 977 bp, Glycine max
  misc_feature (1)..(977): Ceres Seq. ID no. 12610391
aagggttttttaagttcttgaaatcttctcgatcgaaggattccaaatgggttcggtttcgggtcaaacccgaattgctacgatgagcctctccctctcctcatcagagaagagctctaataatcgctcctcctcgcttctcaatcctaagaacgcagtttcagatagttacggggtctcttccaaatgcagcacattcctcaggggccagttccaaagaatacaactctcttatactcgccacactcgacctttgccaaaacgtgcaggccacgttgtgtctccgagctgcgtcatgccgttgacggaagagaatgtggagagagtgctcgacgaagtacgccccgcgttgatggcagacggaggaaacgtggcgctgcatgagatcgacggactcgtggtggttcttaagctacaaggagcttgtggttcgtgtcccagctcgtcgatgacgttaaagatgggaatcgagagtcgtctccgcgacaagattccggagatcatgtccgtcgagcagtttcttgaagcggagactggagggttggagctcaacgaggaaaacatcgaaaaggttctcgctgagctacggccttacctatcgggaacaggaggtggagggcttgagcttgttgagatcgatggttatatagttaagattcggctcactggaccagctgctggagtcatgacggttcgtgtcgcgttgactcagaaactgagggaaaacattccttcaataggtgcagtccagcttctagagtgaccactttttgtattgttcatctacgagagcctatatttcgattatatgtacatcattttcaaatctaacatccataccattcagttcctggtggctcttgtgttggctctcatttttgtcatatgctaagtctagatccataggctctcatctcataagtagaccttggattcatccaggttacgttctatatacaagtaactgagtttaatcc

SEQ ID NO: 6783 - protein, 238 aa, Glycine max
  peptide (1)..(238): Ceres Seq. ID no. 12610392
  misc_feature (91)..(158): Pfam Name: Pfam Description:  NifU-like domain
  misc_feature (1)..(238): NCBI GI NO: 18416645 NR Description: nitrogen fixation like protein
  misc_feature (1)..(238): NCBI GI NO: 21554503 NR Description: nitrogen fixation like protein
  misc_feature (13)..(238): NCBI GI NO: 7485833 NR Description: hypothetical protein F20B18
  misc_feature (14)..(237): NCBI GI NO: 18423084 NR Description: Expressed protein; protein id: At5g49940
  misc_feature (66)..(237): NCBI GI NO: 30698492 NR Description: NifU1 [Oryza sativa (japonica cultivar-group)]
  misc_feature (14)..(224): NCBI GI NO: 8777425 NR Description: gene_id:K9P8
  misc_feature (84)..(159): NCBI GI NO: 33862527 NR Description: NifU-like protein
  misc_feature (78)..(159): NCBI GI NO: 22298836 NR Description: ORF_ID:tsl1293~similar to NifU protein
  misc_feature (84)..(159): NCBI GI NO: 16332125 NR Description: NifU protein [Synechocystis sp. PCC 6803]
  misc_feature (84)..(159): NCBI GI NO: 33860975 NR Description: NifU-like protein
MGSVSGQTRIATMSLSLSSSEKSSNNRSSSLLNPKNAVSDSYGVSSKCSTFLRGQFQRIQLSYTRHTRPLPKRAGHVVSPSCVMPLTEENVERVLDEVRPALMADGGNVALHEIDGLVVVLKLQGACGSCPSSSMTLKMGIESRLRDKIPEIMSVEQFLEAETGGLELNEENIEKVLAELRPYLSGTGGGGLELVEIDGYIVKIRLTGPAAGVMTVRVALTQKLRENIPSIGAVQLLE

SEQ ID NO: 6784 - protein, 226 aa, Glycine max
  peptide (1)..(226): Ceres Seq. ID no. 12610393
  misc_feature (79)..(146): Pfam Name: Pfam Description:  NifU-like domain
  misc_feature (1)..(226): NCBI GI NO: 18416645 NR Description: nitrogen fixation like protein
  misc_feature (1)..(226): NCBI GI NO: 21554503 NR Description: nitrogen fixation like protein
  misc_feature (1)..(226): NCBI GI NO: 7485833 NR Description: hypothetical protein F20B18
  misc_feature (2)..(225): NCBI GI NO: 18423084 NR Description: Expressed protein; protein id: At5g49940
  misc_feature (54)..(225): NCBI GI NO: 30698492 NR Description: NifU1 [Oryza sativa (japonica cultivar-group)]
  misc_feature (2)..(212): NCBI GI NO: 8777425 NR Description: gene_id:K9P8
  misc_feature (72)..(147): NCBI GI NO: 33862527 NR Description: NifU-like protein
  misc_feature (66)..(147): NCBI GI NO: 22298836 NR Description: ORF_ID:tsl1293~similar to NifU protein
  misc_feature (72)..(147): NCBI GI NO: 16332125 NR Description: NifU protein [Synechocystis sp. PCC 6803]
  misc_feature (72)..(147): NCBI GI NO: 33860975 NR Description: NifU-like protein
MSLSLSSSEKSSNNRSSSLLNPKNAVSDSYGVSSKCSTFLRGQFQRIQLSYTRHTRPLPKRAGHVVSPSCVMPLTEENVERVLDEVRPALMADGGNVALHEIDGLVVVLKLQGACGSCPSSSMTLKMGIESRLRDKIPEIMSVEQFLEAETGGLELNEENIEKVLAELRPYLSGTGGGGLELVEIDGYIVKIRLTGPAAGVMTVRVALTQKLRENIPSIGAVQLLE

SEQ ID NO: 6785 - protein, 155 aa, Glycine max
  peptide (1)..(155): Ceres Seq. ID no. 12610394
  misc_feature (8)..(75): Pfam Name: Pfam Description:  NifU-like domain
  misc_feature (1)..(155): NCBI GI NO: 18416645 NR Description: nitrogen fixation like protein
  misc_feature (1)..(155): NCBI GI NO: 21554503 NR Description: nitrogen fixation like protein
  misc_feature (1)..(155): NCBI GI NO: 7485833 NR Description: hypothetical protein F20B18
  misc_feature (1)..(154): NCBI GI NO: 18423084 NR Description: Expressed protein; protein id: At5g49940
  misc_feature (1)..(154): NCBI GI NO: 30698492 NR Description: NifU1 [Oryza sativa (japonica cultivar-group)]
  misc_feature (1)..(141): NCBI GI NO: 8777425 NR Description: gene_id:K9P8
  misc_feature (1)..(76): NCBI GI NO: 33862527 NR Description: NifU-like protein
  misc_feature (1)..(76): NCBI GI NO: 22298836 NR Description: ORF_ID:tsl1293~similar to NifU protein
  misc_feature (1)..(76): NCBI GI NO: 16332125 NR Description: NifU protein [Synechocystis sp. PCC 6803]
  misc_feature (1)..(76): NCBI GI NO: 33860975 NR Description: NifU-like protein
MPLTEENVERVLDEVRPALMADGGNVALHEIDGLVVVLKLQGACGSCPSSSMTLKMGIESRLRDKIPEIMSVEQFLEAETGGLELNEENIEKVLAELRPYLSGTGGGGLELVEIDGYIVKIRLTGPAAGVMTVRVALTQKLRENIPSIGAVQLLE

SEQ ID NO: 6786 - DNA, 777 bp, Glycine max
  misc_feature (1)..(777): Ceres Seq. ID no. 12612272
actacaaacagcctggtagcatatctgtctcgtggggcatcgtgtcaaccagacaccaccgtgcgtgtcagccatgtcgctcatgccttggttcggcggtggccggggagggatggaccccttctcctccgacctctgggaccccttcggctctccttggcccttggaccgcagccgccgcgaaggcggcagccgggacgacgcaaccgccatggctcgcaccaacgtcgactggcatgagaacgacaaagagcacattttctccgcagagatccccggggtgaggaaggaggacgtgaaggtggaggtggaggacggcaacgtgctcaagatcagcggggagaagacgcgggaggaggagcacaagggcgacgcctggaaccgcgtggagcgcagcttcgggtccttcatgcgccggttccgcctgccggagaacgccaaggcggacagcatccggtgcaccatgctggacggcgtgctcagggtcgtcgttcccaaggacgaggaggcacagaagcagcgcaacgtccgctccatcgacatagcataaaggctaaaagcaccgcgccgtgacaatgccatctcctcttttattagcgtgtactcgtggtagtaatctgtatcgtgtgttctactttagcagtaatgctaggttattctgtacggtagtttagaagtgtgctttatgcgccatatagctgctacggcatatggcacttttaatcgtgttgagtccaagaatttactactagtggacgagcatccatcgtaaactgc

SEQ ID NO: 6787 - protein, 158 aa, Glycine max
  peptide (1)..(158): Ceres Seq. ID no. 12612273
  misc_feature (1)..(158): NCBI GI NO: 15238509 NR Description: heat shock protein 18; protein id: At5g59720
  misc_feature (1)..(158): NCBI GI NO: 21618106 NR Description: heat shock protein 18 [Arabidopsis thaliana]
  misc_feature (1)..(157): NCBI GI NO: 462322 NR Description: 18.3 KD CLASS I HEAT SHOCK PROTEIN (HSP 18.3)
  misc_feature (1)..(158): NCBI GI NO: 3819743 NR Description: cytosolic class I small heat-shock protein HSP17.5
  misc_feature (1)..(158): NCBI GI NO: 71495 NR Description: heat shock protein (clone DChsp17.7) - carrot
  misc_feature (1)..(158): NCBI GI NO: 4456758 NR Description: heat shock protein 17.4 [Quercus suber]
  misc_feature (1)..(158): NCBI GI NO: 123556 NR Description: 18.2 KD CLASS I HEAT SHOCK PROTEIN
  misc_feature (1)..(158): NCBI GI NO: 2911276 NR Description: LMW heat shock protein [Fragaria x ananassa]
  misc_feature (1)..(158): NCBI GI NO: 7441319 NR Description: heat-shock protein 17
  misc_feature (1)..(158): NCBI GI NO: 15294150 NR Description: AT3g46230/F12M12_200 [Arabidopsis thaliana]
MSLMPWFGGGRGGMDPFSSDLWDPFGSPWPLDRSRREGGSRDDATAMARTNVDWHENDKEHIFSAEIPGVRKEDVKVEVEDGNVLKISGEKTREEEHKGDAWNRVERSFGSFMRRFRLPENAKADSIRCTMLDGVLRVVVPKDEEAQKQRNVRSIDIA

SEQ ID NO: 6788 - protein, 155 aa, Glycine max
  peptide (1)..(155): Ceres Seq. ID no. 12612274
  misc_feature (1)..(155): NCBI GI NO: 15238509 NR Description: heat shock protein 18; protein id: At5g59720
  misc_feature (1)..(155): NCBI GI NO: 21618106 NR Description: heat shock protein 18 [Arabidopsis thaliana]
  misc_feature (1)..(154): NCBI GI NO: 462322 NR Description: 18.3 KD CLASS I HEAT SHOCK PROTEIN (HSP 18.3)
  misc_feature (1)..(155): NCBI GI NO: 3819743 NR Description: cytosolic class I small heat-shock protein HSP17.5
  misc_feature (1)..(155): NCBI GI NO: 71495 NR Description: heat shock protein (clone DChsp17.7) - carrot
  misc_feature (1)..(155): NCBI GI NO: 4456758 NR Description: heat shock protein 17.4 [Quercus suber]
  misc_feature (1)..(155): NCBI GI NO: 123556 NR Description: 18.2 KD CLASS I HEAT SHOCK PROTEIN
  misc_feature (1)..(155): NCBI GI NO: 2911276 NR Description: LMW heat shock protein [Fragaria x ananassa]
  misc_feature (1)..(155): NCBI GI NO: 7441319 NR Description: heat-shock protein 17
  misc_feature (1)..(155): NCBI GI NO: 15294150 NR Description: AT3g46230/F12M12_200 [Arabidopsis thaliana]
MPWFGGGRGGMDPFSSDLWDPFGSPWPLDRSRREGGSRDDATAMARTNVDWHENDKEHIFSAEIPGVRKEDVKVEVEDGNVLKISGEKTREEEHKGDAWNRVERSFGSFMRRFRLPENAKADSIRCTMLDGVLRVVVPKDEEAQKQRNVRSIDIA

SEQ ID NO: 6789 - protein, 145 aa, Glycine max
  peptide (1)..(145): Ceres Seq. ID no. 12612275
  misc_feature (1)..(145): NCBI GI NO: 15238509 NR Description: heat shock protein 18; protein id: At5g59720
  misc_feature (1)..(145): NCBI GI NO: 21618106 NR Description: heat shock protein 18 [Arabidopsis thaliana]
  misc_feature (1)..(144): NCBI GI NO: 462322 NR Description: 18.3 KD CLASS I HEAT SHOCK PROTEIN (HSP 18.3)
  misc_feature (1)..(145): NCBI GI NO: 3819743 NR Description: cytosolic class I small heat-shock protein HSP17.5
  misc_feature (1)..(145): NCBI GI NO: 71495 NR Description: heat shock protein (clone DChsp17.7) - carrot
  misc_feature (1)..(145): NCBI GI NO: 4456758 NR Description: heat shock protein 17.4 [Quercus suber]
  misc_feature (1)..(145): NCBI GI NO: 123556 NR Description: 18.2 KD CLASS I HEAT SHOCK PROTEIN
  misc_feature (1)..(145): NCBI GI NO: 2911276 NR Description: LMW heat shock protein [Fragaria x ananassa]
  misc_feature (1)..(145): NCBI GI NO: 7441319 NR Description: heat-shock protein 17
  misc_feature (1)..(145): NCBI GI NO: 15294150 NR Description: AT3g46230/F12M12_200 [Arabidopsis thaliana]
MDPFSSDLWDPFGSPWPLDRSRREGGSRDDATAMARTNVDWHENDKEHIFSAEIPGVRKEDVKVEVEDGNVLKISGEKTREEEHKGDAWNRVERSFGSFMRRFRLPENAKADSIRCTMLDGVLRVVVPKDEEAQKQRNVRSIDIA

SEQ ID NO: 6790 - DNA, 708 bp, Glycine max
  misc_feature (1)..(708): Ceres Seq. ID no. 13582188
atttttcgaaaaatggcctgaaaaataataattaaattgagaccattccaataagtgttaattaactgggagaaccaacccgcaaggctgccgaagatcttacggaaccttggatgcgtttgcttgtgttgtgtgattccgggaataaatgatccgattcatattgttgcagaacagacaaggcaagactcgtcttgcaaagtactatgttcctctcgaggagtccgagaaacacaaggttgaatacgaggttcatagattggtggtcaatcgcgactcgaagttcaccaatttcgtcgagtttagaacgcataaggttatataccggagatatgcagggttgtttttctcattgtgcgttgacataacagacaatgagttggcttaccttgaatgcatccacttgttcgttgagattttggaccatttcttcagcaatgtctgtgagcttgatttggttttcaacttccacaaggtgtacttaatactggatgaattcattcttgctggagagcttcaagaaacaagcaagcgggcgatcattgagaggatgtcagaactggagaagctcgagtaatgaggttgggatattatatgatagtcaagaatgaaaatgagcagtatgagtcttcctttttgctcctctctgttatgttctgtctaccttaaacacacaccttttcattttgatttattaaaactctaatg

SEQ ID NO: 6791 - protein, 142 aa, Glycine max
  peptide (1)..(142): Ceres Seq. ID no. 13582189
  misc_feature (1)..(142): Pfam Name: Pfam Description:  Clathrin adaptor complex small chain
  misc_feature (1)..(142): NCBI GI NO: 17149110 NR Description: clathrin assembly protein AP17-like protein
  misc_feature (1)..(142): NCBI GI NO: 15220987 NR Description: clathrin coat assembly protein AP17 -related
  misc_feature (1)..(142): NCBI GI NO: 30983940 NR Description: clathrin coat assembly protein
  misc_feature (1)..(129): NCBI GI NO: 7489722 NR Description: clathrin coat assembly protein AP17 - maize
  misc_feature (40)..(142): NCBI GI NO: 19070753 NR Description: clathrin coat assembly protein [Oryza sativa]
  misc_feature (1)..(142): NCBI GI NO: 40746043 NR Description: conserved hypothetical protein
  misc_feature (11)..(109): NCBI GI NO: 25405904 NR Description: protein T2E6.6 [imported] - Arabidopsis thaliana
  misc_feature (1)..(142): NCBI GI NO: 34784526 NR Description: Unknown (protein for MGC:65827) [Danio rerio]
  misc_feature (1)..(140): NCBI GI NO: 19110255 NR Description: putative adaptor protein complex small chain subunit
  misc_feature (1)..(142): NCBI GI NO: 30584435 NR Description: Homo sapiens adaptor-related protein complex 2
MIRFILLQNRQGKTRLAKYYVPLEESEKHKVEYEVHRLVVNRDSKFTNFVEFRTHKVIYRRYAGLFFSLCVDITDNELAYLECIHLFVEILDHFFSNVCELDLVFNFHKVYLILDEFILAGELQETSKRAIIERMSELEKLE

SEQ ID NO: 6792 - DNA, 1310 bp, Glycine max
  misc_feature (1)..(1310): Ceres Seq. ID no. 13639177
atttcccttcatccgtcggcctttgagagtccacccgaccagccgccgcgccgcgcgcagcaggagcccctcgacggcggccgtcggcgctagggttcttcacgtccaccttcgtaccttagccttctcgctattctcgttccgtcctccggatacccaccctctcttgccgtgtttctgccgaggcagcggaatctcccccgatggaggcggccgccgtcgcttcctccggccccgggctgcgctgcgcgcttaaccccgccccgaaccagcataggaaaggcgcgcgcttgagcttaccggccaagagtcagcagcgctgcgccgtcacttgcgggcgcttgctgctccgccccaacgctcgcgtatgcacggcggcatcggcatcggcatcgacggtgatggatagcggggctggggactccggggtgaggaggaagaggctcgcggtgttcgtctcaggcgggggctcgaacttccggtcgatccacgaggccgttctgggtgggaaggtgaacggggatgttgttgcgctcgtcaccgataagccaggctgcggtggcgcggagtatgcaaggtgcaatggcatgcccgtggtcgtgtttcccaagtcgaaatcggcgccggagggggtctccacagatgaacttctgaatgttctgagggatctgaaggtagactttattctacttgctggttacttgaagctcatacctggtgagctagttaagtcatttcccagatccatgctgaatatacatccttcactgctcccggcatttggaggcaagggttattatggtttgaaagtgcataaagcagttattgcatctggagccagatactcaggaccaactgtgcactttgtggatgagcagttcgacacagggaaaaccttggcccaaagagttgtgccagtgttagccaatgatactccagagcaattggctgcaagggttcttcacgaggagcaccaagtttacgttgaggcagttgctgccttgtgtgaggatcgaattgtgtggcgagacgatggtgtcccacttatcagaagtcagacaaaccccaatgcgtatacctaattcgtgatctctgtcctgagatctcctgaaaactaatgaagtttgtagtgtccgcaccaagtgccagttttcgccacggcatgtagtcaacacacaccgtttgtctgattgagtgaaataacatgtctaataatctggtcccagaaacataatgtgtaccttgcactgtgtttaactcattgtatggcttggcttcgatgataatctgtgcctgaaataacatttctg

SEQ ID NO: 6793 - protein, 292 aa, Glycine max
  peptide (1)..(292): Ceres Seq. ID no. 13639178
  misc_feature (79)..(264): Pfam Name: Pfam Description:  Formyl transferase
  misc_feature (76)..(291): NCBI GI NO: 12644307 NR Description: Phosphoribosylglycinamide formyltransferase
  misc_feature (76)..(288): NCBI GI NO: 7433568 NR Description: phosphoribosylglycinamide formyltransferase (EC2
  misc_feature (63)..(291): NCBI GI NO: 37992753 NR Description: glycinamide ribonucleotide transformylase
  misc_feature (58)..(291): NCBI GI NO: 15221650 NR Description: phosphoribosylglycinamide formyltransferase
  misc_feature (56)..(291): NCBI GI NO: 32815066 NR Description: glycinamide ribonucleotide transformylase
  misc_feature (27)..(291): NCBI GI NO: 32815065 NR Description: glycinamide ribonucleotide transformylase
  misc_feature (56)..(270): NCBI GI NO: 480622 NR Description: phosphoribosylglycinamide formyltransferase (EC2
  misc_feature (56)..(291): NCBI GI NO: 12229915 NR Description: Phosphoribosylglycinamide formyltransferase
  misc_feature (77)..(269): NCBI GI NO: 21673158 NR Description: phosphoribosylglycinamide formyltransferase
  misc_feature (80)..(272): NCBI GI NO: 15894673 NR Description: Folate-dependent phosphoribosylglycinamideformyltransferase
MEAAAVASSGPGLRCALNPAPNQHRKGARLSLPAKSQQRCAVTCGRLLLRPNARVCTAASASASTVMDSGAGDSGVRRKRLAVFVSGGGSNFRSIHEAVLGGKVNGDVVALVTDKPGCGGAEYARCNGMPVVVFPKSKSAPEGVSTDELLNVLRDLKVDFILLAGYLKLIPGELVKSFPRSMLNIHPSLLPAFGGKGYYGLKVHKAVIASGARYSGPTVHFVDEQFDTGKTLAQRVVPVLANDTPEQLAARVLHEEHQVYVEAVAALCEDRIVWRDDGVPLIRSQTNPNAYT

SEQ ID NO: 6794 - protein, 226 aa, Glycine max
  peptide (1)..(226): Ceres Seq. ID no. 13639179
  misc_feature (13)..(198): Pfam Name: Pfam Description:  Formyl transferase
  misc_feature (10)..(225): NCBI GI NO: 12644307 NR Description: Phosphoribosylglycinamide formyltransferase
  misc_feature (10)..(222): NCBI GI NO: 7433568 NR Description: phosphoribosylglycinamide formyltransferase (EC2
  misc_feature (1)..(225): NCBI GI NO: 37992753 NR Description: glycinamide ribonucleotide transformylase
  misc_feature (1)..(225): NCBI GI NO: 15221650 NR Description: phosphoribosylglycinamide formyltransferase
  misc_feature (1)..(225): NCBI GI NO: 32815066 NR Description: glycinamide ribonucleotide transformylase
  misc_feature (1)..(225): NCBI GI NO: 32815065 NR Description: glycinamide ribonucleotide transformylase
  misc_feature (1)..(204): NCBI GI NO: 480622 NR Description: phosphoribosylglycinamide formyltransferase (EC2
  misc_feature (1)..(225): NCBI GI NO: 12229915 NR Description: Phosphoribosylglycinamide formyltransferase
  misc_feature (11)..(203): NCBI GI NO: 21673158 NR Description: phosphoribosylglycinamide formyltransferase
  misc_feature (14)..(206): NCBI GI NO: 15894673 NR Description: Folate-dependent phosphoribosylglycinamideformyltransferase
MDSGAGDSGVRRKRLAVFVSGGGSNFRSIHEAVLGGKVNGDVVALVTDKPGCGGAEYARCNGMPVVVFPKSKSAPEGVSTDELLNVLRDLKVDFILLAGYLKLIPGELVKSFPRSMLNIHPSLLPAFGGKGYYGLKVHKAVIASGARYSGPTVHFVDEQFDTGKTLAQRVVPVLANDTPEQLAARVLHEEHQVYVEAVAALCEDRIVWRDDGVPLIRSQTNPNAYT

SEQ ID NO: 6795 - protein, 164 aa, Glycine max
  peptide (1)..(164): Ceres Seq. ID no. 13639180
  misc_feature (1)..(136): Pfam Name: Pfam Description:  Formyl transferase
  misc_feature (1)..(163): NCBI GI NO: 12644307 NR Description: Phosphoribosylglycinamide formyltransferase
  misc_feature (1)..(160): NCBI GI NO: 7433568 NR Description: phosphoribosylglycinamide formyltransferase (EC2
  misc_feature (1)..(163): NCBI GI NO: 37992753 NR Description: glycinamide ribonucleotide transformylase
  misc_feature (1)..(163): NCBI GI NO: 15221650 NR Description: phosphoribosylglycinamide formyltransferase
  misc_feature (1)..(163): NCBI GI NO: 32815066 NR Description: glycinamide ribonucleotide transformylase
  misc_feature (1)..(163): NCBI GI NO: 32815065 NR Description: glycinamide ribonucleotide transformylase
  misc_feature (1)..(142): NCBI GI NO: 480622 NR Description: phosphoribosylglycinamide formyltransferase (EC2
  misc_feature (1)..(163): NCBI GI NO: 12229915 NR Description: Phosphoribosylglycinamide formyltransferase
  misc_feature (1)..(141): NCBI GI NO: 21673158 NR Description: phosphoribosylglycinamide formyltransferase
  misc_feature (1)..(144): NCBI GI NO: 15894673 NR Description: Folate-dependent phosphoribosylglycinamideformyltransferase
MPVVVFPKSKSAPEGVSTDELLNVLRDLKVDFILLAGYLKLIPGELVKSFPRSMLNIHPSLLPAFGGKGYYGLKVHKAVIASGARYSGPTVHFVDEQFDTGKTLAQRVVPVLANDTPEQLAARVLHEEHQVYVEAVAALCEDRIVWRDDGVPLIRSQTNPNAYT

SEQ ID NO: 6796 - DNA, 1021 bp, Glycine max
  misc_feature (1)..(1021): Ceres Seq. ID no. 15177112
gtgacagaaatgagcaacgaaatccggttcttcgagctaaacactggagctaatatcccttcactagggctgggaacttggctggctgatcctggtgttgttggtgatgttatagctcatgccgtcgaggttggttatcgccatattgattgtgctcaaatttacggcaatcaggaggagattggtttagcattaaagaagttatttgaagagggtgtagtcaagcgagaagatttatggatcacctctaaactctggtgtacagatcatgctccagaagatgtaccagaagctctggacagaacattgagagacttgcaacttgattatatagatttataccttattcactggccaattcgaatgaagaagggttcagtgggctttaaggctgaaaacattgtgccatcagacatacctaacacttggaaggcaatggaagctttgaataaaagtggcaaggctagagctataggtgtaagcaatttctcaactaagaagttgggagaattgcttgagtatgctcgtgttactcctgcggttaaccagtcagagtgtcatcctgcatggaggcaggacaagttgaaggccttttgcaaatctaagggtgtccacttctctggatattcacctttgggttcccctgcctggcttgaaggtgatttccttaaccatccagttataaatatgatcgcaaagaaattaggaaagactccagcacaggtagctcttcgatggggactgcaaatgggccatagtgtgcttcccaagagttctaatccagcaaggataaaggaaaactttgatatttttgactggtccattcctgaggacatgcttgataaattttttgagattcaacaggaaagattactcaaggctagcttcttccatgaaccaaatgggggttacttaccagaagacgaattgtgggatgggggtatatgaaaagtcggttgaatgattagttaaaaaagtggatggaataaaagaaacgcatcttctgtttggggtgttaggc

SEQ ID NO: 6797 - protein, 315 aa, Glycine max
  peptide (1)..(315): Ceres Seq. ID no. 15177113
  misc_feature (4)..(315): NCBI GI NO: 30687247 NR Description: aldo/keto reductase family [Arabidopsis thaliana]
  misc_feature (4)..(315): NCBI GI NO: 30687261 NR Description: aldo/keto reductase family [Arabidopsis thaliana]
  misc_feature (15)..(315): NCBI GI NO: 28393400 NR Description: putative aldo/keto reductase
  misc_feature (4)..(290): NCBI GI NO: 7431114 NR Description: aldehyde dehydrogenase homolog At2g37770 -Arabidopsis thaliana
  misc_feature (4)..(315): NCBI GI NO: 15232354 NR Description: aldo/keto reductase family [Arabidopsis thaliana]
  misc_feature (4)..(315): NCBI GI NO: 7431112 NR Description: abscisic acid activated protein - alfalfa
  misc_feature (4)..(288): NCBI GI NO: 25283479 NR Description: probable alcohol dehydrogenase
  misc_feature (4)..(315): NCBI GI NO: 13160397 NR Description: aldose reductase [Digitalis purpurea]
  misc_feature (4)..(315): NCBI GI NO: 13160399 NR Description: aldose reductase [Digitalis purpurea]
  misc_feature (2)..(312): NCBI GI NO: 30679355 NR Description: aldose reductase, putative [Arabidopsis thaliana]
VTEMSNEIRFFELNTGANIPSLGLGTWLADPGVVGDVIAHAVEVGYRHIDCAQIYGNQEEIGLALKKLFEEGVVKREDLWITSKLWCTDHAPEDVPEALDRTLRDLQLDYIDLYLIHWPIRMKKGSVGFKAENIVPSDIPNTWKAMEALNKSGKARAIGVSNFSTKKLGELLEYARVTPAVNQSECHPAWRQDKLKAFCKSKGVHFSGYSPLGSPAWLEGDFLNHPVINMIAKKLGKTPAQVALRWGLQMGHSVLPKSSNPARIKENFDIFDWSIPEDMLDKFFEIQQERLLKASFFHEPNGGYLPEDELWDGGI

SEQ ID NO: 6798 - protein, 312 aa, Glycine max
  peptide (1)..(312): Ceres Seq. ID no. 15177114
  misc_feature (1)..(312): NCBI GI NO: 30687247 NR Description: aldo/keto reductase family [Arabidopsis thaliana]
  misc_feature (1)..(312): NCBI GI NO: 30687261 NR Description: aldo/keto reductase family [Arabidopsis thaliana]
  misc_feature (12)..(312): NCBI GI NO: 28393400 NR Description: putative aldo/keto reductase
  misc_feature (1)..(287): NCBI GI NO: 7431114 NR Description: aldehyde dehydrogenase homolog At2g37770 -Arabidopsis thaliana
  misc_feature (1)..(312): NCBI GI NO: 15232354 NR Description: aldo/keto reductase family [Arabidopsis thaliana]
  misc_feature (1)..(312): NCBI GI NO: 7431112 NR Description: abscisic acid activated protein - alfalfa
  misc_feature (1)..(285): NCBI GI NO: 25283479 NR Description: probable alcohol dehydrogenase
  misc_feature (1)..(312): NCBI GI NO: 13160397 NR Description: aldose reductase [Digitalis purpurea]
  misc_feature (1)..(312): NCBI GI NO: 13160399 NR Description: aldose reductase [Digitalis purpurea]
  misc_feature (1)..(309): NCBI GI NO: 30679355 NR Description: aldose reductase, putative [Arabidopsis thaliana]
MSNEIRFFELNTGANIPSLGLGTWLADPGVVGDVIAHAVEVGYRHIDCAQIYGNQEEIGLALKKLFEEGVVKREDLWITSKLWCTDHAPEDVPEALDRTLRDLQLDYIDLYLIHWPIRMKKGSVGFKAENIVPSDIPNTWKAMEALNKSGKARAIGVSNFSTKKLGELLEYARVTPAVNQSECHPAWRQDKLKAFCKSKGVHFSGYSPLGSPAWLEGDFLNHPVINMIAKKLGKTPAQVALRWGLQMGHSVLPKSSNPARIKENFDIFDWSIPEDMLDKFFEIQQERLLKASFFHEPNGGYLPEDELWDGGI

SEQ ID NO: 6799 - protein, 194 aa, Glycine max
  peptide (1)..(194): Ceres Seq. ID no. 15177115
  misc_feature (1)..(194): NCBI GI NO: 30687247 NR Description: aldo/keto reductase family [Arabidopsis thaliana]
  misc_feature (1)..(194): NCBI GI NO: 30687261 NR Description: aldo/keto reductase family [Arabidopsis thaliana]
  misc_feature (1)..(194): NCBI GI NO: 28393400 NR Description: putative aldo/keto reductase
  misc_feature (1)..(169): NCBI GI NO: 7431114 NR Description: aldehyde dehydrogenase homolog At2g37770 -Arabidopsis thaliana
  misc_feature (1)..(194): NCBI GI NO: 15232354 NR Description: aldo/keto reductase family [Arabidopsis thaliana]
  misc_feature (1)..(194): NCBI GI NO: 7431112 NR Description: abscisic acid activated protein - alfalfa
  misc_feature (1)..(167): NCBI GI NO: 25283479 NR Description: probable alcohol dehydrogenase
  misc_feature (1)..(194): NCBI GI NO: 13160397 NR Description: aldose reductase [Digitalis purpurea]
  misc_feature (1)..(194): NCBI GI NO: 13160399 NR Description: aldose reductase [Digitalis purpurea]
  misc_feature (1)..(191): NCBI GI NO: 30679355 NR Description: aldose reductase, putative [Arabidopsis thaliana]
MKKGSVGFKAENIVPSDIPNTWKAMEALNKSGKARAIGVSNFSTKKLGELLEYARVTPAVNQSECHPAWRQDKLKAFCKSKGVHFSGYSPLGSPAWLEGDFLNHPVINMIAKKLGKTPAQVALRWGLQMGHSVLPKSSNPARIKENFDIFDWSIPEDMLDKFFEIQQERLLKASFFHEPNGGYLPEDELWDGGI

SEQ ID NO: 6800 - DNA, 1082 bp, Glycine max
  misc_feature (1)..(1082): Ceres Seq. ID no. 13639033
attgtgtggatgaggacagtgtagtgtagtgccattgagaagcattaatgatactagttagccatatccaagctccttgcgtaggagccatgttttcaaagtgttgttctctattgtctctacccaaattcatcactgttacaaacccaccaacgttttccaaccctgtacctaatttcatcactagaagaataagctccacaagaccctttcatctcacactcgccaaagcagagggaaacctcgattcagattcaccctcaacctccacttcttctccttctccttctccttttgccactgaccaaacggttttcgtgactggcaaggatgttccattggagggtgtcatccagttcgagaaaccagcctcttctcctccttttgaaaaatgggggcgtgtggctctgctagctggtgcggatgtgttggccttgtttgtgttttcgacaattggaagatatagtcatggactttctgttttggaccttgagacaccgcgcactgctgacccttttattgcggggtggtttttgggtgcttacttccttggaggttttggggaggatggccgcgggatgaacggtctctcgaagggtgtcgttgctactgcgaagtcatgggctgttgggatccctataggaatagtaataaaggcagcaacatcgggtcatctaccgaattatggttttgtatttgtgagtctgggaagcactgctgttttacttgttacattcagagcattattatatactattcttccagttgacaatagtaagaagagcgatgactatcgccgcggcagtccctttgaactctttgagctgctaacatcattagtacggcggtggtagcaatggtttgcatgttcaaggcaccataatgtgtatgcatctaaacatcagtttccatcgctagtctccttgtactatctgctcgtatgaaaaaagtaagagtagatgtttactgcagttgaattttattcaactaaatgtgtatactattattacacctttgatcaatcaaaagtgcattaactaccaaaaaaaaaaaaaaaaaatcaagattcgcacgagaccatt

SEQ ID NO: 6801 - protein, 268 aa, Glycine max
  peptide (1)..(268): Ceres Seq. ID no. 13639034
  misc_feature (23)..(268): NCBI GI NO: 18401414 NR Description: expressed protein [Arabidopsis thaliana]
  misc_feature (23)..(266): NCBI GI NO: 25405875 NR Description: protein F27F5.3 [imported] - Arabidopsis thaliana
  misc_feature (39)..(268): NCBI GI NO: 28273393 NR Description: unknown protein
  misc_feature (116)..(231): NCBI GI NO: 22970530 NR Description: hypothetical protein [Chloroflexus aurantiacus]
MILVSHIQAPCVGAMFSKCCSLLSLPKFITVTNPPTFSNPVPNFITRRISSTRPFHLTLAKAEGNLDSDSPSTSTSSPSPSPFATDQTVFVTGKDVPLEGVIQFEKPASSPPFEKWGRVALLAGADVLALFVFSTIGRYSHGLSVLDLETPRTADPFIAGWFLGAYFLGGFGEDGRGMNGLSKGVVATAKSWAVGIPIGIVIKAATSGHLPNYGFVFVSLGSTAVLLVTFRALLYTILPVDNSKKSDDYRRGSPFELFELLTSLVRRW

SEQ ID NO: 6802 - protein, 254 aa, Glycine max
  peptide (1)..(254): Ceres Seq. ID no. 13639035
  misc_feature (9)..(254): NCBI GI NO: 18401414 NR Description: expressed protein [Arabidopsis thaliana]
  misc_feature (9)..(252): NCBI GI NO: 25405875 NR Description: protein F27F5.3 [imported] - Arabidopsis thaliana
  misc_feature (25)..(254): NCBI GI NO: 28273393 NR Description: unknown protein
  misc_feature (102)..(217): NCBI GI NO: 22970530 NR Description: hypothetical protein [Chloroflexus aurantiacus]
MFSKCCSLLSLPKFITVTNPPTFSNPVPNFITRRISSTRPFHLTLAKAEGNLDSDSPSTSTSSPSPSPFATDQTVFVTGKDVPLEGVIQFEKPASSPPFEKWGRVALLAGADVLALFVFSTIGRYSHGLSVLDLETPRTADPFIAGWFLGAYFLGGFGEDGRGMNGLSKGVVATAKSWAVGIPIGIVIKAATSGHLPNYGFVFVSLGSTAVLLVTFRALLYTILPVDNSKKSDDYRRGSPFELFELLTSLVRRW

SEQ ID NO: 6803 - DNA, 746 bp, Glycine max
  misc_feature (1)..(746): Ceres Seq. ID no. 12610958
aaaagtcaaaacactctagtcagcaatgtggagcgtcaccggagctttgtgcgtggcggtgcctaccgccgccgcattccgtccaaaaccctttctcgtctcctctaaccttctccccaaccagacgaagaagctccatctctctcctcggcagcctccggctctatcatcacatttctcctcgtcttctttcaaaaccgccgctacttccgttcaacaacagtcagatgataaaaagggggagaagggcactaagtactacttccttgttgcaaacgctaagttcatgctcgacgaggaggagcactttcaggagcaactgtttgaacgtcttagatactacggagagcgtgacaaggaacaagacttctggctcgtcattgagcctaggttcctcgacaagttccccaacatcactcagagactccgtcgccctgctgttgctcttgtttccaccaatggcccctggatcacgtttatgaagttgagattggatcgagttctagctgaatcatttgaagcttcatctctggatgaagccttggcctctagtcctacaactctagagttcgaccagcctggaaactgggtggctccgtacccaaagtatgaacctggatggtgggacaccttcttgcccaaagcaaaacaagaatctctagcatagaactttgtccacctttgtcttagtgctttgtagtttgtattactgagcttcttgtgttatccaaatatgattgcaaccc

SEQ ID NO: 6804 - protein, 213 aa, Glycine max
  peptide (1)..(213): Ceres Seq. ID no. 12610959
  misc_feature (1)..(211): NCBI GI NO: 15237144 NR Description: similar to unknown protein
  misc_feature (78)..(178): NCBI GI NO: 23042740 NR Description: hypothetical protein
  misc_feature (67)..(178): NCBI GI NO: 23129763 NR Description: hypothetical protein [Nostoc punctiforme]
  misc_feature (78)..(178): NCBI GI NO: 17227712 NR Description: hypothetical protein [Nostoc sp. PCC 7120]
  misc_feature (78)..(175): NCBI GI NO: 16329384 NR Description: hypothetical protein [Synechocystis sp. PCC 6803]
  misc_feature (76)..(176): NCBI GI NO: 33865445 NR Description: conserved hypothetical protein
  misc_feature (78)..(175): NCBI GI NO: 22299042 NR Description: ORF_ID:tll1499~hypothetical protein
  misc_feature (76)..(167): NCBI GI NO: 11465670 NR Description: ORF108 [Porphyra purpurea]
  misc_feature (76)..(165): NCBI GI NO: 33861662 NR Description: conserved hypothetical protein
  misc_feature (78)..(168): NCBI GI NO: 37520451 NR Description: hypothetical protein [Gloeobacter violaceus]
MWSVTGALCVAVPTAAAFRPKPFLVSSNLLPNQTKKLHLSPRQPPALSSHFSSSSFKTAATSVQQQSDDKKGEKGTKYYFLVANAKFMLDEEEHFQEQLFERLRYYGERDKEQDFWLVIEPRFLDKFPNITQRLRRPAVALVSTNGPWITFMKLRLDRVLAESFEASSLDEALASSPTTLEFDQPGNWVAPYPKYEPGWWDTFLPKAKQESLA

SEQ ID NO: 6805 - protein, 159 aa, Glycine max
  peptide (1)..(159): Ceres Seq. ID no. 12610960
KSKHSSQQCGASPELCAWRCLPPPHSVQNPFSSPLTFSPTRRRSSISLLGSLRLYHHISPRLLSKPPLLPFNNSQMIKRGRRALSTTSLLQTLSSCSTRRSTFRSNCLNVLDTTESVTRNKTSGSSLSLGSSTSSPTSLRDSVALLLLLFPPMAPGSRL

SEQ ID NO: 6806 - protein, 126 aa, Glycine max
  peptide (1)..(126): Ceres Seq. ID no. 12610961
  misc_feature (1)..(124): NCBI GI NO: 15237144 NR Description: similar to unknown protein
  misc_feature (1)..(91): NCBI GI NO: 23042740 NR Description: hypothetical protein
  misc_feature (1)..(91): NCBI GI NO: 23129763 NR Description: hypothetical protein [Nostoc punctiforme]
  misc_feature (1)..(91): NCBI GI NO: 17227712 NR Description: hypothetical protein [Nostoc sp. PCC 7120]
  misc_feature (1)..(88): NCBI GI NO: 16329384 NR Description: hypothetical protein [Synechocystis sp. PCC 6803]
  misc_feature (1)..(89): NCBI GI NO: 33865445 NR Description: conserved hypothetical protein
  misc_feature (1)..(88): NCBI GI NO: 22299042 NR Description: ORF_ID:tll1499~hypothetical protein
  misc_feature (1)..(80): NCBI GI NO: 11465670 NR Description: ORF108 [Porphyra purpurea]
  misc_feature (1)..(78): NCBI GI NO: 33861662 NR Description: conserved hypothetical protein
  misc_feature (1)..(81): NCBI GI NO: 37520451 NR Description: hypothetical protein [Gloeobacter violaceus]
MLDEEEHFQEQLFERLRYYGERDKEQDFWLVIEPRFLDKFPNITQRLRRPAVALVSTNGPWITFMKLRLDRVLAESFEASSLDEALASSPTTLEFDQPGNWVAPYPKYEPGWWDTFLPKAKQESLA

SEQ ID NO: 6807 - DNA, 711 bp, Glycine max
  misc_feature (1)..(711): Ceres Seq. ID no. 12611129
acgagaaacaggagagattttttgcagatctcaacaacatttgtaggtgacgatggcgcttcgtgctactcaatcgactgctcgcatggcggcgaatctccgacgcgtggctcggcctttctcaacagacgcggtggtggagtcggattacaagcgtggcgagatcggcaaggtctccggaatcccagaggagcatctcgcacgaaaggtgataatatactcgcctgcaagaacagcgacccagcaaggatctgggaaacttgggaaatggaagattaacttcgtctccaccctcaagtgggaaaatccattgatgggctggacttctactggtgacccttatgccaatgttggggactccgctcttggttttgattctgagctagctgccaagtcctttgctgagcgtcatggctgggactatgtggtcaaggagcccaaaacaccgttattgaaggccaagtcatactcggacaacttcaagtggaaaggcaaacctcaactagagaactgatctccttcttcttcttcttccatttctcgaacaaaaggagaagcccccacttgatataaagaaaggctctcattttttattcgctatttaccatctgtgagctttttttctgaactattatccatggttggattctcttttttttttttaattccttataacaataatatgatgatgatgatgacaaacagttcttt

SEQ ID NO: 6808 - protein, 153 aa, Glycine max
  peptide (1)..(153): Ceres Seq. ID no. 12611130
  misc_feature (51)..(153): Pfam Name: Pfam Description:  ETC complex I subunit conserved region
  misc_feature (1)..(153): NCBI GI NO: 21555571 NR Description: unknown [Arabidopsis thaliana]
  misc_feature (1)..(153): NCBI GI NO: 15240784 NR Description: putative protein; protein id: At5g67590
  misc_feature (18)..(135): NCBI GI NO: 34901114 NR Description: NADH-ubiquinone oxidoreductase 18 kDa subunit
  misc_feature (8)..(151): NCBI GI NO: 28461229 NR Description: NADH dehydrogenase
  misc_feature (9)..(151): NCBI GI NO: 4505369 NR Description: NADH dehydrogenase
  misc_feature (18)..(151): NCBI GI NO: 13528960 NR Description: NADH dehydrogenase
  misc_feature (37)..(151): NCBI GI NO: 19110803 NR Description: NADH dehydrogenase [Gallus gallus]
  misc_feature (37)..(151): NCBI GI NO: 6754814 NR Description: NADH dehydrogenase
  misc_feature (37)..(151): NCBI GI NO: 14919381 NR Description: Similar to NADH dehydrogenase
  misc_feature (37)..(153): NCBI GI NO: 34334026 NR Description: NADH:ubiquinone oxidoreductase 18 kD-like subunit
MALRATQSTARMAANLRRVARPFSTDAVVESDYKRGEIGKVSGIPEEHLARKVIIYSPARTATQQGSGKLGKWKINFVSTLKWENPLMGWTSTGDPYANVGDSALGFDSELAAKSFAERHGWDYVVKEPKTPLLKAKSYSDNFKWKGKPQLEN

SEQ ID NO: 6809 - protein, 142 aa, Glycine max
  peptide (1)..(142): Ceres Seq. ID no. 12611131
  misc_feature (40)..(142): Pfam Name: Pfam Description:  ETC complex I subunit conserved region
  misc_feature (1)..(142): NCBI GI NO: 21555571 NR Description: unknown [Arabidopsis thaliana]
  misc_feature (1)..(142): NCBI GI NO: 15240784 NR Description: putative protein; protein id: At5g67590
  misc_feature (7)..(124): NCBI GI NO: 34901114 NR Description: NADH-ubiquinone oxidoreductase 18 kDa subunit
  misc_feature (1)..(140): NCBI GI NO: 28461229 NR Description: NADH dehydrogenase
  misc_feature (1)..(140): NCBI GI NO: 4505369 NR Description: NADH dehydrogenase
  misc_feature (7)..(140): NCBI GI NO: 13528960 NR Description: NADH dehydrogenase
  misc_feature (26)..(140): NCBI GI NO: 19110803 NR Description: NADH dehydrogenase [Gallus gallus]
  misc_feature (26)..(140): NCBI GI NO: 6754814 NR Description: NADH dehydrogenase
  misc_feature (26)..(140): NCBI GI NO: 14919381 NR Description: Similar to NADH dehydrogenase
  misc_feature (26)..(142): NCBI GI NO: 34334026 NR Description: NADH:ubiquinone oxidoreductase 18 kD-like subunit
MAANLRRVARPFSTDAVVESDYKRGEIGKVSGIPEEHLARKVIIYSPARTATQQGSGKLGKWKINFVSTLKWENPLMGWTSTGDPYANVGDSALGFDSELAAKSFAERHGWDYVVKEPKTPLLKAKSYSDNFKWKGKPQLEN

SEQ ID NO: 6810 - protein, 92 aa, Glycine max
  peptide (1)..(92): Ceres Seq. ID no. 12611132
TRNRRDFLQISTTFVGDDGASCYSIDCSHGGESPTRGSAFLNRRGGGVGLQAWRDRQGLRNPRGASRTKGDNILACKNSDPARIWETWEMED

SEQ ID NO: 6811 - DNA, 741 bp, Glycine max
  misc_feature (1)..(741): Ceres Seq. ID no. 13595072
acagaccagagcacaatcccctatgttagctccagttccttaaatagctccatcctccacacgtctcaaaccatctccacactcttcagttttcattgtttggagaacacacaatacacctcccaccttagcagcgcaatggcgaccaccaccatgtccctctcctcgaccttcgccggcaagtcggtgaagaacgtggcttcatcagctctctttggtgaggcccgtgtcactatgcgcaagaccgctgcaaaggccaagccggtttcatcaggcagcccatggtacggtgccgaccgtgtgctctacctcggcccgctttccggagagcccccgagctacttgaccggcgagttccccggcgactacggatgggacaccgccgggctctcggccgaccccgagacctttgccaagaaccgggagctcgaggtgatccactgccggtgggccatgctcggtgcgcttggatgtgtcttccccgagcttcttgcacgcaacggcgtcaagttcggcgaggcggtatggttcaaggccggttcccagatcttcagcgagggtggcctcgactacctgggcaaccccagcctcgtgcacgcacaaagcatccttgctatctgggcatgccaagtcgtgctcatgggcgctgttgaggggtaccgcattgctggcggcccactcggtgaggtagtcgacccactctacctgtttaaacacaataaagttggaacgggagggggg

SEQ ID NO: 6812 - protein, 247 aa, Glycine max
  peptide (1)..(247): Ceres Seq. ID no. 13595073
  misc_feature (110)..(235): Pfam Name: Pfam Description:  Chlorophyll A-B binding protein
  misc_feature (47)..(235): NCBI GI NO: 1657859 NR Description: chlorophyll a/b-binding protein WCAB precursor
  misc_feature (47)..(235): NCBI GI NO: 7443223 NR Description: chlorophyll a/b-binding protein type I precursor -barley
  misc_feature (47)..(235): NCBI GI NO: 115782 NR Description: Chlorophyll A-B binding protein
  misc_feature (47)..(235): NCBI GI NO: 115786 NR Description: Chlorophyll A-B binding protein
  misc_feature (47)..(235): NCBI GI NO: 115815 NR Description: Chlorophyll A-B binding protein M9
  misc_feature (47)..(235): NCBI GI NO: 115825 NR Description: Chlorophyll A-B binding protein 3C
  misc_feature (47)..(235): NCBI GI NO: 170404 NR Description: chlorophyll a/b-binding protein Cab-3C
  misc_feature (47)..(235): NCBI GI NO: 3036948 NR Description: light harvesting chlorophyll a/b-binding protein
  misc_feature (47)..(235): NCBI GI NO: 115781 NR Description: Chlorophyll A-B binding protein 16
  misc_feature (47)..(235): NCBI GI NO: 3036949 NR Description: light harvesting chlorophyll a/b-binding protein
TDQSTIPYVSSSSLNSSILHTSQTISTLFSFHCLENTQYTSHLSSAMATTTMSLSSTFAGKSVKNVASSALFGEARVTMRKTAAKAKPVSSGSPWYGADRVLYLGPLSGEPPSYLTGEFPGDYGWDTAGLSADPETFAKNRELEVIHCRWAMLGALGCVFPELLARNGVKFGEAVWFKAGSQIFSEGGLDYLGNPSLVHAQSILAIWACQVVLMGAVEGYRIAGGPLGEVVDPLYLFKHNKVGTGGG

SEQ ID NO: 6813 - protein, 201 aa, Glycine max
  peptide (1)..(201): Ceres Seq. ID no. 13595074
  misc_feature (64)..(189): Pfam Name: Pfam Description:  Chlorophyll A-B binding protein
  misc_feature (1)..(189): NCBI GI NO: 1657859 NR Description: chlorophyll a/b-binding protein WCAB precursor
  misc_feature (1)..(189): NCBI GI NO: 7443223 NR Description: chlorophyll a/b-binding protein type I precursor -barley
  misc_feature (1)..(189): NCBI GI NO: 115782 NR Description: Chlorophyll A-B binding protein
  misc_feature (1)..(189): NCBI GI NO: 115786 NR Description: Chlorophyll A-B binding protein
  misc_feature (1)..(189): NCBI GI NO: 115815 NR Description: Chlorophyll A-B binding protein M9
  misc_feature (1)..(189): NCBI GI NO: 115825 NR Description: Chlorophyll A-B binding protein 3C
  misc_feature (1)..(189): NCBI GI NO: 170404 NR Description: chlorophyll a/b-binding protein Cab-3C
  misc_feature (1)..(189): NCBI GI NO: 3036948 NR Description: light harvesting chlorophyll a/b-binding protein
  misc_feature (1)..(189): NCBI GI NO: 115781 NR Description: Chlorophyll A-B binding protein 16
  misc_feature (1)..(189): NCBI GI NO: 3036949 NR Description: light harvesting chlorophyll a/b-binding protein
MATTTMSLSSTFAGKSVKNVASSALFGEARVTMRKTAAKAKPVSSGSPWYGADRVLYLGPLSGEPPSYLTGEFPGDYGWDTAGLSADPETFAKNRELEVIHCRWAMLGALGCVFPELLARNGVKFGEAVWFKAGSQIFSEGGLDYLGNPSLVHAQSILAIWACQVVLMGAVEGYRIAGGPLGEVVDPLYLFKHNKVGTGGG

SEQ ID NO: 6814 - protein, 196 aa, Glycine max
  peptide (1)..(196): Ceres Seq. ID no. 13595075
  misc_feature (59)..(184): Pfam Name: Pfam Description:  Chlorophyll A-B binding protein
  misc_feature (1)..(184): NCBI GI NO: 1657859 NR Description: chlorophyll a/b-binding protein WCAB precursor
  misc_feature (1)..(184): NCBI GI NO: 7443223 NR Description: chlorophyll a/b-binding protein type I precursor -barley
  misc_feature (1)..(184): NCBI GI NO: 115782 NR Description: Chlorophyll A-B binding protein
  misc_feature (1)..(184): NCBI GI NO: 115786 NR Description: Chlorophyll A-B binding protein
  misc_feature (1)..(184): NCBI GI NO: 115815 NR Description: Chlorophyll A-B binding protein M9
  misc_feature (1)..(184): NCBI GI NO: 115825 NR Description: Chlorophyll A-B binding protein 3C
  misc_feature (1)..(184): NCBI GI NO: 170404 NR Description: chlorophyll a/b-binding protein Cab-3C
  misc_feature (1)..(184): NCBI GI NO: 3036948 NR Description: light harvesting chlorophyll a/b-binding protein
  misc_feature (1)..(184): NCBI GI NO: 115781 NR Description: Chlorophyll A-B binding protein 16
  misc_feature (1)..(184): NCBI GI NO: 3036949 NR Description: light harvesting chlorophyll a/b-binding protein
MSLSSTFAGKSVKNVASSALFGEARVTMRKTAAKAKPVSSGSPWYGADRVLYLGPLSGEPPSYLTGEFPGDYGWDTAGLSADPETFAKNRELEVIHCRWAMLGALGCVFPELLARNGVKFGEAVWFKAGSQIFSEGGLDYLGNPSLVHAQSILAIWACQVVLMGAVEGYRIAGGPLGEVVDPLYLFKHNKVGTGGG

SEQ ID NO: 6815 - DNA, 1310 bp, Glycine max
  misc_feature (1)..(1310): Ceres Seq. ID no. 13638980
gaaaaatcttctccctgcctctgcgtagctcttctcgcccccgcttgtctccgccgcgggcgcggccggcgctcggccgtccgcacacgacgcaacgccccgccccgccctccgctcccactgttcggtcggcccaagatcctcatccgaacttaagacaaaatgggctcaagagtttttgctttgttcatcactggcgttgtccttttgggcagtagaatcttggccttggaccacactgttgttgaaaagagattaaatgagaacacggtatcacttacaacaaagggaagtccacaactatgccaactttgtgagcagtttgccacagaaaccctcttctatttgaaggagaatgagacccggatcgaaattatagatactcttcaccaagcttgtttgaaatttcattcacttaagttagagtgtacaaagttggttgattattatgcagcactgttcttcgcacaaattgattctctaagccctgaagaattttgcgtatcagcaagtctttgtgaggaagttacatacattcgcctcccaggacatgaacatgcttgcaccctttgtcatgaggttgttgatgagattcgtactggtcttgaagaccctgagatggagctcaagataatcgagatacttctgaaaggatgcaacaacacagagagcttcgtacagaagtgcaagaagatgataatccaaaatgcaccactcatactagaagatatcaagaagtttctcgagaagagagatttctgcgattctatccgtgtctgtggaggcaaaattgctcgccctccaggaggaggtctgagaggcctgtctactgtgtgagctctttcttttcctgaacacgcatgacgattgcgtggcatttaatgaagaacacgggggctatctgacctcacgcggtgatgtttagaagaaagattggtggtgtaagtctacgaacgaaaagatcttccataatgctatttccgagcagtgtactccctccgtcccataattcttgtcttagatttgtctagatacggatgtacctaacactaaaacgtgacttgatacatccgtatttggacaaatctaagacaagaattttgagacggagggagcatatattatacagcattggcattgtacctgtggagaagtgtatatattatcacagtcatcaaatgaaatttctgtgatagttgttgctacatgatcgttcatggaacgtaagcaaaatgtatgcttaaagtgtagagcatatacgcgtgtaaacaaattatgaactatgtgcagtggacttttatttatgatgc

SEQ ID NO: 6816 - protein, 224 aa, Glycine max
  peptide (1)..(224): Ceres Seq. ID no. 13638981
  misc_feature (46)..(79): Pfam Name: Pfam Description:  Saposin-like type B, region 1
  misc_feature (34)..(206): NCBI GI NO: 34896130 NR Description: P0701D05.19
  misc_feature (6)..(206): NCBI GI NO: 15231028 NR Description: expressed protein [Arabidopsis thaliana]
  misc_feature (46)..(208): NCBI GI NO: 15241065 NR Description: expressed protein [Arabidopsis thaliana]
  misc_feature (50)..(207): NCBI GI NO: 6942199 NR Description: putative protein [Vitis riparia]
MGSRVFALFITGVVLLGSRILALDHTVVEKRLNENTVSLTTKGSPQLCQLCEQFATETLFYLKENETRIEIIDTLHQACLKFHSLKLECTKLVDYYAALFFAQIDSLSPEEFCVSASLCEEVTYIRLPGHEHACTLCHEVVDEIRTGLEDPEMELKIIEILLKGCNNTESFVQKCKKMIIQNAPLILEDIKKFLEKRDFCDSIRVCGGKIARPPGGGLRGLSTV

SEQ ID NO: 6817 - DNA, 946 bp, Glycine max
  misc_feature (1)..(946): Ceres Seq. ID no. 12610412
aacattcctaagaagattacacagagagatcagtttttgagcattctctcatctctcaaagccaaagctctctccctctctctctgtctctgcttgtgtagccatggctaactcgataatggcttcctccaaaccactcatctccctctcctcctccactcaaccaacccgcgtcaacctccccaaatccatcaaactcccccagatccccaaacccatctcctcctcctcctcctcctcctccctcagcagcaaggctctgtctttctcctccgccaccgtcaagtctctagctttaatcgccgccctcgctcccccttccatggccgaagctatggagaaggcccagctcttcgacttcaacctgacgctcccgatcatcgtcgtggagtttctcttcctcatgttcgcgctcgacaaagtctactactctccccttgggaactttatggataagagagacggtgagatcaaggagaagctcgcgagcgtgaaggatacttccactgaggtgaaggcgctcgatgaacaagctgccgctgtgatgagggcggctagggctgagatcgccgccgcgcttaacaagatgaagaaggagacggaggtggaagtggagcagcagctggcggtagggaggaagaaggtggaggcggagctgcaggaagctttggcgagcttggagaagcagaaggaggagaccattaaggctttggattctcagatcgctgctcttagtgaagacattgtcaagaaggttcttccttcttaaaaacaaactcttgtgtgttctgtcttttctcaatctcaatttatatgaaattactgtaaatctctcttcttttctctctatgtctttgtctgatcgttggatgaatcaacaacaattttatatgtaagtttttataaatgattagctctcttttcttatttagtttgataaagattg

SEQ ID NO: 6818 - protein, 221 aa, Glycine max
  peptide (1)..(221): Ceres Seq. ID no. 12610413
  misc_feature (2)..(221): NCBI GI NO: 15236722 NR Description: H+-transporting ATP synthase chain 9 - likeprotein
  misc_feature (2)..(221): NCBI GI NO: 14596171 NR Description: H+-transporting ATP synthase-like protein
  misc_feature (1)..(220): NCBI GI NO: 461595 NR Description: ATP synthase B' chain, chloroplast precursor
  misc_feature (1)..(220): NCBI GI NO: 448445 NR Description: CF0 ATP synthase:SUBUNIT=9
  misc_feature (60)..(221): NCBI GI NO: 29367413 NR Description: H+-transporting ATP synthase chain 9-like protein
  misc_feature (14)..(149): NCBI GI NO: 31980477 NR Description: hypothetical protein [Drosera tokaiensis]
  misc_feature (62)..(220): NCBI GI NO: 5902610 NR Description: CFO ATP synthase subunit II precursor
  misc_feature (14)..(149): NCBI GI NO: 31980479 NR Description: hypothetical protein [Drosera tokaiensis]
  misc_feature (73)..(219): NCBI GI NO: 23043220 NR Description: hypothetical protein
  misc_feature (75)..(219): NCBI GI NO: 114697 NR Description: ATP synthase B' chain (Subunit II)
MANSIMASSKPLISLSSSTQPTRVNLPKSIKLPQIPKPISSSSSSSSLSSKALSFSSATVKSLALIAALAPPSMAEAMEKAQLFDFNLTLPIIVVEFLFLMFALDKVYYSPLGNFMDKRDGEIKEKLASVKDTSTEVKALDEQAAAVMRAARAEIAAALNKMKKETEVEVEQQLAVGRKKVEAELQEALASLEKQKEETIKALDSQIAALSEDIVKKVLPS

SEQ ID NO: 6819 - protein, 216 aa, Glycine max
  peptide (1)..(216): Ceres Seq. ID no. 12610414
  misc_feature (1)..(216): NCBI GI NO: 15236722 NR Description: H+-transporting ATP synthase chain 9 - likeprotein
  misc_feature (1)..(216): NCBI GI NO: 14596171 NR Description: H+-transporting ATP synthase-like protein
  misc_feature (1)..(215): NCBI GI NO: 461595 NR Description: ATP synthase B' chain, chloroplast precursor
  misc_feature (1)..(215): NCBI GI NO: 448445 NR Description: CF0 ATP synthase:SUBUNIT=9
  misc_feature (55)..(216): NCBI GI NO: 29367413 NR Description: H+-transporting ATP synthase chain 9-like protein
  misc_feature (9)..(144): NCBI GI NO: 31980477 NR Description: hypothetical protein [Drosera tokaiensis]
  misc_feature (57)..(215): NCBI GI NO: 5902610 NR Description: CFO ATP synthase subunit II precursor
  misc_feature (9)..(144): NCBI GI NO: 31980479 NR Description: hypothetical protein [Drosera tokaiensis]
  misc_feature (68)..(214): NCBI GI NO: 23043220 NR Description: hypothetical protein
  misc_feature (70)..(214): NCBI GI NO: 114697 NR Description: ATP synthase B' chain (Subunit II)
MASSKPLISLSSSTQPTRVNLPKSIKLPQIPKPISSSSSSSSLSSKALSFSSATVKSLALIAALAPPSMAEAMEKAQLFDFNLTLPIIVVEFLFLMFALDKVYYSPLGNFMDKRDGEIKEKLASVKDTSTEVKALDEQAAAVMRAARAEIAAALNKMKKETEVEVEQQLAVGRKKVEAELQEALASLEKQKEETIKALDSQIAALSEDIVKKVLPS

SEQ ID NO: 6820 - protein, 148 aa, Glycine max
  peptide (1)..(148): Ceres Seq. ID no. 12610415
  misc_feature (1)..(148): NCBI GI NO: 15236722 NR Description: H+-transporting ATP synthase chain 9 - likeprotein
  misc_feature (1)..(148): NCBI GI NO: 14596171 NR Description: H+-transporting ATP synthase-like protein
  misc_feature (1)..(147): NCBI GI NO: 461595 NR Description: ATP synthase B' chain, chloroplast precursor
  misc_feature (1)..(147): NCBI GI NO: 448445 NR Description: CF0 ATP synthase:SUBUNIT=9
  misc_feature (1)..(148): NCBI GI NO: 29367413 NR Description: H+-transporting ATP synthase chain 9-like protein
  misc_feature (1)..(76): NCBI GI NO: 31980477 NR Description: hypothetical protein [Drosera tokaiensis]
  misc_feature (1)..(147): NCBI GI NO: 5902610 NR Description: CFO ATP synthase subunit II precursor
  misc_feature (1)..(76): NCBI GI NO: 31980479 NR Description: hypothetical protein [Drosera tokaiensis]
  misc_feature (1)..(146): NCBI GI NO: 23043220 NR Description: hypothetical protein
  misc_feature (2)..(146): NCBI GI NO: 114697 NR Description: ATP synthase B' chain (Subunit II)
MAEAMEKAQLFDFNLTLPIIVVEFLFLMFALDKVYYSPLGNFMDKRDGEIKEKLASVKDTSTEVKALDEQAAAVMRAARAEIAAALNKMKKETEVEVEQQLAVGRKKVEAELQEALASLEKQKEETIKALDSQIAALSEDIVKKVLPS

SEQ ID NO: 6821 - DNA, 738 bp, Glycine max
  misc_feature (1)..(738): Ceres Seq. ID no. 12610964
acaagacaagcgtcgattgccccccatccgtggctgcgcgtccgccggtggccgggggttctaatccgagcgattcccaatcccaaccgccgctggaagaccccgcagctccacgacagcgcgggcagaggcagacatggcgcccgtgctacctgcaccggcggcggcggcggcggcggctcctcctcccttctgccgtgtctctctcccggcccgcagcgctttcccctcctccttccccgtcagaagccttggcaggtttgcagccaggagcagcggcggcggcggccgtcccgagcccaaagcaggtgatgaagagagcaaggccgtcctcgacgccttcttcctcgggaaggccttggcggaggctctgacggagagggccgagtcggtggtgggcgaggtgttcagcgtcgtcgggcagtggcaggcggagcagcagaagcaggtccaggaatttcaggaggaggtagttcagagagcccaaaaggctaaggaaagagctgctgaggaggtcgttgatgataagggaccaaagactctaaagggatcttcaacaaccattgtgacgcctgcacctacaccccctccttctcctactattcccacacaggcagaatagttataagcgacgatgaagagttagtgctgcatgtagactcacttttgtgctccaagaaagttacgaaattctcctttgagatatttattgatcaagttgtcctttctttgatagtg

SEQ ID NO: 6822 - protein, 161 aa, Glycine max
  peptide (1)..(161): Ceres Seq. ID no. 12610965
  misc_feature (57)..(148): NCBI GI NO: 15235625 NR Description: putative protein; protein id: At4g13200
  misc_feature (57)..(148): NCBI GI NO: 21553912 NR Description: unknown [Arabidopsis thaliana]
  misc_feature (62)..(135): NCBI GI NO: 17232006 NR Description: hypothetical protein [Nostoc sp. PCC 7120]
  misc_feature (62)..(123): NCBI GI NO: 23130619 NR Description: hypothetical protein [Nostoc punctiforme]
MAPVLPAPAAAAAAAPPPFCRVSLPARSAFPSSFPVRSLGRFAARSSGGGGRPEPKAGDEESKAVLDAFFLGKALAEALTERAESVVGEVFSVVGQWQAEQQKQVQEFQEEVVQRAQKAKERAAEEVVDDKGPKTLKGSSTTIVTPAPTPPPSPTIPTQAE

SEQ ID NO: 6823 - protein, 123 aa, Glycine max
  peptide (1)..(123): Ceres Seq. ID no. 12610966
KTSVDCPPSVAARPPVAGGSNPSDSQSQPPLEDPAAPRQRGQRQTWRPCYLHRRRRRRRLLLPSAVSLSRPAALSPPPSPSEALAGLQPGAAAAAAVPSPKQVMKRARPSSTPSSSGRPWRRL

SEQ ID NO: 6824 - protein, 103 aa, Glycine max
  peptide (1)..(103): Ceres Seq. ID no. 12610967
TRQASIAPHPWLRVRRWPGVLIRAIPNPNRRWKTPQLHDSAGRGRHGARATCTGGGGGGGSSSLLPCLSPGPQRFPLLLPRQKPWQVCSQEQRRRRPSRAQSR

SEQ ID NO: 6825 - DNA, 1015 bp, Glycine max
  misc_feature (1)..(1015): Ceres Seq. ID no. 15226426
sgcwcgagamcattwcctagaacatcstaatsgaaaagttgcagtcattgttagtttattgtgtactagcagcgccactcagtctgttcaaggagtattagtcttgtaatggcttcattttcttgttttcattcttcgattcgggagattgttcaataaagacctggcatgtaatctcttaaagcttaattcaggccactttcattatataaaactgtagatctaagatgtactgtactagtgagtatgctgttcagcttgagctagtaattctggtatctgccctgcatccctttactagcagaatgtgaaatgcctgtcatgagccacttgcaaattctaccattatatagactgtaaatctgagatgtactactgagtatgctctttcttgtgtgtgttcctaggccatactggagatgctactttccaaacactcaggctatcatatatgttgttgattcaagtgatactgataggctggtaactgcaaaagaagaatttcattccatccttgaggaggatgagctgaaaggtgcggttgttcttgtatatgcgaataaacaggaccttccaggtgcacttgatgatgctgccataactgaatcattagaacttcacaagattaagagccgccaatgggcaattttcaaaacatctgctataaaaggggaggggctttttgaaggcttgaactggctcagtaatgcactcaagtccggaggcagctaatgtaggaggcccagcctccattccgtgaatcattgcttgatggtaaggaacagggacgatgacagccttctcgctagtctgcgtggaaatcagaatctctttattttaactctggaagttatacacaatcagttatctgtagagtgcttgttgaagtttccagacacaacactaggtgtaccatgtcgagagcaagaatatatttgtagaaaataccgagcaaacgattacggtttgaaatatgtggcttcaccgcgtaaattttcaccccattttctttttc

SEQ ID NO: 6826 - protein, 116 aa, Glycine max
  peptide (1)..(116): Ceres Seq. ID no. 15226427
  misc_feature (9)..(111): Pfam Name: Pfam Description:  ADP-ribosylation factor family
  misc_feature (9)..(116): NCBI GI NO: 40253742 NR Description: putative ADP-ribosylation factor 3
  misc_feature (9)..(114): NCBI GI NO: 20197875 NR Description: ADP-ribosylation factor 3 [Arabidopsis thaliana]
  misc_feature (9)..(114): NCBI GI NO: 30682545 NR Description: ADP-ribosylation factor 3 (ARF3)
  misc_feature (9)..(114): NCBI GI NO: 3182922 NR Description: ADP-ribosylation factor 1
  misc_feature (9)..(115): NCBI GI NO: 17154685 NR Description: ADP-ribosylation factor [Gossypium hirsutum]
  misc_feature (9)..(113): NCBI GI NO: 4324967 NR Description: ADP-ribosylation factor [Glycine max]
  misc_feature (9)..(113): NCBI GI NO: 15226521 NR Description: ADP-ribosylation factor 1 (ARF1)
  misc_feature (9)..(113): NCBI GI NO: 6573751 NR Description: F20B24.7 [Arabidopsis thaliana]
  misc_feature (9)..(113): NCBI GI NO: 39653273 NR Description: ADP-ribosylation factor [Medicago sativa]
  misc_feature (9)..(113): NCBI GI NO: 30681825 NR Description: ADP-ribosylation factor, putative
MLFLVCVPRPYWRCYFPNTQAIIYVVDSSDTDRLVTAKEEFHSILEEDELKGAVVLVYANKQDLPGALDDAAITESLELHKIKSRQWAIFKTSAIKGEGLFEGLNWLSNALKSGGS

SEQ ID NO: 6827 - protein, 81 aa, Glycine max
  peptide (1)..(81): Ceres Seq. ID no. 15226428
MVRNRDDDSLLASLRGNQNLFILTLEVIHNQLSVECLLKFPDTTLGVPCREQEYICRKYRANDYGLKYVASPRKFSPHFLF

SEQ ID NO: 6828 - DNA, 1256 bp, Glycine max
  misc_feature (1)..(1256): Ceres Seq. ID no. 15176047
aaacgataaggtgtgtctcctccgactctctcgtcatcgtctgagcttacctaactccagttaatggcgatgtcgacgactacactcttccatgcacttgttccttccaacacttacaaatccagagctgtctcctcttccttcgtctcagttcctcgctcctcaactccaccttcttcgccgtctctccagttccgctcgcttgtttcagacacgacgtcgatctacggtcggaggaaatttaccggcaatctcagaagagtatccttaaccgtctccgccgccgcagcagctgagcctctcaccgtcctcgtcaccggtgccggtggcagaacagggcaaatcgtgtacaagaagttgaaggagaggtcggatcagttcgtggcgagaggcttggtgaggacgaaagagagcaaggagaagatcggtggagaggacgaagtgttcgtcggtgatattcgagaccctgaatccattgctcctgctgtgcaagggattgatgctttggtcattcttacgagcgctgtaccgaagatgaaacctggttttgatcctagcaaaggagagagacctgagttctactttgaagaaggagcttatcctgaacaggttgattggattggtcagaagaatcagatagatgctgctaaggcagcaggaattaagcagattgttttggtggggtcgatgggaggaacaaacataaacaaccccttgaatagcattggcaatgccaacattctggtttggaagaggaaagctgagcagtacttggctgattccggtattccgtacaccatcatcagggcgggcggtctgcaggacaaagaaggtggcattcgagaattaattgtgggaaaagatgacgagattctagagacagaaatgagaacaattgcaagggctgatgttgctgaagtctgcgttcaggcgttgcagctcgaggaggcaaagtataaagcacttgatctggcctcaaagcctgagggaacaggcaccccaacaaaggatttcaaggcacttttcactcaagttaccgctcggttctgatcttctgttactttgtcttttaagcagagtaataggacaagagactgagagggataataagttcattatgtgagatacacatgtctgaatcggctctttctatatttttcaaggggtctttcccgaagtatctaagtatattttgtatgcaccattcacaaaatcccaaagtcgaaaagatcgggattgatctttgaaagtaaaag

SEQ ID NO: 6829 - protein, 328 aa, Glycine max
  peptide (1)..(328): Ceres Seq. ID no. 15176048
  misc_feature (82)..(156): Pfam Name: Pfam Description:  Isoflavone reductase
  misc_feature (1)..(328): NCBI GI NO: 18404496 NR Description: expressed protein [Arabidopsis thaliana]
  misc_feature (1)..(328): NCBI GI NO: 7485430 NR Description: hypothetical protein At2g37660
  misc_feature (65)..(328): NCBI GI NO: 14719331 NR Description: putative 3-beta hydroxysteroiddehydrogenase/isomerase protein
  misc_feature (74)..(328): NCBI GI NO: 34897418 NR Description: unknown protein
  misc_feature (81)..(328): NCBI GI NO: 18413869 NR Description: expressed protein [Arabidopsis thaliana]
  misc_feature (81)..(323): NCBI GI NO: 11358410 NR Description: hypothetical protein T7H20
  misc_feature (3)..(321): NCBI GI NO: 30689062 NR Description: expressed protein [Arabidopsis thaliana]
  misc_feature (3)..(321): NCBI GI NO: 7486379 NR Description: hypothetical protein F3L17
  misc_feature (181)..(314): NCBI GI NO: 37523053 NR Description: hypothetical protein gll3484
  misc_feature (180)..(324): NCBI GI NO: 16330694 NR Description: hypothetical protein [Synechocystis sp. PCC 6803]
MAMSTTTLFHALVPSNTYKSRAVSSSFVSVPRSSTPPSSPSLQFRSLVSDTTSIYGRRKFTGNLRRVSLTVSAAAAAEPLTVLVTGAGGRTGQIVYKKLKERSDQFVARGLVRTKESKEKIGGEDEVFVGDIRDPESIAPAVQGIDALVILTSAVPKMKPGFDPSKGERPEFYFEEGAYPEQVDWIGQKNQIDAAKAAGIKQIVLVGSMGGTNINNPLNSIGNANILVWKRKAEQYLADSGIPYTIIRAGGLQDKEGGIRELIVGKDDEILETEMRTIARADVAEVCVQALQLEEAKYKALDLASKPEGTGTPTKDFKALFTQVTARF

SEQ ID NO: 6830 - protein, 326 aa, Glycine max
  peptide (1)..(326): Ceres Seq. ID no. 15176049
  misc_feature (80)..(154): Pfam Name: Pfam Description:  Isoflavone reductase
  misc_feature (1)..(326): NCBI GI NO: 18404496 NR Description: expressed protein [Arabidopsis thaliana]
  misc_feature (1)..(326): NCBI GI NO: 7485430 NR Description: hypothetical protein At2g37660
  misc_feature (63)..(326): NCBI GI NO: 14719331 NR Description: putative 3-beta hydroxysteroiddehydrogenase/isomerase protein
  misc_feature (72)..(326): NCBI GI NO: 34897418 NR Description: unknown protein
  misc_feature (79)..(326): NCBI GI NO: 18413869 NR Description: expressed protein [Arabidopsis thaliana]
  misc_feature (79)..(321): NCBI GI NO: 11358410 NR Description: hypothetical protein T7H20
  misc_feature (1)..(319): NCBI GI NO: 30689062 NR Description: expressed protein [Arabidopsis thaliana]
  misc_feature (1)..(319): NCBI GI NO: 7486379 NR Description: hypothetical protein F3L17
  misc_feature (179)..(312): NCBI GI NO: 37523053 NR Description: hypothetical protein gll3484
  misc_feature (178)..(322): NCBI GI NO: 16330694 NR Description: hypothetical protein [Synechocystis sp. PCC 6803]
MSTTTLFHALVPSNTYKSRAVSSSFVSVPRSSTPPSSPSLQFRSLVSDTTSIYGRRKFTGNLRRVSLTVSAAAAAEPLTVLVTGAGGRTGQIVYKKLKERSDQFVARGLVRTKESKEKIGGEDEVFVGDIRDPESIAPAVQGIDALVILTSAVPKMKPGFDPSKGERPEFYFEEGAYPEQVDWIGQKNQIDAAKAAGIKQIVLVGSMGGTNINNPLNSIGNANILVWKRKAEQYLADSGIPYTIIRAGGLQDKEGGIRELIVGKDDEILETEMRTIARADVAEVCVQALQLEEAKYKALDLASKPEGTGTPTKDFKALFTQVTARF

SEQ ID NO: 6831 - protein, 171 aa, Glycine max
  peptide (1)..(171): Ceres Seq. ID no. 15176050
  misc_feature (24)..(149): Pfam Name: Pfam Description:  Isoflavone reductase
  misc_feature (1)..(171): NCBI GI NO: 18404496 NR Description: expressed protein [Arabidopsis thaliana]
  misc_feature (1)..(171): NCBI GI NO: 7485430 NR Description: hypothetical protein At2g37660
  misc_feature (1)..(171): NCBI GI NO: 14719331 NR Description: putative 3-beta hydroxysteroiddehydrogenase/isomerase protein
  misc_feature (1)..(171): NCBI GI NO: 34897418 NR Description: unknown protein
  misc_feature (1)..(171): NCBI GI NO: 18413869 NR Description: expressed protein [Arabidopsis thaliana]
  misc_feature (1)..(166): NCBI GI NO: 11358410 NR Description: hypothetical protein T7H20
  misc_feature (1)..(164): NCBI GI NO: 30689062 NR Description: expressed protein [Arabidopsis thaliana]
  misc_feature (1)..(164): NCBI GI NO: 7486379 NR Description: hypothetical protein F3L17
  misc_feature (24)..(157): NCBI GI NO: 37523053 NR Description: hypothetical protein gll3484
  misc_feature (23)..(167): NCBI GI NO: 16330694 NR Description: hypothetical protein [Synechocystis sp. PCC 6803]
MKPGFDPSKGERPEFYFEEGAYPEQVDWIGQKNQIDAAKAAGIKQIVLVGSMGGTNINNPLNSIGNANILVWKRKAEQYLADSGIPYTIIRAGGLQDKEGGIRELIVGKDDEILETEMRTIARADVAEVCVQALQLEEAKYKALDLASKPEGTGTPTKDFKALFTQVTARF

SEQ ID NO: 6832 - DNA, 677 bp, Glycine max
  misc_feature (1)..(677): Ceres Seq. ID no. 12611141
gagagggagagcgaaacatacaaaggaattcgagtgaggatctaatcgtccatatctttgacctaaccctagtatcgggggctctgtgccgtcggagcaccctttctgatcggaataagactttatacagctcagttgagtctgtttccttctgaaataaaaaaagggtgatggaaacccagaagaaaactagggaacatagcctacaccatatagttgatgacatcggtgctgcatttggaatgggagctattggaggttctgtggtccacttcataaaaggaacccaaaattccccgaaaggccgtcggtttgttgggggagcacaagctgtgagcatgaatgctcctcgtataggaggtagttttgctgtgttcggaggccttttctctgcgtttgactacacaatggtgtacattaggaagaaggaagatccatggaactctatcgtagcaggtgctgctacaggagggtttctgtctatgcgacaagggcttgctgctgcttcgagatcagctcttatgggagggctcttgcttgctttgatcaaaggggtccattaatgttaaacaagttagcttattggattgtgtttattgagctttctctgctcagtcttggaacctatatactcttttgtttaaatcattctacagtaattcatgtattggtggtat

SEQ ID NO: 6833 - protein, 130 aa, Glycine max
  peptide (1)..(130): Ceres Seq. ID no. 12611142
  misc_feature (1)..(128): NCBI GI NO: 15228131 NR Description: putative protein translocase; protein id:At2g37410
  misc_feature (1)..(128): NCBI GI NO: 38678772 NR Description: mitochondrial inner membrane translocase TM17-2
  misc_feature (1)..(128): NCBI GI NO: 6103722 NR Description: TIM17 [Arabidopsis thaliana]
  misc_feature (1)..(128): NCBI GI NO: 34394571 NR Description: translocase inner membrane-like protein
  misc_feature (1)..(126): NCBI GI NO: 21593521 NR Description: membrane translocase-like protein
  misc_feature (1)..(126): NCBI GI NO: 15239150 NR Description: membrane translocase - like protein
  misc_feature (1)..(126): NCBI GI NO: 38678774 NR Description: mitochondrial inner membrane translocase TM17-3
  misc_feature (1)..(129): NCBI GI NO: 15217923 NR Description: mitochondrial inner membrane translocase component
  misc_feature (4)..(129): NCBI GI NO: 30923567 NR Description: CG40451-PA [Drosophila melanogaster]
  misc_feature (8)..(129): NCBI GI NO: 23490183 NR Description: mitochondrial import inner membrane translocase subunit tim17
METQKKTREHSLHHIVDDIGAAFGMGAIGGSVVHFIKGTQNSPKGRRFVGGAQAVSMNAPRIGGSFAVFGGLFSAFDYTMVYIRKKEDPWNSIVAGAATGGFLSMRQGLAAASRSALMGGLLLALIKGVH

SEQ ID NO: 6834 - protein, 106 aa, Glycine max
  peptide (1)..(106): Ceres Seq. ID no. 12611143
  misc_feature (1)..(104): NCBI GI NO: 15228131 NR Description: putative protein translocase; protein id:At2g37410
  misc_feature (1)..(104): NCBI GI NO: 38678772 NR Description: mitochondrial inner membrane translocase TM17-2
  misc_feature (1)..(104): NCBI GI NO: 6103722 NR Description: TIM17 [Arabidopsis thaliana]
  misc_feature (1)..(104): NCBI GI NO: 34394571 NR Description: translocase inner membrane-like protein
  misc_feature (1)..(102): NCBI GI NO: 21593521 NR Description: membrane translocase-like protein
  misc_feature (1)..(102): NCBI GI NO: 15239150 NR Description: membrane translocase - like protein
  misc_feature (1)..(102): NCBI GI NO: 38678774 NR Description: mitochondrial inner membrane translocase TM17-3
  misc_feature (1)..(105): NCBI GI NO: 15217923 NR Description: mitochondrial inner membrane translocase component
  misc_feature (1)..(105): NCBI GI NO: 30923567 NR Description: CG40451-PA [Drosophila melanogaster]
  misc_feature (1)..(105): NCBI GI NO: 23490183 NR Description: mitochondrial import inner membrane translocase subunit tim17
MGAIGGSVVHFIKGTQNSPKGRRFVGGAQAVSMNAPRIGGSFAVFGGLFSAFDYTMVYIRKKEDPWNSIVAGAATGGFLSMRQGLAAASRSALMGGLLLALIKGVH

SEQ ID NO: 6835 - protein, 80 aa, Glycine max
  peptide (1)..(80): Ceres Seq. ID no. 12611144
MELYRSRCCYRRVSVYATRACCCFEISSYGRALACFDQRGPLMLNKLAYWIVFIELSLLSLGTYILFCLNHSTVIHVLVV

SEQ ID NO: 6836 - DNA, 917 bp, Glycine max
  misc_feature (1)..(917): Ceres Seq. ID no. 13594958
aatttaatcaaccccctttcaacagtatcatttttagtaatttttttatcagtaaaagggaaaacaaatccttttgttttcattctcacttttgcagctaagttgggaaacattttttgcaggtaagatcactgacacttgatgttaaagtgtgggatccctctgttttaagtatgcttaagtcactgggcaatctttttgcaaactcagtttgggaggagctgctgtatccaccgagtaatttgcaaactgttgacacccctgcgagttcatccaaggaaaatggagaggagttctttcatgcaagaaaaccaaaacatgacgattctatttcattaaaggaaaggttcattcatgcaaagtattctgagaaaatatttattccccggacaaagaaatatcaccctctcttttcacccgcacaactggtgctggaaagcatctatgccaatgataagaaagcagtctaccagcatattatcaagtcagattttgacatcaatgccatcggttggcaagcatcgtctgatgactctttcaacatggtttcttcaaataatttaaacattgcctctcaaagtgaaattcagcccattgaggccatacaagatggttctagcgtgcttcaccttgcatgcctaactagtgacattggcatggtggagctgctcctacaacatggggcaaatataaatgcttgtgattctagaggtcagacaccactacattattgtattattaaagggaagaccgcagctgcaaaagtgcttatcatgaggggagccaatacatatgtcgcagataaagaaggcaaaactcctgttaagcttgcatcagaatctggctgtggtgatgatgaaattctcgctctcttgacaagcagatgacatgtttaaaatcttacaatgagcggtcat

SEQ ID NO: 6837 - protein, 237 aa, Glycine max
  peptide (1)..(237): Ceres Seq. ID no. 13594959
  misc_feature (1)..(70): Pfam Name: Pfam Description:  Putative GTPase activating protein for Arf
  misc_feature (1)..(235): NCBI GI NO: 11358303 NR Description: hypothetical protein T31B5
  misc_feature (1)..(235): NCBI GI NO: 30684352 NR Description: ARF GTPase-activating domain-containing protein
  misc_feature (1)..(234): NCBI GI NO: 38175545 NR Description: putative ARF GTPase-activating domain-containingprotein
  misc_feature (1)..(234): NCBI GI NO: 15219822 NR Description: ARF GTPase-activating domain-containing protein
  misc_feature (1)..(234): NCBI GI NO: 25402625 NR Description: hypothetical protein
  misc_feature (1)..(234): NCBI GI NO: 30681946 NR Description: ARF GTPase-activating domain-containing protein
  misc_feature (1)..(217): NCBI GI NO: 15240398 NR Description: ARF GTPase-activating domain-containing protein
  misc_feature (117)..(235): NCBI GI NO: 15240398 NR Description: ARF GTPase-activating domain-containing protein
  misc_feature (115)..(224): NCBI GI NO: 28274852 NR Description: ankyrin repeat protein E4_2 [synthetic construct]
  misc_feature (145)..(224): NCBI GI NO: 28373837 NR Description: Chain A
MLKSLGNLFANSVWEELLYPPSNLQTVDTPASSSKENGEEFFHARKPKHDDSISLKERFIHAKYSEKIFIPRTKKYHPLFSPAQLVLESIYANDKKAVYQHIIKSDFDINAIGWQASSDDSFNMVSSNNLNIASQSEIQPIEAIQDGSSVLHLACLTSDIGMVELLLQHGANINACDSRGQTPLHYCIIKGKTAAAKVLIMRGANTYVADKEGKTPVKLASESGCGDDEILALLTSR

SEQ ID NO: 6838 - DNA, 970 bp, Glycine max
  misc_feature (1)..(970): Ceres Seq. ID no. 13595294
atctcttgtgcaactcttagggtttttatcctccaaagtcacagtgccccttcttctcttatcctcaaggacagcagaaatggcggcgactcaacttacagcatcaccagtgactgtttcagctaggagcttagcctcactcagagcttcgagtgccaagtttggaactttgaaaccaggcacccttaagcagagccagttccgttctttcgttgtcagagctgcttctgtggttgctcctaagtatacttccattaagccattgggagatagagttttggtgaagatcaaggaggcagaggagaagactatgggaggtatcttacttccatccacagctcaatcaaagcctcaaggaggtgaagtcgttactgtgggtgaaggaagaactattgggaagaccaaaatcgacatagatgtccctactggcgcgcaaattatttactccaaatacgcaggaactgaggtggagttcaacgatgttcagcatcttattctcaaggaagatgatattgttggccttcttgagaccgaggacataaaagatctcaagcccttgaatgaccgtgtcttcattaaggtagctgaggctgaggagaaaacagctggagggttgttgctaaccgagactaccaaagagaagccttctattggcacggtgatagcagttggaccaggttctctagatgaggaaggtaagcgccagccactatcgatatctaccggaagcacagttctttactccaagtatgctggtaacgacttcaagggcaaagatggttccaactacatcgccctgagagcttcagatgtgatggctatcctttcttagtttatatctctgtaacctgcaatttgtatcccagttgtggaaatttttcataaacggcttctgcataatctgaaacaaagacttgagttttaaaatatggttcttaaaaaaaaaaaaaaaaaagcttatcgataccgt

SEQ ID NO: 6839 - protein, 276 aa, Glycine max
  peptide (1)..(276): Ceres Seq. ID no. 15221530
  misc_feature (181)..(276): Pfam Name: Pfam Description:  Chaperonin 10 Kd subunit
  misc_feature (27)..(276): NCBI GI NO: 15242045 NR Description: chloroplast Cpn21 protein [Arabidopsis thaliana]
  misc_feature (27)..(276): NCBI GI NO: 25453528 NR Description: chaperonin 10 [imported] - Arabidopsis thaliana
  misc_feature (27)..(276): NCBI GI NO: 21780187 NR Description: cp10-like protein [Gossypium hirsutum]
  misc_feature (27)..(276): NCBI GI NO: 7331143 NR Description: chaperonin 21 precursor [Lycopersicon esculentum]
  misc_feature (27)..(276): NCBI GI NO: 399241 NR Description: 20 kDa chaperonin, chloroplast precursor
  misc_feature (180)..(275): NCBI GI NO: 22297730 NR Description: 10kD chaperonin
  misc_feature (177)..(276): NCBI GI NO: 11467285 NR Description: GroES [Cyanophora paradoxa]
  misc_feature (180)..(276): NCBI GI NO: 116204 NR Description: 10 kDa chaperonin (Protein Cpn10) (groES protein)
  misc_feature (179)..(275): NCBI GI NO: 29839360 NR Description: 10 kDa chaperonin (Protein Cpn10) (groES protein)
  misc_feature (83)..(174): NCBI GI NO: 37522465 NR Description: chaperonin GroES [Gloeobacter violaceus]
SLVQLLGFLSSKVTVPLLLLSSRTAEMAATQLTASPVTVSARSLASLRASSAKFGTLKPGTLKQSQFRSFVVRAASVVAPKYTSIKPLGDRVLVKIKEAEEKTMGGILLPSTAQSKPQGGEVVTVGEGRTIGKTKIDIDVPTGAQIIYSKYAGTEVEFNDVQHLILKEDDIVGLLETEDIKDLKPLNDRVFIKVAEAEEKTAGGLLLTETTKEKPSIGTVIAVGPGSLDEEGKRQPLSISTGSTVLYSKYAGNDFKGKDGSNYIALRASDVMAILS

SEQ ID NO: 6840 - protein, 250 aa, Glycine max
  peptide (1)..(250): Ceres Seq. ID no. 15221531
  misc_feature (155)..(250): Pfam Name: Pfam Description:  Chaperonin 10 Kd subunit
  misc_feature (1)..(250): NCBI GI NO: 15242045 NR Description: chloroplast Cpn21 protein [Arabidopsis thaliana]
  misc_feature (1)..(250): NCBI GI NO: 25453528 NR Description: chaperonin 10 [imported] - Arabidopsis thaliana
  misc_feature (1)..(250): NCBI GI NO: 21780187 NR Description: cp10-like protein [Gossypium hirsutum]
  misc_feature (1)..(250): NCBI GI NO: 7331143 NR Description: chaperonin 21 precursor [Lycopersicon esculentum]
  misc_feature (1)..(250): NCBI GI NO: 399241 NR Description: 20 kDa chaperonin, chloroplast precursor
  misc_feature (154)..(249): NCBI GI NO: 22297730 NR Description: 10kD chaperonin
  misc_feature (151)..(250): NCBI GI NO: 11467285 NR Description: GroES [Cyanophora paradoxa]
  misc_feature (154)..(250): NCBI GI NO: 116204 NR Description: 10 kDa chaperonin (Protein Cpn10) (groES protein)
  misc_feature (153)..(249): NCBI GI NO: 29839360 NR Description: 10 kDa chaperonin (Protein Cpn10) (groES protein)
  misc_feature (57)..(148): NCBI GI NO: 37522465 NR Description: chaperonin GroES [Gloeobacter violaceus]
MAATQLTASPVTVSARSLASLRASSAKFGTLKPGTLKQSQFRSFVVRAASVVAPKYTSIKPLGDRVLVKIKEAEEKTMGGILLPSTAQSKPQGGEVVTVGEGRTIGKTKIDIDVPTGAQIIYSKYAGTEVEFNDVQHLILKEDDIVGLLETEDIKDLKPLNDRVFIKVAEAEEKTAGGLLLTETTKEKPSIGTVIAVGPGSLDEEGKRQPLSISTGSTVLYSKYAGNDFKGKDGSNYIALRASDVMAILS

SEQ ID NO: 6841 - protein, 173 aa, Glycine max
  peptide (1)..(173): Ceres Seq. ID no. 15221532
  misc_feature (78)..(173): Pfam Name: Pfam Description:  Chaperonin 10 Kd subunit
  misc_feature (1)..(173): NCBI GI NO: 15242045 NR Description: chloroplast Cpn21 protein [Arabidopsis thaliana]
  misc_feature (1)..(173): NCBI GI NO: 25453528 NR Description: chaperonin 10 [imported] - Arabidopsis thaliana
  misc_feature (1)..(173): NCBI GI NO: 21780187 NR Description: cp10-like protein [Gossypium hirsutum]
  misc_feature (1)..(173): NCBI GI NO: 7331143 NR Description: chaperonin 21 precursor [Lycopersicon esculentum]
  misc_feature (1)..(173): NCBI GI NO: 399241 NR Description: 20 kDa chaperonin, chloroplast precursor
  misc_feature (77)..(172): NCBI GI NO: 22297730 NR Description: 10kD chaperonin
  misc_feature (74)..(173): NCBI GI NO: 11467285 NR Description: GroES [Cyanophora paradoxa]
  misc_feature (77)..(173): NCBI GI NO: 116204 NR Description: 10 kDa chaperonin (Protein Cpn10) (groES protein)
  misc_feature (76)..(172): NCBI GI NO: 29839360 NR Description: 10 kDa chaperonin (Protein Cpn10) (groES protein)
  misc_feature (1)..(71): NCBI GI NO: 37522465 NR Description: chaperonin GroES [Gloeobacter violaceus]
MGGILLPSTAQSKPQGGEVVTVGEGRTIGKTKIDIDVPTGAQIIYSKYAGTEVEFNDVQHLILKEDDIVGLLETEDIKDLKPLNDRVFIKVAEAEEKTAGGLLLTETTKEKPSIGTVIAVGPGSLDEEGKRQPLSISTGSTVLYSKYAGNDFKGKDGSNYIALRASDVMAILS

SEQ ID NO: 6842 - DNA, 840 bp, Glycine max
  misc_feature (1)..(840): Ceres Seq. ID no. 13582184
gtttaaaaaaaaaaaccctagcaccagtcccgccgccgccgctgccgccctgaccctcgccgctgctgcagcctccaccgcgcaaccatgggtatcgacctcgtcgccggcggccgcaacaagaggaccaagcgcacggcgcccaaatcggacgatgtgtacctcaagctgctcgtcaagctctaccgcttcctggtccggaggaccaagagccagttcaacgccgtgatcctgaagcgcctcttcatgagcaagaccaaccgccccccgctctcgatgcgccgcctcgtcaggttcatggaggggaaggaggacaagatcgctgtgatagtgggcaccatcaccgatgaccagagggtctacgagataccggcaatgaaggtggccgcgctcaggttcaccgagacggcgagggccaggattgtcaatgccggtggcgagtgccttacctttgaccagctcgcgctccgtgctccgcttggacagaacacgcttctcctgaggggtcccaagaacgccagggaggctgttaggcactttggcaaggctccaggagtgccacacagccacaccaagccatatgtccactccaagggcaggaaattcgagaaggcaagaggaaggaggaacagcaggggcttcaaggtttaagccgtggagttttcggcacccttgtcacatttgctgttatcggtcaatcttcacttttttgggtaccagaatcatactgctttagatgtcagagtcttgtgtcgatgagtattcagaaccagttcattcttgtttcagtattttgcaacttgagaccatgcttgcaatccagttatgaatatcattttt

SEQ ID NO: 6843 - protein, 187 aa, Glycine max
  peptide (1)..(187): Ceres Seq. ID no. 13582185
  misc_feature (1)..(187): NCBI GI NO: 34897628 NR Description: cytoplasmic ribosomal protein L18 [Oryza sativa]
  misc_feature (1)..(187): NCBI GI NO: 34393858 NR Description: putative cytoplasmic ribosomal protein L18
  misc_feature (1)..(187): NCBI GI NO: 606970 NR Description: cytoplasmic ribosomal protein L18
  misc_feature (1)..(187): NCBI GI NO: 15230011 NR Description: 60S ribosomal protein L18 (RPL18B)
  misc_feature (1)..(187): NCBI GI NO: 15241061 NR Description: 60S ribosomal protein L18 (RPL18C)
  misc_feature (4)..(187): NCBI GI NO: 6094021 NR Description: 60S RIBOSOMAL PROTEIN L18
  misc_feature (2)..(187): NCBI GI NO: 7440855 NR Description: ribosomal protein L18
  misc_feature (1)..(163): NCBI GI NO: 28798549 NR Description: 60S ribosomal protein [Medicago sativa]
  misc_feature (1)..(186): NCBI GI NO: 28630356 NR Description: ribosomal protein L18 [Petromyzon marinus]
  misc_feature (1)..(186): NCBI GI NO: 28630354 NR Description: ribosomal protein L18 [Branchiostoma lanceolatum]
MGIDLVAGGRNKRTKRTAPKSDDVYLKLLVKLYRFLVRRTKSQFNAVILKRLFMSKTNRPPLSMRRLVRFMEGKEDKIAVIVGTITDDQRVYEIPAMKVAALRFTETARARIVNAGGECLTFDQLALRAPLGQNTLLLRGPKNAREAVRHFGKAPGVPHSHTKPYVHSKGRKFEKARGRRNSRGFKV

SEQ ID NO: 6844 - protein, 134 aa, Glycine max
  peptide (1)..(134): Ceres Seq. ID no. 13582186
  misc_feature (1)..(134): NCBI GI NO: 34897628 NR Description: cytoplasmic ribosomal protein L18 [Oryza sativa]
  misc_feature (1)..(134): NCBI GI NO: 34393858 NR Description: putative cytoplasmic ribosomal protein L18
  misc_feature (1)..(134): NCBI GI NO: 606970 NR Description: cytoplasmic ribosomal protein L18
  misc_feature (1)..(134): NCBI GI NO: 15230011 NR Description: 60S ribosomal protein L18 (RPL18B)
  misc_feature (1)..(134): NCBI GI NO: 15241061 NR Description: 60S ribosomal protein L18 (RPL18C)
  misc_feature (1)..(134): NCBI GI NO: 6094021 NR Description: 60S RIBOSOMAL PROTEIN L18
  misc_feature (1)..(134): NCBI GI NO: 7440855 NR Description: ribosomal protein L18
  misc_feature (1)..(110): NCBI GI NO: 28798549 NR Description: 60S ribosomal protein [Medicago sativa]
  misc_feature (1)..(133): NCBI GI NO: 28630356 NR Description: ribosomal protein L18 [Petromyzon marinus]
  misc_feature (1)..(133): NCBI GI NO: 28630354 NR Description: ribosomal protein L18 [Branchiostoma lanceolatum]
MSKTNRPPLSMRRLVRFMEGKEDKIAVIVGTITDDQRVYEIPAMKVAALRFTETARARIVNAGGECLTFDQLALRAPLGQNTLLLRGPKNAREAVRHFGKAPGVPHSHTKPYVHSKGRKFEKARGRRNSRGFKV

SEQ ID NO: 6845 - protein, 124 aa, Glycine max
  peptide (1)..(124): Ceres Seq. ID no. 13582187
  misc_feature (1)..(124): NCBI GI NO: 34897628 NR Description: cytoplasmic ribosomal protein L18 [Oryza sativa]
  misc_feature (1)..(124): NCBI GI NO: 34393858 NR Description: putative cytoplasmic ribosomal protein L18
  misc_feature (1)..(124): NCBI GI NO: 606970 NR Description: cytoplasmic ribosomal protein L18
  misc_feature (1)..(124): NCBI GI NO: 15230011 NR Description: 60S ribosomal protein L18 (RPL18B)
  misc_feature (1)..(124): NCBI GI NO: 15241061 NR Description: 60S ribosomal protein L18 (RPL18C)
  misc_feature (1)..(124): NCBI GI NO: 6094021 NR Description: 60S RIBOSOMAL PROTEIN L18
  misc_feature (1)..(124): NCBI GI NO: 7440855 NR Description: ribosomal protein L18
  misc_feature (1)..(100): NCBI GI NO: 28798549 NR Description: 60S ribosomal protein [Medicago sativa]
  misc_feature (1)..(123): NCBI GI NO: 28630356 NR Description: ribosomal protein L18 [Petromyzon marinus]
  misc_feature (1)..(123): NCBI GI NO: 28630354 NR Description: ribosomal protein L18 [Branchiostoma lanceolatum]
MRRLVRFMEGKEDKIAVIVGTITDDQRVYEIPAMKVAALRFTETARARIVNAGGECLTFDQLALRAPLGQNTLLLRGPKNAREAVRHFGKAPGVPHSHTKPYVHSKGRKFEKARGRRNSRGFKV

SEQ ID NO: 6846 - DNA, 844 bp, Glycine max
  misc_feature (1)..(844): Ceres Seq. ID no. 13581971
aaaaaaaacgagaagtaggatctgttgttcttcgttttctacgaggaagcaaaataacaataacagaggaagaaagaaaatcacacagtttcagtttcagtttcagcttcgctttgtagaaatggctactctatcaagcttcattgctacgccgaagaatcccaagacccactttctctcaggttcctcattcatgtcgatggacaaatgcttcttgaaaatcagcaccagcggacactttacagatttctctttaagggctaaagcaacatgtaacaaaccacttgttattcaagctggtggtgatggtggaagaccaagtagtggaagtatttttgttggtggttttgtattgggaggactaattgctggagcattgggttgtctatatgcacctcagataagcagggcactagctggagctgacagtaaagacttaatgaggaaacttccaaaattcatgtatgatgaagaaaaagcactggagaggactcgcgaggtgctaactgagaaaatagcgcagttgaactctgccatagatggtgtttctgcacagttgcggccagatgaagactcaaatgaaattgccgtgaactcagaggaaattgaaacaccaatcagcgatgaaagtgaaatcgaagtcaacaaataaaaagctgttgtcatttactccaagttgatgtcacaaattgcttttgcatcattgaatctattaatgtatgtacttgacacaagttggttccagcaaacgtagattatgttctgttgctgaacaagtctccgttaaatagacaatttgttacattgacaagttataccaataattcatttaatttactgtccc

SEQ ID NO: 6847 - protein, 216 aa, Glycine max
  peptide (1)..(216): Ceres Seq. ID no. 13581972
  misc_feature (41)..(203): NCBI GI NO: 18400762 NR Description: expressed protein [Arabidopsis thaliana]
  misc_feature (54)..(213): NCBI GI NO: 17065406 NR Description: Unknown protein [Arabidopsis thaliana]
  misc_feature (73)..(213): NCBI GI NO: 10176975 NR Description: protein; similar to unknown protein
  misc_feature (73)..(213): NCBI GI NO: 22326856 NR Description: protein; similar to unknown protein (gb|AAF26969
  misc_feature (44)..(213): NCBI GI NO: 15233017 NR Description: expressed protein [Arabidopsis thaliana]
KKTRSRICCSSFSTRKQNNNNRGRKKITQFQFQFQLRFVEMATLSSFIATPKNPKTHFLSGSSFMSMDKCFLKISTSGHFTDFSLRAKATCNKPLVIQAGGDGGRPSSGSIFVGGFVLGGLIAGALGCLYAPQISRALAGADSKDLMRKLPKFMYDEEKALERTREVLTEKIAQLNSAIDGVSAQLRPDEDSNEIAVNSEEIETPISDESEIEVNK

SEQ ID NO: 6848 - protein, 176 aa, Glycine max
  peptide (1)..(176): Ceres Seq. ID no. 13581973
  misc_feature (1)..(163): NCBI GI NO: 18400762 NR Description: expressed protein [Arabidopsis thaliana]
  misc_feature (14)..(173): NCBI GI NO: 17065406 NR Description: Unknown protein [Arabidopsis thaliana]
  misc_feature (33)..(173): NCBI GI NO: 10176975 NR Description: protein; similar to unknown protein
  misc_feature (33)..(173): NCBI GI NO: 22326856 NR Description: protein; similar to unknown protein (gb|AAF26969
  misc_feature (4)..(173): NCBI GI NO: 15233017 NR Description: expressed protein [Arabidopsis thaliana]
MATLSSFIATPKNPKTHFLSGSSFMSMDKCFLKISTSGHFTDFSLRAKATCNKPLVIQAGGDGGRPSSGSIFVGGFVLGGLIAGALGCLYAPQISRALAGADSKDLMRKLPKFMYDEEKALERTREVLTEKIAQLNSAIDGVSAQLRPDEDSNEIAVNSEEIETPISDESEIEVNK

SEQ ID NO: 6849 - protein, 152 aa, Glycine max
  peptide (1)..(152): Ceres Seq. ID no. 13581974
  misc_feature (1)..(139): NCBI GI NO: 18400762 NR Description: expressed protein [Arabidopsis thaliana]
  misc_feature (1)..(149): NCBI GI NO: 17065406 NR Description: Unknown protein [Arabidopsis thaliana]
  misc_feature (9)..(149): NCBI GI NO: 10176975 NR Description: protein; similar to unknown protein
  misc_feature (9)..(149): NCBI GI NO: 22326856 NR Description: protein; similar to unknown protein (gb|AAF26969
  misc_feature (1)..(149): NCBI GI NO: 15233017 NR Description: expressed protein [Arabidopsis thaliana]
MSMDKCFLKISTSGHFTDFSLRAKATCNKPLVIQAGGDGGRPSSGSIFVGGFVLGGLIAGALGCLYAPQISRALAGADSKDLMRKLPKFMYDEEKALERTREVLTEKIAQLNSAIDGVSAQLRPDEDSNEIAVNSEEIETPISDESEIEVNK

SEQ ID NO: 6850 - DNA, 827 bp, Glycine max
  misc_feature (1)..(827): Ceres Seq. ID no. 13594974
agaacatcctaatcgaaaaatatttcttttaacatttccttagtttctgaacctaccctcatcgggtctccaaggagccaagaaagaactgctttctcggcttctcggagtctcaccatcctctgttttcaccatttcttcatccacacgcaacctctaatctaaacctaaccctaaaaaatggactccacggagctaaaacgtgtgttccaaatgttcgacaaggacggagacggtcggatcacacagaaggagctaaacgagtcattcaaaaacctcggcatcataatccctgaaaacgagctgtcgcagatgatcgagaagatcgatgtgaacggagatggttgcgttgacgtcgaagagtttggagagctttacaagtcgataatggtccaaggcgaggatgagataggagatgaagatatgaaggaagcgttcaacgtttttgatcagaatggagatgggtttattacggtggatgagttgaaaacggtgttgtcttccttgggcctcaagcaaggtaagaccttggaggagtgtaggaagatgataatacaagtggatgttgatggtgatggtagggttaattacaaggagtttaggcaaatgatgaagaagggtcagattttagctcaatgagctgatgatctatgatttgtttgtttatatattttttttggttatttgtgttaacctttttctctcgcattctagaaggaaatatcacattatctgtaactggagctgttttatagtgtctaggtttgcgagagcacattgtaaaaattgtagacctgtttgtttctaatgtgatttgtgataatttt

SEQ ID NO: 6851 - protein, 152 aa, Glycine max
  peptide (1)..(152): Ceres Seq. ID no. 15221441
  misc_feature (119)..(147): Pfam Name: Pfam Description:  EF hand
  misc_feature (1)..(151): NCBI GI NO: 15236276 NR Description: calcium-binding protein, putative
  misc_feature (1)..(147): NCBI GI NO: 15221358 NR Description: calcium-binding protein, putative
  misc_feature (1)..(147): NCBI GI NO: 28301674 NR Description: calcium-binding protein [Lotus japonicus]
  misc_feature (1)..(147): NCBI GI NO: 18406202 NR Description: calmodulin-like protein (MSS3)
  misc_feature (1)..(147): NCBI GI NO: 25295758 NR Description: probable calcium binding protein
  misc_feature (1)..(151): NCBI GI NO: 15231470 NR Description: calcium-binding protein, putative
  misc_feature (1)..(151): NCBI GI NO: 15235516 NR Description: calcium-binding protein, putative
  misc_feature (5)..(147): NCBI GI NO: 15231685 NR Description: calcium-binding protein, putative
  misc_feature (2)..(151): NCBI GI NO: 21740787 NR Description: OSJNBb0091E11.1
  misc_feature (5)..(144): NCBI GI NO: 4959165 NR Description: calmodulin mutant SYNCAM57D [synthetic construct]
MDSTELKRVFQMFDKDGDGRITQKELNESFKNLGIIIPENELSQMIEKIDVNGDGCVDVEEFGELYKSIMVQGEDEIGDEDMKEAFNVFDQNGDGFITVDELKTVLSSLGLKQGKTLEECRKMIIQVDVDGDGRVNYKEFRQMMKKGQILAQ

SEQ ID NO: 6852 - protein, 141 aa, Glycine max
  peptide (1)..(141): Ceres Seq. ID no. 15221442
  misc_feature (108)..(136): Pfam Name: Pfam Description:  EF hand
  misc_feature (1)..(140): NCBI GI NO: 15236276 NR Description: calcium-binding protein, putative
  misc_feature (1)..(136): NCBI GI NO: 15221358 NR Description: calcium-binding protein, putative
  misc_feature (1)..(136): NCBI GI NO: 28301674 NR Description: calcium-binding protein [Lotus japonicus]
  misc_feature (1)..(136): NCBI GI NO: 18406202 NR Description: calmodulin-like protein (MSS3)
  misc_feature (1)..(136): NCBI GI NO: 25295758 NR Description: probable calcium binding protein
  misc_feature (1)..(140): NCBI GI NO: 15231470 NR Description: calcium-binding protein, putative
  misc_feature (1)..(140): NCBI GI NO: 15235516 NR Description: calcium-binding protein, putative
  misc_feature (1)..(136): NCBI GI NO: 15231685 NR Description: calcium-binding protein, putative
  misc_feature (1)..(140): NCBI GI NO: 21740787 NR Description: OSJNBb0091E11.1
  misc_feature (1)..(133): NCBI GI NO: 4959165 NR Description: calmodulin mutant SYNCAM57D [synthetic construct]
MFDKDGDGRITQKELNESFKNLGIIIPENELSQMIEKIDVNGDGCVDVEEFGELYKSIMVQGEDEIGDEDMKEAFNVFDQNGDGFITVDELKTVLSSLGLKQGKTLEECRKMIIQVDVDGDGRVNYKEFRQMMKKGQILAQ

SEQ ID NO: 6853 - protein, 108 aa, Glycine max
  peptide (1)..(108): Ceres Seq. ID no. 15221443
  misc_feature (75)..(103): Pfam Name: Pfam Description:  EF hand
  misc_feature (1)..(107): NCBI GI NO: 15236276 NR Description: calcium-binding protein, putative
  misc_feature (1)..(103): NCBI GI NO: 15221358 NR Description: calcium-binding protein, putative
  misc_feature (1)..(103): NCBI GI NO: 28301674 NR Description: calcium-binding protein [Lotus japonicus]
  misc_feature (1)..(103): NCBI GI NO: 18406202 NR Description: calmodulin-like protein (MSS3)
  misc_feature (1)..(103): NCBI GI NO: 25295758 NR Description: probable calcium binding protein
  misc_feature (1)..(107): NCBI GI NO: 15231470 NR Description: calcium-binding protein, putative
  misc_feature (1)..(107): NCBI GI NO: 15235516 NR Description: calcium-binding protein, putative
  misc_feature (1)..(103): NCBI GI NO: 15231685 NR Description: calcium-binding protein, putative
  misc_feature (1)..(107): NCBI GI NO: 21740787 NR Description: OSJNBb0091E11.1
  misc_feature (1)..(100): NCBI GI NO: 4959165 NR Description: calmodulin mutant SYNCAM57D [synthetic construct]
MIEKIDVNGDGCVDVEEFGELYKSIMVQGEDEIGDEDMKEAFNVFDQNGDGFITVDELKTVLSSLGLKQGKTLEECRKMIIQVDVDGDGRVNYKEFRQMMKKGQILAQ

SEQ ID NO: 6854 - DNA, 926 bp, Glycine max
  misc_feature (1)..(926): Ceres Seq. ID no. 15224629
aaaattacaacctctctctctcgccgtctgctcgctcgctcgtcccccaaatcccaccccctccccgaccgaaccccagcggcgtcgccggcgatggagtgcgtcatcggcgtggtgggcagcgacttcgcggtggtggcggcggacacgtccgccgtgcagagcatcctcgtccacaagacggacgaggacaagatcatgctcctcgactcccacaagctcatgggcgcctccggggagcccggcgaccgcgtgcagttcaccgagttcatccagaagaacctccacctctaccagttccgcaacaacatgccgctcagcaccgccgccaccgccaacttcacccgcggcgagctcgccaccgccctgcgcaagaatccctactccgtaaacatcatacttgcagggtttgataaagacgctggtgcatcgatgtactacattgactacatcgcgacgctccacaagatcgacaagggagcattcgggtacgggtcgtacttctgtctgtcgctgatggacaagttgtaccgccctgacatgtctgtcgaggaagcggtagaccttgttgacaagtgcatcaaggagatcagactccggctggtcgtcgcgcctcagaatttcgccatcaagatcgtggacaaggatggcgccagggactatgctaggcgtgagatcggaggtgacagtcctgcagccgcaaccgcaaccgcagcagtagcaacaattgcctgaggtgattggccctgtcggtggtcatttggctgggtggaggctgaacccttcctgtcaattgtttccgagtactgtcactatgtaatcgcaatacgtttcggttcgagaactgtgttgcaaattctcccagatgtggactagtctgtttatgaccccctatttcatggttatatgtttcactgtttcttgcc

SEQ ID NO: 6855 - protein, 244 aa, Glycine max
  peptide (1)..(244): Ceres Seq. ID no. 15224630
  misc_feature (32)..(213): Pfam Name: Pfam Description:  Proteasome A-type and B-type
  misc_feature (32)..(244): NCBI GI NO: 27552546 NR Description: 20S proteasome beta 4 subunit
  misc_feature (32)..(244): NCBI GI NO: 17380213 NR Description: Proteasome subunit beta type 2
  misc_feature (32)..(224): NCBI GI NO: 15233580 NR Description: 20S proteasome beta subunit D2 (PBD2)
  misc_feature (32)..(225): NCBI GI NO: 15228805 NR Description: 20S proteasome beta subunit D (PBD1)
  misc_feature (32)..(165): NCBI GI NO: 14594929 NR Description: putative beta4 proteasome subunit
  misc_feature (32)..(220): NCBI GI NO: 29841035 NR Description: similar to NM_017284 proteasome
  misc_feature (32)..(220): NCBI GI NO: 19113828 NR Description: proteasome component; c7-I subfamily
  misc_feature (32)..(220): NCBI GI NO: 4506195 NR Description: proteasome beta 2 subunit
  misc_feature (32)..(220): NCBI GI NO: 30585195 NR Description: Homo sapiens proteasome
  misc_feature (32)..(217): NCBI GI NO: 8394079 NR Description: proteasome
KITTSLSRRLLARSSPKSHPLPDRTPAASPAMECVIGVVGSDFAVVAADTSAVQSILVHKTDEDKIMLLDSHKLMGASGEPGDRVQFTEFIQKNLHLYQFRNNMPLSTAATANFTRGELATALRKNPYSVNIILAGFDKDAGASMYYIDYIATLHKIDKGAFGYGSYFCLSLMDKLYRPDMSVEEAVDLVDKCIKEIRLRLVVAPQNFAIKIVDKDGARDYARREIGGDSPAAATATAAVATIA

SEQ ID NO: 6856 - protein, 213 aa, Glycine max
  peptide (1)..(213): Ceres Seq. ID no. 15224631
  misc_feature (1)..(182): Pfam Name: Pfam Description:  Proteasome A-type and B-type
  misc_feature (1)..(213): NCBI GI NO: 27552546 NR Description: 20S proteasome beta 4 subunit
  misc_feature (1)..(213): NCBI GI NO: 17380213 NR Description: Proteasome subunit beta type 2
  misc_feature (1)..(193): NCBI GI NO: 15233580 NR Description: 20S proteasome beta subunit D2 (PBD2)
  misc_feature (1)..(194): NCBI GI NO: 15228805 NR Description: 20S proteasome beta subunit D (PBD1)
  misc_feature (1)..(134): NCBI GI NO: 14594929 NR Description: putative beta4 proteasome subunit
  misc_feature (1)..(189): NCBI GI NO: 29841035 NR Description: similar to NM_017284 proteasome
  misc_feature (1)..(189): NCBI GI NO: 19113828 NR Description: proteasome component; c7-I subfamily
  misc_feature (1)..(189): NCBI GI NO: 4506195 NR Description: proteasome beta 2 subunit
  misc_feature (1)..(189): NCBI GI NO: 30585195 NR Description: Homo sapiens proteasome
  misc_feature (1)..(186): NCBI GI NO: 8394079 NR Description: proteasome
MECVIGVVGSDFAVVAADTSAVQSILVHKTDEDKIMLLDSHKLMGASGEPGDRVQFTEFIQKNLHLYQFRNNMPLSTAATANFTRGELATALRKNPYSVNIILAGFDKDAGASMYYIDYIATLHKIDKGAFGYGSYFCLSLMDKLYRPDMSVEEAVDLVDKCIKEIRLRLVVAPQNFAIKIVDKDGARDYARREIGGDSPAAATATAAVATIA

SEQ ID NO: 6857 - protein, 178 aa, Glycine max
  peptide (1)..(178): Ceres Seq. ID no. 15224632
  misc_feature (1)..(147): Pfam Name: Pfam Description:  Proteasome A-type and B-type
  misc_feature (1)..(178): NCBI GI NO: 27552546 NR Description: 20S proteasome beta 4 subunit
  misc_feature (1)..(178): NCBI GI NO: 17380213 NR Description: Proteasome subunit beta type 2
  misc_feature (1)..(158): NCBI GI NO: 15233580 NR Description: 20S proteasome beta subunit D2 (PBD2)
  misc_feature (1)..(159): NCBI GI NO: 15228805 NR Description: 20S proteasome beta subunit D (PBD1)
  misc_feature (1)..(99): NCBI GI NO: 14594929 NR Description: putative beta4 proteasome subunit
  misc_feature (1)..(154): NCBI GI NO: 29841035 NR Description: similar to NM_017284 proteasome
  misc_feature (1)..(154): NCBI GI NO: 19113828 NR Description: proteasome component; c7-I subfamily
  misc_feature (1)..(154): NCBI GI NO: 4506195 NR Description: proteasome beta 2 subunit
  misc_feature (1)..(154): NCBI GI NO: 30585195 NR Description: Homo sapiens proteasome
  misc_feature (1)..(151): NCBI GI NO: 8394079 NR Description: proteasome
MLLDSHKLMGASGEPGDRVQFTEFIQKNLHLYQFRNNMPLSTAATANFTRGELATALRKNPYSVNIILAGFDKDAGASMYYIDYIATLHKIDKGAFGYGSYFCLSLMDKLYRPDMSVEEAVDLVDKCIKEIRLRLVVAPQNFAIKIVDKDGARDYARREIGGDSPAAATATAAVATIA

SEQ ID NO: 6858 - DNA, 892 bp, Glycine max
  misc_feature (1)..(892): Ceres Seq. ID no. 13638917
ctctttcgctgcggctctcgcgactcatcctccccatcccaaaaccctcgaaaagcaaaggcggcggcgcgacatggcagaggtcgaagctgcgctcccggtggcggcgacagagaccccggaggtcgccgccgagggcgacgcgggtgcggccgaggcgaaggggccgcacaagctgcagcggcagtggaccttctggtacgacatccagaccaagcccaagcccggcgccgcctggggcacctcgctcaaaaagggctacaccttcgacaccgtcgaagagttctggtgcttgtatgatcagattttccgtccgagtaagctggtaggaagtgctgattttcatttattcaaggctggggtagaaccaaagtgggaagatccagagtgcgcaaatggaggcaaatggactgtgatatctagcaggaagaccaatcttgataccatgtggcttgaaacgtgtatggctctgattggagagcagttcgatgaaagccaggaaatttgtggtgttgttgctagtgtccgccagagacaggataagctttcattatggactaagactgccagtaacgaagctgttcaggtggacattggcaagaaatggaaggaggttattgactacaatgataagatggtctacagcttccacgatgactcaagaagtcagaaaccaagcagaggtggacgatacaccgtctaaggctgcacacatgatgaagaccgcagcttggaaaagtggccgtgtagtgttttaccgagattcgaaccgcctcagctaatgttgtttgaggcaattttccaatctactatgtcgttttgctctctgattgcttgtggtatgcagagatgtcgtatgcactcaattttcctcgcaatatcccttgatttt

SEQ ID NO: 6859 - protein, 233 aa, Glycine max
  peptide (1)..(233): Ceres Seq. ID no. 13638918
  misc_feature (30)..(233): Pfam Name: Pfam Description:  Eukaryotic initiation factor 4E
  misc_feature (25)..(233): NCBI GI NO: 547713 NR Description: EUKARYOTIC TRANSLATION INITIATION FACTOR 4E
  misc_feature (25)..(233): NCBI GI NO: 170753 NR Description: initiation factor (iso)4F p28 subunit
  misc_feature (25)..(233): NCBI GI NO: 37535224 NR Description: cap-binding protein p28
  misc_feature (25)..(233): NCBI GI NO: 1352442 NR Description: EUKARYOTIC TRANSLATION INITIATION FACTOR 4E
  misc_feature (28)..(233): NCBI GI NO: 6016335 NR Description: EUKARYOTIC TRANSLATION INITIATION FACTOR 4E
  misc_feature (47)..(233): NCBI GI NO: 32698526 NR Description: eukaryotic translation initiation factor iso4E
  misc_feature (13)..(224): NCBI GI NO: 2209274 NR Description: eukaryotic initiation factor (iso)-4F p28 subunit
  misc_feature (43)..(224): NCBI GI NO: 15238558 NR Description: eIF4Eiso protein (emb|CAA71579.1)
  misc_feature (38)..(233): NCBI GI NO: 32698524 NR Description: eukaryotic translation initiation factor 4E
  misc_feature (38)..(233): NCBI GI NO: 34905982 NR Description: eukaryotic translation initiation factor 4E
SFAAALATHPPHPKTLEKQRRRRDMAEVEAALPVAATETPEVAAEGDAGAAEAKGPHKLQRQWTFWYDIQTKPKPGAAWGTSLKKGYTFDTVEEFWCLYDQIFRPSKLVGSADFHLFKAGVEPKWEDPECANGGKWTVISSRKTNLDTMWLETCMALIGEQFDESQEICGVVASVRQRQDKLSLWTKTASNEAVQVDIGKKWKEVIDYNDKMVYSFHDDSRSQKPSRGGRYTV

SEQ ID NO: 6860 - protein, 209 aa, Glycine max
  peptide (1)..(209): Ceres Seq. ID no. 13638919
  misc_feature (6)..(209): Pfam Name: Pfam Description:  Eukaryotic initiation factor 4E
  misc_feature (1)..(209): NCBI GI NO: 547713 NR Description: EUKARYOTIC TRANSLATION INITIATION FACTOR 4E
  misc_feature (1)..(209): NCBI GI NO: 170753 NR Description: initiation factor (iso)4F p28 subunit
  misc_feature (1)..(209): NCBI GI NO: 37535224 NR Description: cap-binding protein p28
  misc_feature (1)..(209): NCBI GI NO: 1352442 NR Description: EUKARYOTIC TRANSLATION INITIATION FACTOR 4E
  misc_feature (4)..(209): NCBI GI NO: 6016335 NR Description: EUKARYOTIC TRANSLATION INITIATION FACTOR 4E
  misc_feature (23)..(209): NCBI GI NO: 32698526 NR Description: eukaryotic translation initiation factor iso4E
  misc_feature (1)..(200): NCBI GI NO: 2209274 NR Description: eukaryotic initiation factor (iso)-4F p28 subunit
  misc_feature (19)..(200): NCBI GI NO: 15238558 NR Description: eIF4Eiso protein (emb|CAA71579.1)
  misc_feature (14)..(209): NCBI GI NO: 32698524 NR Description: eukaryotic translation initiation factor 4E
  misc_feature (14)..(209): NCBI GI NO: 34905982 NR Description: eukaryotic translation initiation factor 4E
MAEVEAALPVAATETPEVAAEGDAGAAEAKGPHKLQRQWTFWYDIQTKPKPGAAWGTSLKKGYTFDTVEEFWCLYDQIFRPSKLVGSADFHLFKAGVEPKWEDPECANGGKWTVISSRKTNLDTMWLETCMALIGEQFDESQEICGVVASVRQRQDKLSLWTKTASNEAVQVDIGKKWKEVIDYNDKMVYSFHDDSRSQKPSRGGRYTV

SEQ ID NO: 6861 - DNA, 1105 bp, Glycine max
  misc_feature (1)..(1105): Ceres Seq. ID no. 14302008
atctccaaaaccatggatctctgcacttacttcaaatcccagccctcatggctcctcctcctcttcgccctcggctccctccaactcctcaaattcaccctctccctcctcaactccctctacatctacttcctccgccccgccaagaacctccgccgctacggctcctgggccatcatcaccggccccaccgacggcatcggcaaagccttcgcctttcagctcgcccgcaaggggctcaacctcgtcctcgtcgcccgcaaccccgacaagctcagagacgtctccgagtccatcagatccaagcactccaacgtcgagatcaagaccgtggtgatggacttctccggagatatcgatgatggagtgaggaggatcaaggagacgatcgaagggttggaggttgggattctgattaataacgcggggatgtcgtatccttacgcgaagtactttcacgaggtggatgaggagctgcttgggaacttgcttaagatcaatgttgaggggacgacgaaggttactcaggctgtgttggggaatatgctgaagaggaagcgaggggctattgttaatatgggttctggtgctgctgcgcttatcccttcgtatcctttctactctgtttacgccggtgctaaaacgtacgtggatcagttcacgaggtgtcttcatgttgagtacaagaagagtgggattgatgttcaatgccaggttcccttgtatgttgcgacaaagatgacatcaataagaagagcatcgttcttagtggcatctccagagggatacgcaaaggcagcactgcgttttgtagggtatgaagcacgctgcacaccttactggcctcacgccctcatgggttatgttgtctctgcattgcccgagagcgtctttgaatcctttaacattaagaggtgcctccagatcaggaagaaaggtatgcttaaagactcgaggaaaaaggaatgaaaacttttcgagggtgcatgattttcttctgcagcacttggtttcttgcaagtttctgtttagacttttgcaagacttgtacgctttagtttccgatgtttccaaggttgtttccttattttgaaaattaaaaacc

SEQ ID NO: 6862 - protein, 322 aa, Glycine max
  peptide (1)..(322): Ceres Seq. ID no. 14302009
  misc_feature (5)..(322): NCBI GI NO: 28565597 NR Description: putative 3-ketoacyl-CoA reductase 1
  misc_feature (5)..(322): NCBI GI NO: 28565601 NR Description: putative 3-ketoacyl-CoA reductase 2
  misc_feature (5)..(322): NCBI GI NO: 18408847 NR Description: short chain dehydrogenase/reductase family protein
  misc_feature (39)..(322): NCBI GI NO: 11072027 NR Description: F12A21.14 [Arabidopsis thaliana]
  misc_feature (74)..(322): NCBI GI NO: 2586125 NR Description: b-keto acyl reductase [Arabidopsis thaliana]
  misc_feature (10)..(321): NCBI GI NO: 7489413 NR Description: probable b-keto acyl reductase (EC 1
  misc_feature (113)..(322): NCBI GI NO: 13605726 NR Description: At1g67730/F12A21_31 [Arabidopsis thaliana]
  misc_feature (113)..(322): NCBI GI NO: 23505781 NR Description: At1g67730/F12A21_31 [Arabidopsis thaliana]
  misc_feature (10)..(321): NCBI GI NO: 7489808 NR Description: probable beta-keto acyl reductase - maize
  misc_feature (51)..(295): NCBI GI NO: 24432037 NR Description: steroid dehydrogenase-like [Homo sapiens]
ISKTMDLCTYFKSQPSWLLLLFALGSLQLLKFTLSLLNSLYIYFLRPAKNLRRYGSWAIITGPTDGIGKAFAFQLARKGLNLVLVARNPDKLRDVSESIRSKHSNVEIKTVVMDFSGDIDDGVRRIKETIEGLEVGILINNAGMSYPYAKYFHEVDEELLGNLLKINVEGTTKVTQAVLGNMLKRKRGAIVNMGSGAAALIPSYPFYSVYAGAKTYVDQFTRCLHVEYKKSGIDVQCQVPLYVATKMTSIRRASFLVASPEGYAKAALRFVGYEARCTPYWPHALMGYVVSALPESVFESFNIKRCLQIRKKGMLKDSRKKE

SEQ ID NO: 6863 - protein, 318 aa, Glycine max
  peptide (1)..(318): Ceres Seq. ID no. 14302010
  misc_feature (1)..(318): NCBI GI NO: 28565597 NR Description: putative 3-ketoacyl-CoA reductase 1
  misc_feature (1)..(318): NCBI GI NO: 28565601 NR Description: putative 3-ketoacyl-CoA reductase 2
  misc_feature (1)..(318): NCBI GI NO: 18408847 NR Description: short chain dehydrogenase/reductase family protein
  misc_feature (35)..(318): NCBI GI NO: 11072027 NR Description: F12A21.14 [Arabidopsis thaliana]
  misc_feature (70)..(318): NCBI GI NO: 2586125 NR Description: b-keto acyl reductase [Arabidopsis thaliana]
  misc_feature (6)..(317): NCBI GI NO: 7489413 NR Description: probable b-keto acyl reductase (EC 1
  misc_feature (109)..(318): NCBI GI NO: 13605726 NR Description: At1g67730/F12A21_31 [Arabidopsis thaliana]
  misc_feature (109)..(318): NCBI GI NO: 23505781 NR Description: At1g67730/F12A21_31 [Arabidopsis thaliana]
  misc_feature (6)..(317): NCBI GI NO: 7489808 NR Description: probable beta-keto acyl reductase - maize
  misc_feature (47)..(291): NCBI GI NO: 24432037 NR Description: steroid dehydrogenase-like [Homo sapiens]
MDLCTYFKSQPSWLLLLFALGSLQLLKFTLSLLNSLYIYFLRPAKNLRRYGSWAIITGPTDGIGKAFAFQLARKGLNLVLVARNPDKLRDVSESIRSKHSNVEIKTVVMDFSGDIDDGVRRIKETIEGLEVGILINNAGMSYPYAKYFHEVDEELLGNLLKINVEGTTKVTQAVLGNMLKRKRGAIVNMGSGAAALIPSYPFYSVYAGAKTYVDQFTRCLHVEYKKSGIDVQCQVPLYVATKMTSIRRASFLVASPEGYAKAALRFVGYEARCTPYWPHALMGYVVSALPESVFESFNIKRCLQIRKKGMLKDSRKKE

SEQ ID NO: 6864 - protein, 210 aa, Glycine max
  peptide (1)..(210): Ceres Seq. ID no. 14302011
  misc_feature (1)..(210): NCBI GI NO: 28565597 NR Description: putative 3-ketoacyl-CoA reductase 1
  misc_feature (1)..(210): NCBI GI NO: 28565601 NR Description: putative 3-ketoacyl-CoA reductase 2
  misc_feature (1)..(210): NCBI GI NO: 18408847 NR Description: short chain dehydrogenase/reductase family protein
  misc_feature (1)..(210): NCBI GI NO: 11072027 NR Description: F12A21.14 [Arabidopsis thaliana]
  misc_feature (1)..(210): NCBI GI NO: 2586125 NR Description: b-keto acyl reductase [Arabidopsis thaliana]
  misc_feature (1)..(209): NCBI GI NO: 7489413 NR Description: probable b-keto acyl reductase (EC 1
  misc_feature (1)..(210): NCBI GI NO: 13605726 NR Description: At1g67730/F12A21_31 [Arabidopsis thaliana]
  misc_feature (1)..(210): NCBI GI NO: 23505781 NR Description: At1g67730/F12A21_31 [Arabidopsis thaliana]
  misc_feature (1)..(209): NCBI GI NO: 7489808 NR Description: probable beta-keto acyl reductase - maize
  misc_feature (1)..(183): NCBI GI NO: 24432037 NR Description: steroid dehydrogenase-like [Homo sapiens]
MDFSGDIDDGVRRIKETIEGLEVGILINNAGMSYPYAKYFHEVDEELLGNLLKINVEGTTKVTQAVLGNMLKRKRGAIVNMGSGAAALIPSYPFYSVYAGAKTYVDQFTRCLHVEYKKSGIDVQCQVPLYVATKMTSIRRASFLVASPEGYAKAALRFVGYEARCTPYWPHALMGYVVSALPESVFESFNIKRCLQIRKKGMLKDSRKKE

SEQ ID NO: 6865 - DNA, 606 bp, Glycine max
  misc_feature (1)..(606): Ceres Seq. ID no. 12610977
agtgaaggagtcagcagtccagtccccccctgctgccggaagatatggcgatcgcgctcagattcgccgccaccccgccccgcctcgccgcgccgatacctccgacgagtgcccctcgcgcacatggaggagttgtgcgcgtcggcgcccagggcgggactcgctgtggcaggagactggcaatggcggccgcggattccgctcgctgtcgggccaagagagagggcgacggcgacggcgtcctcgcgggagtcgccgtccacggaggaaccggagcggaaggggaagatcagctgagcgtggtaatgaagttcggtggttcgtccgtgtcgtcggcggcgaagatgaaggaggtggcggggctcatccaagctttccccgaggagcggcccgtcgtcgtcctctccgccatggggaagaccaccaatctactcctcctcgtacgactgctttctggtcattttttcagacttacagccaaaaaaagttgtaaggctcactgtttcagtacatcaagaatcttcagtcacggaagtgttagttaaagtgaagtttgcatcttttgtcataatcaagctgaaattcgtcaagaatctgtcaagattc

SEQ ID NO: 6866 - protein, 166 aa, Glycine max
  peptide (1)..(166): Ceres Seq. ID no. 12610978
  misc_feature (1)..(132): NCBI GI NO: 34907074 NR Description: precursor monofunctional aspartokinase-like
  misc_feature (1)..(132): NCBI GI NO: 20161830 NR Description: putative aspartate kinase
  misc_feature (1)..(132): NCBI GI NO: 34897430 NR Description: putative aspartate kinase
  misc_feature (1)..(132): NCBI GI NO: 27573345 NR Description: putative aspartate kinase
  misc_feature (35)..(132): NCBI GI NO: 5305740 NR Description: precursor monofunctional aspartokinase
  misc_feature (2)..(132): NCBI GI NO: 34394346 NR Description: putative precursor monofunctional aspartokinase
  misc_feature (2)..(132): NCBI GI NO: 34394347 NR Description: putative precursor monofunctional aspartokinase
  misc_feature (43)..(132): NCBI GI NO: 4376158 NR Description: aspartate kinase [Arabidopsis thaliana]
  misc_feature (43)..(132): NCBI GI NO: 15240593 NR Description: aspartate kinase; protein id: At5g13280
  misc_feature (75)..(131): NCBI GI NO: 15241295 NR Description: lysine-sensitive aspartate kinase (gb|AAB63104
MAIALRFAATPPRLAAPIPPTSAPRAHGGVVRVGAQGGTRCGRRLAMAAADSARCRAKREGDGDGVLAGVAVHGGTGAEGEDQLSVVMKFGGSSVSSAAKMKEVAGLIQAFPEERPVVVLSAMGKTTNLLLLVRLLSGHFFRLTAKKSCKAHCFSTSRIFSHGSVS

SEQ ID NO: 6867 - protein, 163 aa, Glycine max
  peptide (1)..(163): Ceres Seq. ID no. 12610979
VKESAVQSPPAAGRYGDRAQIRRHPAPPRRADTSDECPSRTWRSCARRRPGRDSLWQETGNGGRGFRSLSGQERGRRRRRPRGSRRPRRNRSGRGRSAERGNEVRWFVRVVGGEDEGGGGAHPSFPRGAARRRPLRHGEDHQSTPPRTTAFWSFFQTYSQKKL

SEQ ID NO: 6868 - protein, 120 aa, Glycine max
  peptide (1)..(120): Ceres Seq. ID no. 12610980
  misc_feature (1)..(86): NCBI GI NO: 34907074 NR Description: precursor monofunctional aspartokinase-like
  misc_feature (1)..(86): NCBI GI NO: 20161830 NR Description: putative aspartate kinase
  misc_feature (1)..(86): NCBI GI NO: 34897430 NR Description: putative aspartate kinase
  misc_feature (1)..(86): NCBI GI NO: 27573345 NR Description: putative aspartate kinase
  misc_feature (1)..(86): NCBI GI NO: 5305740 NR Description: precursor monofunctional aspartokinase
  misc_feature (1)..(86): NCBI GI NO: 34394346 NR Description: putative precursor monofunctional aspartokinase
  misc_feature (1)..(86): NCBI GI NO: 34394347 NR Description: putative precursor monofunctional aspartokinase
  misc_feature (1)..(86): NCBI GI NO: 4376158 NR Description: aspartate kinase [Arabidopsis thaliana]
  misc_feature (1)..(86): NCBI GI NO: 15240593 NR Description: aspartate kinase; protein id: At5g13280
  misc_feature (29)..(85): NCBI GI NO: 15241295 NR Description: lysine-sensitive aspartate kinase (gb|AAB63104
MAAADSARCRAKREGDGDGVLAGVAVHGGTGAEGEDQLSVVMKFGGSSVSSAAKMKEVAGLIQAFPEERPVVVLSAMGKTTNLLLLVRLLSGHFFRLTAKKSCKAHCFSTSRIFSHGSVS

SEQ ID NO: 6869 - DNA, 980 bp, Glycine max
  misc_feature (1)..(980): Ceres Seq. ID no. 15173035
tacactccctctcttgttccatcacttctccgagagagtaaaacagttaactttatagtttttggatatatcagccaaaaggggtgtgaaagaacacaatgcaacaaagttcagcttcagggtcattgatgaagcaactgagtgtgaaggaggcttggaaatcaacatcaagtaggtggagtgggaaggacaagtatagcagtgttgggggagggagcattgaggggtgtgaggcaagtttgagccaaatggaaggtttttctatgtatgggaatgaggacaataatggggtggtgatggggaagaagagagtgatggtggtggtggatcacacttctcattccaagcatgcaatgatgtgggcactcactcatgtagctaataagggtgatttgctcactttgcttcatgttgtacctactcataggggttctgaatcttcttgctctacctatcttgtcaatcatcttggttcactttgcaaagattgcaagccagaggtggaagtggaagcacttgttatccaaggaccaaaactggccacagtgatgagccaagtgaagaagctggaggtttctctcttggtattgggccaaaagaagccctctcctctacttagctgcctgtgtggaagcaacagtatcagcagctcagaggagtttgctgagcactgcatcaacaatgcagaatgcttgacagtaggagtaaggaagagaagccaaggtaacaatggctacctcatcagcacaaggtggcagaagaacttctggctactggcttaaaaatttcgagttcttaactttagttaccagctatagttaggatctcacaaacaaaaaaaggggtcaaatgggaaaattaacacaataataatatgtacctcctgttctagttctaactacattgtcattgtactcatgatgtgactcggtggcatcaatttagttctatactatgattaatgaaacatgattgtgacc

SEQ ID NO: 6870 - protein, 227 aa, Glycine max
  peptide (1)..(227): Ceres Seq. ID no. 15173036
  misc_feature (70)..(204): Pfam Name: Pfam Description:  Universal stress protein family
  misc_feature (9)..(227): NCBI GI NO: 15219439 NR Description: expressed protein [Arabidopsis thaliana]
  misc_feature (24)..(227): NCBI GI NO: 34907308 NR Description: hypothetical protein~similar to Arabidopsisthaliana chromosome 1
  misc_feature (73)..(227): NCBI GI NO: 15227695 NR Description: expressed protein [Arabidopsis thaliana]
  misc_feature (32)..(227): NCBI GI NO: 15237955 NR Description: hypothetical protein [Arabidopsis thaliana]
  misc_feature (71)..(227): NCBI GI NO: 15228516 NR Description: hypothetical protein [Arabidopsis thaliana]
  misc_feature (124)..(227): NCBI GI NO: 37535148 NR Description: unknown protein
  misc_feature (68)..(105): NCBI GI NO: 37535148 NR Description: unknown protein
  misc_feature (121)..(227): NCBI GI NO: 18409190 NR Description: expressed protein [Arabidopsis thaliana]
  misc_feature (121)..(227): NCBI GI NO: 21592322 NR Description: unknown [Arabidopsis thaliana]
MQQSSASGSLMKQLSVKEAWKSTSSRWSGKDKYSSVGGGSIEGCEASLSQMEGFSMYGNEDNNGVVMGKKRVMVVVDHTSHSKHAMMWALTHVANKGDLLTLLHVVPTHRGSESSCSTYLVNHLGSLCKDCKPEVEVEALVIQGPKLATVMSQVKKLEVSLLVLGQKKPSPLLSCLCGSNSISSSEEFAEHCINNAECLTVGVRKRSQGNNGYLISTRWQKNFWLLA

SEQ ID NO: 6871 - protein, 217 aa, Glycine max
  peptide (1)..(217): Ceres Seq. ID no. 15173037
  misc_feature (60)..(194): Pfam Name: Pfam Description:  Universal stress protein family
  misc_feature (1)..(217): NCBI GI NO: 15219439 NR Description: expressed protein [Arabidopsis thaliana]
  misc_feature (14)..(217): NCBI GI NO: 34907308 NR Description: hypothetical protein~similar to Arabidopsisthaliana chromosome 1
  misc_feature (63)..(217): NCBI GI NO: 15227695 NR Description: expressed protein [Arabidopsis thaliana]
  misc_feature (22)..(217): NCBI GI NO: 15237955 NR Description: hypothetical protein [Arabidopsis thaliana]
  misc_feature (61)..(217): NCBI GI NO: 15228516 NR Description: hypothetical protein [Arabidopsis thaliana]
  misc_feature (114)..(217): NCBI GI NO: 37535148 NR Description: unknown protein
  misc_feature (58)..(95): NCBI GI NO: 37535148 NR Description: unknown protein
  misc_feature (111)..(217): NCBI GI NO: 18409190 NR Description: expressed protein [Arabidopsis thaliana]
  misc_feature (111)..(217): NCBI GI NO: 21592322 NR Description: unknown [Arabidopsis thaliana]
MKQLSVKEAWKSTSSRWSGKDKYSSVGGGSIEGCEASLSQMEGFSMYGNEDNNGVVMGKKRVMVVVDHTSHSKHAMMWALTHVANKGDLLTLLHVVPTHRGSESSCSTYLVNHLGSLCKDCKPEVEVEALVIQGPKLATVMSQVKKLEVSLLVLGQKKPSPLLSCLCGSNSISSSEEFAEHCINNAECLTVGVRKRSQGNNGYLISTRWQKNFWLLA

SEQ ID NO: 6872 - protein, 177 aa, Glycine max
  peptide (1)..(177): Ceres Seq. ID no. 15173038
  misc_feature (20)..(154): Pfam Name: Pfam Description:  Universal stress protein family
  misc_feature (1)..(177): NCBI GI NO: 15219439 NR Description: expressed protein [Arabidopsis thaliana]
  misc_feature (1)..(177): NCBI GI NO: 34907308 NR Description: hypothetical protein~similar to Arabidopsisthaliana chromosome 1
  misc_feature (23)..(177): NCBI GI NO: 15227695 NR Description: expressed protein [Arabidopsis thaliana]
  misc_feature (1)..(177): NCBI GI NO: 15237955 NR Description: hypothetical protein [Arabidopsis thaliana]
  misc_feature (21)..(177): NCBI GI NO: 15228516 NR Description: hypothetical protein [Arabidopsis thaliana]
  misc_feature (74)..(177): NCBI GI NO: 37535148 NR Description: unknown protein
  misc_feature (18)..(55): NCBI GI NO: 37535148 NR Description: unknown protein
  misc_feature (71)..(177): NCBI GI NO: 18409190 NR Description: expressed protein [Arabidopsis thaliana]
  misc_feature (71)..(177): NCBI GI NO: 21592322 NR Description: unknown [Arabidopsis thaliana]
MEGFSMYGNEDNNGVVMGKKRVMVVVDHTSHSKHAMMWALTHVANKGDLLTLLHVVPTHRGSESSCSTYLVNHLGSLCKDCKPEVEVEALVIQGPKLATVMSQVKKLEVSLLVLGQKKPSPLLSCLCGSNSISSSEEFAEHCINNAECLTVGVRKRSQGNNGYLISTRWQKNFWLLA

SEQ ID NO: 6873 - DNA, 1225 bp, Glycine max
  misc_feature (1)..(1225): Ceres Seq. ID no. 15177862
aaaccttatcccttcccccaaagcacagcgagagagaaagtaaagtgagccatgtctgcctctgcttcctccctttccctttcttccttcaaccctaaatccctccctctctgcatttcccgctccgcctccgttctcccaccttccctctccttcaaactctactccatcttcgcttcctccgccgtcaaatgctcctcctcccccgcccaacacccgtcgcgtttcgccagaaacgtggccgtatcatcggatttcgaggtggaggaagacgacgtgttcaccgacgatgactctcccccgccgcagcaagagcgcagctcctccttctccgcggacctcaaactcttcgtcggtaacctctccttcgatgtggatagcgctcagctcgctcagttgtttgagagcgccgggactgttgagatggttgaggttatctatgataaagtgactggcagaagcagaggttttggatttgtgacaatgtccactgcagctgaagtcgaagcagctgctcagcagtttaatggctatgaacttgagggcagagctttgagggttaacgctggccctcctccacctaagagggaggaatcattctccaggggaccaagaagtggtggttacggttcagaacgttctggttacggctctgaacgttccggctacgggtctcaacgttcaggacgttctggttacgggtctgagcgttccagctatggttctgggtcaggttcgggctcaggctcaggttcaggttcatcagaccgtgtgtatgtgggaaacctttcgtggggtgtggatgacacggctcttgagagcttgttcagcgagcaaggaaaggttgttgaggccagggtcatttacgacagggacactggtcgatccaagggttttgggtttgtgacactcggctctcctcaagaggtcacacgagccatcaactctttgaatggcgcagatttggatggaagacagattagagtctcggaggctgaggctagaccaccaaggcgccagttttgagcgaccatgtcacttcactgctctcaaagaaatgcagattcttgaggtgtatcatgtatgtcatcttggctgacgaacaagctatctatgtttcgagttttgggctttgtttctttattttaagtcgttttgggctttgcttttatttttgcagactacttacggttttggacttttacttctttcttcattatgctcg

SEQ ID NO: 6874 - protein, 324 aa, Glycine max
  peptide (1)..(324): Ceres Seq. ID no. 15177863
  misc_feature (99)..(170): Pfam Name: a.k.a. RRM, RBD, or RNP domain Pfam Description: RNA recognition motif.
  misc_feature (1)..(324): NCBI GI NO: 30693824 NR Description: 29 kDa ribonucleoprotein, chloroplast
  misc_feature (1)..(324): NCBI GI NO: 15231817 NR Description: 29 kDa ribonucleoprotein, chloroplast
  misc_feature (11)..(324): NCBI GI NO: 681904 NR Description: cp29 [Arabidopsis thaliana]
  misc_feature (1)..(208): NCBI GI NO: 15228102 NR Description: 29 kDa ribonucleoprotein, chloroplast
  misc_feature (207)..(324): NCBI GI NO: 15228102 NR Description: 29 kDa ribonucleoprotein, chloroplast
  misc_feature (1)..(208): NCBI GI NO: 21617920 NR Description: putative RNA-binding protein
  misc_feature (207)..(324): NCBI GI NO: 21617920 NR Description: putative RNA-binding protein
  misc_feature (1)..(191): NCBI GI NO: 12230584 NR Description: 29 kDa ribonucleoprotein A, chloroplast precursor
  misc_feature (214)..(324): NCBI GI NO: 12230584 NR Description: 29 kDa ribonucleoprotein A, chloroplast precursor
  misc_feature (1)..(201): NCBI GI NO: 1350820 NR Description: 30 kDa ribonucleoprotein, chloroplast precursor
MSASASSLSLSSFNPKSLPLCISRSASVLPPSLSFKLYSIFASSAVKCSSSPAQHPSRFARNVAVSSDFEVEEDDVFTDDDSPPPQQERSSSFSADLKLFVGNLSFDVDSAQLAQLFESAGTVEMVEVIYDKVTGRSRGFGFVTMSTAAEVEAAAQQFNGYELEGRALRVNAGPPPPKREESFSRGPRSGGYGSERSGYGSERSGYGSQRSGRSGYGSERSSYGSGSGSGSGSGSGSSDRVYVGNLSWGVDDTALESLFSEQGKVVEARVIYDRDTGRSKGFGFVTLGSPQEVTRAINSLNGADLDGRQIRVSEAEARPPRRQF

SEQ ID NO: 6875 - protein, 200 aa, Glycine max
  peptide (1)..(200): Ceres Seq. ID no. 15177864
  misc_feature (117)..(188): Pfam Name: a.k.a. RRM, RBD, or RNP domain Pfam Description: RNA recognition motif.
  misc_feature (1)..(200): NCBI GI NO: 30693824 NR Description: 29 kDa ribonucleoprotein, chloroplast
  misc_feature (1)..(200): NCBI GI NO: 15231817 NR Description: 29 kDa ribonucleoprotein, chloroplast
  misc_feature (1)..(200): NCBI GI NO: 681904 NR Description: cp29 [Arabidopsis thaliana]
  misc_feature (1)..(84): NCBI GI NO: 15228102 NR Description: 29 kDa ribonucleoprotein, chloroplast
  misc_feature (83)..(200): NCBI GI NO: 15228102 NR Description: 29 kDa ribonucleoprotein, chloroplast
  misc_feature (1)..(84): NCBI GI NO: 21617920 NR Description: putative RNA-binding protein
  misc_feature (83)..(200): NCBI GI NO: 21617920 NR Description: putative RNA-binding protein
  misc_feature (1)..(67): NCBI GI NO: 12230584 NR Description: 29 kDa ribonucleoprotein A, chloroplast precursor
  misc_feature (90)..(200): NCBI GI NO: 12230584 NR Description: 29 kDa ribonucleoprotein A, chloroplast precursor
  misc_feature (1)..(77): NCBI GI NO: 1350820 NR Description: 30 kDa ribonucleoprotein, chloroplast precursor
MVEVIYDKVTGRSRGFGFVTMSTAAEVEAAAQQFNGYELEGRALRVNAGPPPPKREESFSRGPRSGGYGSERSGYGSERSGYGSQRSGRSGYGSERSSYGSGSGSGSGSGSGSSDRVYVGNLSWGVDDTALESLFSEQGKVVEARVIYDRDTGRSKGFGFVTLGSPQEVTRAINSLNGADLDGRQIRVSEAEARPPRRQF

SEQ ID NO: 6876 - protein, 180 aa, Glycine max
  peptide (1)..(180): Ceres Seq. ID no. 15177865
  misc_feature (97)..(168): Pfam Name: a.k.a. RRM, RBD, or RNP domain Pfam Description: RNA recognition motif.
  misc_feature (1)..(180): NCBI GI NO: 30693824 NR Description: 29 kDa ribonucleoprotein, chloroplast
  misc_feature (1)..(180): NCBI GI NO: 15231817 NR Description: 29 kDa ribonucleoprotein, chloroplast
  misc_feature (1)..(180): NCBI GI NO: 681904 NR Description: cp29 [Arabidopsis thaliana]
  misc_feature (1)..(64): NCBI GI NO: 15228102 NR Description: 29 kDa ribonucleoprotein, chloroplast
  misc_feature (63)..(180): NCBI GI NO: 15228102 NR Description: 29 kDa ribonucleoprotein, chloroplast
  misc_feature (1)..(64): NCBI GI NO: 21617920 NR Description: putative RNA-binding protein
  misc_feature (63)..(180): NCBI GI NO: 21617920 NR Description: putative RNA-binding protein
  misc_feature (1)..(47): NCBI GI NO: 12230584 NR Description: 29 kDa ribonucleoprotein A, chloroplast precursor
  misc_feature (70)..(180): NCBI GI NO: 12230584 NR Description: 29 kDa ribonucleoprotein A, chloroplast precursor
  misc_feature (1)..(57): NCBI GI NO: 1350820 NR Description: 30 kDa ribonucleoprotein, chloroplast precursor
MSTAAEVEAAAQQFNGYELEGRALRVNAGPPPPKREESFSRGPRSGGYGSERSGYGSERSGYGSQRSGRSGYGSERSSYGSGSGSGSGSGSGSSDRVYVGNLSWGVDDTALESLFSEQGKVVEARVIYDRDTGRSKGFGFVTLGSPQEVTRAINSLNGADLDGRQIRVSEAEARPPRRQF

SEQ ID NO: 6877 - DNA, 878 bp, Glycine max
  misc_feature (1)..(878): Ceres Seq. ID no. 15172729
aacatcaaagcagcaagcagcacggaggtccaacaatggcggagaagggagtgaaggtgtttggcatgtgggcgagcccgatggccatccgggtggagtgggcgctccggctgaagggcgtcgggtacgagtacgtcgacgaggacctcgccagcaagagcgacgcgctgctccgccacaacccggtgaccaagaaggtgccggtgctggtccacgacggcaagccgatcgccgagtccaccatcatcgtcgagtacatcgacgaggcgtggaaggacggctaccccatcatgccggccgacccctacgaccgggctcaggcgaggttctgggccaggttcgccgacgacaagtgcaacgccgccatcttcccggtcttcacggcgaccggcgaggcgcagcgcgaggtggtgcgcgaggcccagcggtgcctgaagacgctggagaaggccctggaggggaagaagttcttcgggggcgacgccgtcggctacctcgacgtcgtggttgggtggtacgcgtattggctgcccatcatcgaggaggtctccggcgccgacgtggtcaccgacgaggagctgcctctgatgaaggcctggttcggccggttcctggccgtcgacgtggtgaaggagaccctgcccccgagggacaagctcctggcgctcaacaaggctcgccgtgagcagctctcggcgtagagcagcacttgttccgagccttccagctagtacttaagcttctgccatggattatccatgatggataaataagcggcgagcatttgcacattgtgcaacaaatgtttggagcttctttcagccgcctgcttcacactcccagtttccgttatataaacttcacccatgatgttatat

SEQ ID NO: 6878 - protein, 232 aa, Glycine max
  peptide (1)..(232): Ceres Seq. ID no. 15172730
  misc_feature (97)..(207): Pfam Name: Pfam Description:  Glutathione S-transferase, C-terminal domain
  misc_feature (12)..(230): NCBI GI NO: 11385523 NR Description: glutathione S-transferase GST 36 [Zea mays]
  misc_feature (13)..(232): NCBI GI NO: 15430731 NR Description: putative glutathione S-transferase OsGSTU17
  misc_feature (21)..(230): NCBI GI NO: 11385497 NR Description: glutathione S-transferase GST 23 [Zea mays]
  misc_feature (12)..(232): NCBI GI NO: 10567808 NR Description: putative glutathione S-transferase T3
  misc_feature (17)..(232): NCBI GI NO: 11385443 NR Description: glutathione S-transferase GST 14 [Glycine max]
  misc_feature (12)..(230): NCBI GI NO: 11385449 NR Description: glutathione S-transferase GST 17 [Glycine max]
  misc_feature (13)..(230): NCBI GI NO: 11385533 NR Description: glutathione S-transferase GST 41 [Zea mays]
  misc_feature (12)..(232): NCBI GI NO: 11385509 NR Description: glutathione S-transferase GST 29 [Zea mays]
  misc_feature (12)..(221): NCBI GI NO: 4996842 NR Description: Dcarg-1 [Daucus carota]
  misc_feature (14)..(232): NCBI GI NO: 417148 NR Description: PROBABLE GLUTATHIONE S-TRANSFERASE
HQSSKQHGGPTMAEKGVKVFGMWASPMAIRVEWALRLKGVGYEYVDEDLASKSDALLRHNPVTKKVPVLVHDGKPIAESTIIVEYIDEAWKDGYPIMPADPYDRAQARFWARFADDKCNAAIFPVFTATGEAQREVVREAQRCLKTLEKALEGKKFFGGDAVGYLDVVVGWYAYWLPIIEEVSGADVVTDEELPLMKAWFGRFLAVDVVKETLPPRDKLLALNKARREQLSA

SEQ ID NO: 6879 - protein, 227 aa, Glycine max
  peptide (1)..(227): Ceres Seq. ID no. 15172731
TSKQQAARRSNNGGEGSEGVWHVGEPDGHPGGVGAPAEGRRVRVRRRGPRQQERRAAPPQPGDQEGAGAGPRRQADRRVHHHRRVHRRGVEGRLPHHAGRPLRPGSGEVLGQVRRRQVQRRHLPGLHGDRRGAARGGARGPAVPEDAGEGPGGEEVLRGRRRRLPRRRGWVVRVLAAHHRGGLRRRRGHRRGAASDEGLVRPVPGRRRGEGDPAPEGQAPGAQQGSP

SEQ ID NO: 6880 - protein, 221 aa, Glycine max
  peptide (1)..(221): Ceres Seq. ID no. 15172732
  misc_feature (86)..(196): Pfam Name: Pfam Description:  Glutathione S-transferase, C-terminal domain
  misc_feature (1)..(219): NCBI GI NO: 11385523 NR Description: glutathione S-transferase GST 36 [Zea mays]
  misc_feature (2)..(221): NCBI GI NO: 15430731 NR Description: putative glutathione S-transferase OsGSTU17
  misc_feature (10)..(219): NCBI GI NO: 11385497 NR Description: glutathione S-transferase GST 23 [Zea mays]
  misc_feature (1)..(221): NCBI GI NO: 10567808 NR Description: putative glutathione S-transferase T3
  misc_feature (6)..(221): NCBI GI NO: 11385443 NR Description: glutathione S-transferase GST 14 [Glycine max]
  misc_feature (1)..(219): NCBI GI NO: 11385449 NR Description: glutathione S-transferase GST 17 [Glycine max]
  misc_feature (2)..(219): NCBI GI NO: 11385533 NR Description: glutathione S-transferase GST 41 [Zea mays]
  misc_feature (1)..(221): NCBI GI NO: 11385509 NR Description: glutathione S-transferase GST 29 [Zea mays]
  misc_feature (1)..(210): NCBI GI NO: 4996842 NR Description: Dcarg-1 [Daucus carota]
  misc_feature (3)..(221): NCBI GI NO: 417148 NR Description: PROBABLE GLUTATHIONE S-TRANSFERASE
MAEKGVKVFGMWASPMAIRVEWALRLKGVGYEYVDEDLASKSDALLRHNPVTKKVPVLVHDGKPIAESTIIVEYIDEAWKDGYPIMPADPYDRAQARFWARFADDKCNAAIFPVFTATGEAQREVVREAQRCLKTLEKALEGKKFFGGDAVGYLDVVVGWYAYWLPIIEEVSGADVVTDEELPLMKAWFGRFLAVDVVKETLPPRDKLLALNKARREQLSA

SEQ ID NO: 6881 - DNA, 721 bp, Glycine max
  misc_feature (1)..(721): Ceres Seq. ID no. 13595008
cgcacgaggatcaacagcagcagagagaagcaaaccggccggccggcgagatggcgcaggagagcctgaggctggtgtgcccgccggtgtcggcgcacgaggggcggctgccgcggcagtacacgctggaggggcagggcgcgaagaaggacatctcgccgccgctggagtggtacggggtgcccgacggcacgcggtcgctggcggtggtggtgcaggacgtcgacgcggacgagcgggtgccgtggacgcactgggtggtcgtcaacatctcgcccgaggagaaggggctgcccgagggcttctccggcgccgggggcaacgccaacgccggcggcggcgacggcggcgtccaggagggggtcaacgactggaagcagcccgggtggcgcggccccgtcccggactcccacggccaccgcatccagttccggctctacgcgctcgacgacgtgctcagcctcggcaacaaggtgactgtggacaaggtcatggaggccatcgaggggcacgtgctgggggaggccgagatcacggccgtgttctaaggagttcttgtggattttgacactcggctctgtgtgtgtgtgtgacctgcttgttacttcttgcgaattgtgtgtggtctgttctgtagcgtgcctgtatacgcatggccacgagcagcctttgtaattttgatccaataaatgaagtgacttcttatcagccgggtacggtt

SEQ ID NO: 6882 - protein, 188 aa, Glycine max
  peptide (1)..(188): Ceres Seq. ID no. 13595009
  misc_feature (1)..(135): NCBI GI NO: 775215 NR Description: EBNA1 [Herpesvirus papio]
  misc_feature (1)..(143): NCBI GI NO: 9625624 NR Description: nuclear antigen EBNA1 [Human herpesvirus 4]
  misc_feature (2)..(156): NCBI GI NO: 538695 NR Description: hypothetical protein
  misc_feature (6)..(150): NCBI GI NO: 29788817 NR Description: hypothetical protein
  misc_feature (18)..(174): NCBI GI NO: 9453857 NR Description: EBNA-1 [Cynomolgus Epstein-Barr Virus TsB-B6]
ARGSTAAERSKPAGRRDGAGEPEAGVPAGVGARGAAAAAVHAGGAGREEGHLAAAGVVRGARRHAVAGGGGAGRRRGRAGAVDALGGRQHLARGEGAARGLLRRRGQRQRRRRRRRRPGGGQRLEAARVARPRPGLPRPPHPVPALRARRRAQPRQQGDCGQGHGGHRGARAGGGRDHGRVLRSSCGF

SEQ ID NO: 6883 - protein, 181 aa, Glycine max
  peptide (1)..(181): Ceres Seq. ID no. 13595010
  misc_feature (17)..(181): NCBI GI NO: 26017213 NR Description: cold regulated protein [Triticum aestivum]
  misc_feature (17)..(181): NCBI GI NO: 10799810 NR Description: cold-regulated protein
  misc_feature (17)..(180): NCBI GI NO: 15240946 NR Description: expressed protein [Arabidopsis thaliana]
  misc_feature (34)..(181): NCBI GI NO: 15678301 NR Description: conserved protein
  misc_feature (34)..(181): NCBI GI NO: 21673435 NR Description: conserved hypothetical protein
  misc_feature (15)..(181): NCBI GI NO: 23054005 NR Description: hypothetical protein [Geobacter metallireducens]
  misc_feature (21)..(181): NCBI GI NO: 17548245 NR Description: CONSERVED HYPOTHETICAL PROTEIN
  misc_feature (49)..(181): NCBI GI NO: 30248206 NR Description: conserved hypothetical protein
  misc_feature (5)..(177): NCBI GI NO: 20090292 NR Description: hypothetical protein (multi-domain)
  misc_feature (30)..(181): NCBI GI NO: 11499288 NR Description: conserved hypothetical protein
HEDQQQQREANRPAGEMAQESLRLVCPPVSAHEGRLPRQYTLEGQGAKKDISPPLEWYGVPDGTRSLAVVVQDVDADERVPWTHWVVVNISPEEKGLPEGFSGAGGNANAGGGDGGVQEGVNDWKQPGWRGPVPDSHGHRIQFRLYALDDVLSLGNKVTVDKVMEAIEGHVLGEAEITAVF

SEQ ID NO: 6884 - protein, 165 aa, Glycine max
  peptide (1)..(165): Ceres Seq. ID no. 13595011
  misc_feature (1)..(165): NCBI GI NO: 26017213 NR Description: cold regulated protein [Triticum aestivum]
  misc_feature (1)..(165): NCBI GI NO: 10799810 NR Description: cold-regulated protein
  misc_feature (1)..(164): NCBI GI NO: 15240946 NR Description: expressed protein [Arabidopsis thaliana]
  misc_feature (18)..(165): NCBI GI NO: 15678301 NR Description: conserved protein
  misc_feature (18)..(165): NCBI GI NO: 21673435 NR Description: conserved hypothetical protein
  misc_feature (1)..(165): NCBI GI NO: 23054005 NR Description: hypothetical protein [Geobacter metallireducens]
  misc_feature (5)..(165): NCBI GI NO: 17548245 NR Description: CONSERVED HYPOTHETICAL PROTEIN
  misc_feature (33)..(165): NCBI GI NO: 30248206 NR Description: conserved hypothetical protein
  misc_feature (1)..(161): NCBI GI NO: 20090292 NR Description: hypothetical protein (multi-domain)
  misc_feature (14)..(165): NCBI GI NO: 11499288 NR Description: conserved hypothetical protein
MAQESLRLVCPPVSAHEGRLPRQYTLEGQGAKKDISPPLEWYGVPDGTRSLAVVVQDVDADERVPWTHWVVVNISPEEKGLPEGFSGAGGNANAGGGDGGVQEGVNDWKQPGWRGPVPDSHGHRIQFRLYALDDVLSLGNKVTVDKVMEAIEGHVLGEAEITAVF

SEQ ID NO: 6885 - DNA, 410 bp, Glycine max
  misc_feature (1)..(410): Ceres Seq. ID no. 13595367
acagccacatcctaggtcaccatggcttcttctccctctccgtcggctgctcgtgccctgctcgtcctcgccgcagcagctctggtgctgagctctgtgtcagccgcggctggctcgccgccgcttgccaagggcctgtcgttcgacttctacagcgccaagtgcccgcaggcggaggccatcgtcttctccttcctcaaggacgccgtccgcaaggacgtcggcctcgccgcggcgctcctccgcatccacttccacgactgcttcgtgcagggctgcgacggctccgtgctcctcgacamgaccamcggcgtcgacagcgagaaggtgtctcctccgaacgtcacsctccgtccgtccgcgttcaaggccatcaacgccatccgcgcgctcctccagagkgcgtgcgg

SEQ ID NO: 6886 - protein, 136 aa, Glycine max
  peptide (1)..(136): Ceres Seq. ID no. 13595368
  misc_feature (100)..(100): Xaa is any aa, unknown or other
  misc_feature (102)..(102): Xaa is any aa, unknown or other
  misc_feature (116)..(116): Xaa is any aa, unknown or other
  misc_feature (134)..(134): Xaa is any aa, unknown or other
SHILGHHGFFSLSVGCSCPARPRRSSSGAELCVSRGWLAAACQGPVVRLLQRQVPAGGGHRLLLPQGRRPQGRRPRRGAPPHPLPRLLRAGLRRLRAPRXDXRRRQREGVSSERHXPSVRVQGHQRHPRAPPEXVR

SEQ ID NO: 6887 - protein, 129 aa, Glycine max
  peptide (1)..(129): Ceres Seq. ID no. 13595369
  misc_feature (55)..(128): Pfam Name: Pfam Description:  Peroxidase
  misc_feature (1)..(128): NCBI GI NO: 34905834 NR Description: putative peroxidase
  misc_feature (1)..(128): NCBI GI NO: 34905826 NR Description: putative peroxidase
  misc_feature (12)..(128): NCBI GI NO: 82410 NR Description: peroxidase (EC 1.11.1.7) BP1 precursor - barley
  misc_feature (10)..(128): NCBI GI NO: 22001285 NR Description: peroxidase 1 [Triticum aestivum]
  misc_feature (8)..(128): NCBI GI NO: 34905838 NR Description: putative peroxidase
  misc_feature (33)..(128): NCBI GI NO: 2624498 NR Description: Crystal Structure Of Barley Grain Peroxidase 1
  misc_feature (3)..(128): NCBI GI NO: 100603 NR Description: peroxidase (EC 1.11.1.7) BP-2A precursor - barley
  misc_feature (3)..(128): NCBI GI NO: 421984 NR Description: peroxidase (EC 1.11.1.7) BP-2B - barley
  misc_feature (1)..(128): NCBI GI NO: 34905830 NR Description: putative peroxidase
  misc_feature (1)..(128): NCBI GI NO: 478409 NR Description: peroxidase (EC 1.11.1.7), cationic - adzuki bean
  misc_feature (94)..(94): Xaa is any aa, unknown or other
  misc_feature (96)..(96): Xaa is any aa, unknown or other
  misc_feature (109)..(109): Xaa is any aa, unknown or other
  misc_feature (127)..(127): Xaa is any aa, unknown or other
MASSPSPSAARALLVLAAAALVLSSVSAAAGSPPLAKGLSFDFYSAKCPQAEAIVFSFLKDAVRKDVGLAAALLRIHFHDCFVQGCDGSVLLDXTXGVDSEKVSPPNVXLRPSAFKAINAIRALLQXAC

SEQ ID NO: 6888 - DNA, 1213 bp, Glycine max
  misc_feature (1)..(1213): Ceres Seq. ID no. 15177104
aaagccaaaagaaaccaaaccgaatcaagccgattatctgccggatcgaatttccgagggatggcaaccggtagcgaagctggaaagcccgcggaggtcgtgctggagtggcctaagcaggacaaaaagaggatgctgcatgctgtttaccgtgtgggagatctggaccgtaccattaagtgttacacagaatgctttgggatgaagctgttgaggaaaagagatgttcctgaagagaagtacaccaatgcgtttcttgggtttggacctgaggacactaattttgcacttgagctgacttacaagtatggtgttgacaagtatgacattggagcgggctttggacattttgccatcgcaaatgaggatgtgtacaagctggctgagacaattaaatcatcttcttgttgtaagatcactcgtgaacctggtcctgtcaagggagggtccactgtgattgcctttgcacaagacccagatggttacatgttcgagcttatccagaggggtccgacgcctgagcctctctgtcaagttatgcttcgtgttggtgaccttgatcggtctatcatgttctacgagaaggcccttgggatgaagcttctgaggaaaaaagatgtgcctcagtacaagtacacaattgccatgatgggctatgccgaggaggataagaccactgttctggagttgacatacaactatggtgtcacagaatataacaagggcaatgcatatgctcaggttgctattggcactgacgatgtgtacaagagtgctgaagcagttgagctggttaccaaagaactaggtggaaagattctacggcagcctgggccactaccggggctgaacacgaagatcacctctttccttgaccccgatggctggaaagtggttctggtggatcatgcggacttcctcaaggaactccactaaagatcagcaggccccacgcccgggagttgttgaagaggcaaaccttatgcagcaatggtctttgatgtaataaaatggcagcctcttccgctcgaccaacaaaaataaaagctactgtaccaccgaatacctatgccgtgattggcctagttagaggacttgctctgtacagtatgtgctatgatcgctgaacatgaatactcctactactgagatgggtctgcatgcgcagtcggagagtggtttccaatgatctgatatgttttctacctctgtt

SEQ ID NO: 6889 - protein, 311 aa, Glycine max
  peptide (1)..(311): Ceres Seq. ID no. 15177105
  misc_feature (44)..(166): Pfam Name: Pfam Description:  Glyoxalase/Bleomycin resistance protein/Dioxygenasesuperfamily
  misc_feature (21)..(310): NCBI GI NO: 4126809 NR Description: glyoxalase I
  misc_feature (21)..(310): NCBI GI NO: 16580747 NR Description: glyoxalase I
  misc_feature (21)..(310): NCBI GI NO: 1808684 NR Description: hypothetical protein [Sporobolus stapfianus]
  misc_feature (21)..(310): NCBI GI NO: 2213425 NR Description: hypothetical protein [Citrus x paradisi]
  misc_feature (7)..(310): NCBI GI NO: 15220397 NR Description: glyoxalase I, putative (lactoylglutathione lyase)
  misc_feature (7)..(310): NCBI GI NO: 21537360 NR Description: glyoxalase I, putative [Arabidopsis thaliana]
  misc_feature (31)..(310): NCBI GI NO: 15221116 NR Description: glyoxalase I, putative (lactoylglutathione lyase)
  misc_feature (31)..(310): NCBI GI NO: 15810219 NR Description: putative lactoylglutathione lyase
  misc_feature (34)..(310): NCBI GI NO: 2494843 NR Description: Putative lactoylglutathione lyase
  misc_feature (7)..(310): NCBI GI NO: 25350143 NR Description: protein F1N21.10 [imported] - Arabidopsis thaliana
KAKRNQTESSRLSAGSNFRGMATGSEAGKPAEVVLEWPKQDKKRMLHAVYRVGDLDRTIKCYTECFGMKLLRKRDVPEEKYTNAFLGFGPEDTNFALELTYKYGVDKYDIGAGFGHFAIANEDVYKLAETIKSSSCCKITREPGPVKGGSTVIAFAQDPDGYMFELIQRGPTPEPLCQVMLRVGDLDRSIMFYEKALGMKLLRKKDVPQYKYTIAMMGYAEEDKTTVLELTYNYGVTEYNKGNAYAQVAIGTDDVYKSAEAVELVTKELGGKILRQPGPLPGLNTKITSFLDPDGWKVVLVDHADFLKELH

SEQ ID NO: 6890 - protein, 291 aa, Glycine max
  peptide (1)..(291): Ceres Seq. ID no. 15177106
  misc_feature (24)..(146): Pfam Name: Pfam Description:  Glyoxalase/Bleomycin resistance protein/Dioxygenasesuperfamily
  misc_feature (1)..(290): NCBI GI NO: 4126809 NR Description: glyoxalase I
  misc_feature (1)..(290): NCBI GI NO: 16580747 NR Description: glyoxalase I
  misc_feature (1)..(290): NCBI GI NO: 1808684 NR Description: hypothetical protein [Sporobolus stapfianus]
  misc_feature (1)..(290): NCBI GI NO: 2213425 NR Description: hypothetical protein [Citrus x paradisi]
  misc_feature (1)..(290): NCBI GI NO: 15220397 NR Description: glyoxalase I, putative (lactoylglutathione lyase)
  misc_feature (1)..(290): NCBI GI NO: 21537360 NR Description: glyoxalase I, putative [Arabidopsis thaliana]
  misc_feature (11)..(290): NCBI GI NO: 15221116 NR Description: glyoxalase I, putative (lactoylglutathione lyase)
  misc_feature (11)..(290): NCBI GI NO: 15810219 NR Description: putative lactoylglutathione lyase
  misc_feature (14)..(290): NCBI GI NO: 2494843 NR Description: Putative lactoylglutathione lyase
  misc_feature (1)..(290): NCBI GI NO: 25350143 NR Description: protein F1N21.10 [imported] - Arabidopsis thaliana
MATGSEAGKPAEVVLEWPKQDKKRMLHAVYRVGDLDRTIKCYTECFGMKLLRKRDVPEEKYTNAFLGFGPEDTNFALELTYKYGVDKYDIGAGFGHFAIANEDVYKLAETIKSSSCCKITREPGPVKGGSTVIAFAQDPDGYMFELIQRGPTPEPLCQVMLRVGDLDRSIMFYEKALGMKLLRKKDVPQYKYTIAMMGYAEEDKTTVLELTYNYGVTEYNKGNAYAQVAIGTDDVYKSAEAVELVTKELGGKILRQPGPLPGLNTKITSFLDPDGWKVVLVDHADFLKELH

SEQ ID NO: 6891 - protein, 267 aa, Glycine max
  peptide (1)..(267): Ceres Seq. ID no. 15177107
  misc_feature (1)..(122): Pfam Name: Pfam Description:  Glyoxalase/Bleomycin resistance protein/Dioxygenasesuperfamily
  misc_feature (1)..(266): NCBI GI NO: 4126809 NR Description: glyoxalase I
  misc_feature (1)..(266): NCBI GI NO: 16580747 NR Description: glyoxalase I
  misc_feature (1)..(266): NCBI GI NO: 1808684 NR Description: hypothetical protein [Sporobolus stapfianus]
  misc_feature (1)..(266): NCBI GI NO: 2213425 NR Description: hypothetical protein [Citrus x paradisi]
  misc_feature (1)..(266): NCBI GI NO: 15220397 NR Description: glyoxalase I, putative (lactoylglutathione lyase)
  misc_feature (1)..(266): NCBI GI NO: 21537360 NR Description: glyoxalase I, putative [Arabidopsis thaliana]
  misc_feature (1)..(266): NCBI GI NO: 15221116 NR Description: glyoxalase I, putative (lactoylglutathione lyase)
  misc_feature (1)..(266): NCBI GI NO: 15810219 NR Description: putative lactoylglutathione lyase
  misc_feature (1)..(266): NCBI GI NO: 2494843 NR Description: Putative lactoylglutathione lyase
  misc_feature (1)..(266): NCBI GI NO: 25350143 NR Description: protein F1N21.10 [imported] - Arabidopsis thaliana
MLHAVYRVGDLDRTIKCYTECFGMKLLRKRDVPEEKYTNAFLGFGPEDTNFALELTYKYGVDKYDIGAGFGHFAIANEDVYKLAETIKSSSCCKITREPGPVKGGSTVIAFAQDPDGYMFELIQRGPTPEPLCQVMLRVGDLDRSIMFYEKALGMKLLRKKDVPQYKYTIAMMGYAEEDKTTVLELTYNYGVTEYNKGNAYAQVAIGTDDVYKSAEAVELVTKELGGKILRQPGPLPGLNTKITSFLDPDGWKVVLVDHADFLKELH

SEQ ID NO: 6892 - DNA, 828 bp, Glycine max
  misc_feature (1)..(828): Ceres Seq. ID no. 13595187
acactctttctctcaatttctctctcttttaaaacactaatcactaaaatcttgattcactatatcgtcaaaaccaacgctaaatcaattaaactctctcaaagaaaacaagacaaagccctacttttgatggattcagggtcacaacgaccggggcctgttagcgaaggcgatccgggtccgtccatcgtaaccccctcttcaccgcctgcgacgcctagcaggtacgagtcgcagaaacgacgtgactggaccacgttcttgcagtacctcaagaaccacaagccgcctctttccttgtcacggtgtagcggagcacatgccatcgagttcctcaagtacttagatcagttcggtaagaccaaagtccacgtggcggcatgtccttactttggccatcagcaacctccgtctccttgcgcttgtcctctcaagcaagcctgggggtctctcgatgccctgatcggacggttgagagcagcctacgaagagaacggtggacggcccgagtcgaacccgttcgcggcacgtgcggttaggatttacttgagggaagtcagagaaagtcaagccaaggcccgtgggagaccctacgagaaaaagaaacggaaacggccaacaactgttaccaccgtgagagttgacgttgcttcgtcgagacaaagtgaaggagatggttgtaacatcggtgatccgtcgtatgtggccgaggctgtacctccttaattaagttattattattgtcatgatatattaaatacattatatatgtctggaactcacatcaccttcttgagttaactattgaaaatatttttgttctagttc

SEQ ID NO: 6893 - protein, 241 aa, Glycine max
  peptide (1)..(241): Ceres Seq. ID no. 13595188
  misc_feature (58)..(189): Pfam Name: DUF640 Pfam Description: Protein of unknown function
  misc_feature (45)..(241): NCBI GI NO: 18390725 NR Description: expressed protein [Arabidopsis thaliana]
  misc_feature (51)..(231): NCBI GI NO: 34907938 NR Description: B1088C09.17
  misc_feature (56)..(226): NCBI GI NO: 15237680 NR Description: hypothetical protein [Arabidopsis thaliana]
  misc_feature (47)..(206): NCBI GI NO: 38344650 NR Description: OSJNBb0072M01.12
  misc_feature (57)..(206): NCBI GI NO: 37535384 NR Description: hypothetical protein
  misc_feature (42)..(221): NCBI GI NO: 18402578 NR Description: expressed protein [Arabidopsis thaliana]
  misc_feature (55)..(222): NCBI GI NO: 18406012 NR Description: expressed protein [Arabidopsis thaliana]
  misc_feature (61)..(224): NCBI GI NO: 15241821 NR Description: expressed protein [Arabidopsis thaliana]
  misc_feature (67)..(204): NCBI GI NO: 15229310 NR Description: hypothetical protein [Arabidopsis thaliana]
  misc_feature (47)..(205): NCBI GI NO: 18412120 NR Description: expressed protein [Arabidopsis thaliana]
TLFLSISLSFKTLITKILIHYIVKTNAKSIKLSQRKQDKALLLMDSGSQRPGPVSEGDPGPSIVTPSSPPATPSRYESQKRRDWTTFLQYLKNHKPPLSLSRCSGAHAIEFLKYLDQFGKTKVHVAACPYFGHQQPPSPCACPLKQAWGSLDALIGRLRAAYEENGGRPESNPFAARAVRIYLREVRESQAKARGRPYEKKKRKRPTTVTTVRVDVASSRQSEGDGCNIGDPSYVAEAVPP

SEQ ID NO: 6894 - protein, 198 aa, Glycine max
  peptide (1)..(198): Ceres Seq. ID no. 13595189
  misc_feature (15)..(146): Pfam Name: DUF640 Pfam Description: Protein of unknown function
  misc_feature (2)..(198): NCBI GI NO: 18390725 NR Description: expressed protein [Arabidopsis thaliana]
  misc_feature (8)..(188): NCBI GI NO: 34907938 NR Description: B1088C09.17
  misc_feature (13)..(183): NCBI GI NO: 15237680 NR Description: hypothetical protein [Arabidopsis thaliana]
  misc_feature (4)..(163): NCBI GI NO: 38344650 NR Description: OSJNBb0072M01.12
  misc_feature (14)..(163): NCBI GI NO: 37535384 NR Description: hypothetical protein
  misc_feature (1)..(178): NCBI GI NO: 18402578 NR Description: expressed protein [Arabidopsis thaliana]
  misc_feature (12)..(179): NCBI GI NO: 18406012 NR Description: expressed protein [Arabidopsis thaliana]
  misc_feature (18)..(181): NCBI GI NO: 15241821 NR Description: expressed protein [Arabidopsis thaliana]
  misc_feature (24)..(161): NCBI GI NO: 15229310 NR Description: hypothetical protein [Arabidopsis thaliana]
  misc_feature (4)..(162): NCBI GI NO: 18412120 NR Description: expressed protein [Arabidopsis thaliana]
MDSGSQRPGPVSEGDPGPSIVTPSSPPATPSRYESQKRRDWTTFLQYLKNHKPPLSLSRCSGAHAIEFLKYLDQFGKTKVHVAACPYFGHQQPPSPCACPLKQAWGSLDALIGRLRAAYEENGGRPESNPFAARAVRIYLREVRESQAKARGRPYEKKKRKRPTTVTTVRVDVASSRQSEGDGCNIGDPSYVAEAVPP

SEQ ID NO: 6895 - DNA, 1404 bp, Glycine max
  misc_feature (1)..(1404): Ceres Seq. ID no. 12610323
aacaatgtcagatctgccgccggaaaaccccaatctgccgctcacttcatcgtcttcctctttgcaccattcctacagccggaagcagaaatctctgggccttctttgcaccaatttcctagctctgtacaatcgacatggaatcgaaaccattgggcttgatgacgccgcctccaaattaggagttgagagacggagaatctacgatattgttaatgttctggagagtgttggggttttaacaaaaagagcgaagaatcagtatacgtggaaaggattttctgcgattccggcagcgttgaaggagctacaagaagaaggtgctaaggacactttccaccgtttttataccaacgagaatgtcaaagtatctgatgatgaagatgatgaggaagagtcttcttctcagcctctttctagtagccagactgatacctccaaacctggctcccttgattcctctaaaatagataatcgacgagagaaatctttaggactgcttactcagaactttatcaagctctttgtttgctctgaagctaggatcatctcccttgacgaggctgcaaaattactacttggagatgcccacaatacatcaataatgagaacaaaagtgaggcggctttatgatattgcgaatgtcttgtcatcaatgaatctcattgagaagactcacaccttagattctagaaaaccagctttcaaatggttaggatacaatggtgagcctactttcacactcagcagcgatttgatgcaagccgaatcaacgaagagagtttttggaactgatctcactaacgtcagtgtcaagagaagcagaacccatgaaaatgctaccgagaggaggataaagatgaaacaacacgcaatagcagatagttcttataatcaaagctctgatgatgctcatgaatcaagacgctacaagtttggtctttttgcaccagccgctggtggtacatatccagctgctcgtttggaggacaactccaagagagcttttgatgttgagaatctagtttcggattatcgtcctacttaccaaaatcaagttttgaaagacctctttgcgcattacatggacgcttggaagtcatggtacagcgaagtcacgcagaagaatccattaccagatacatcaaaacgccattagagatattcttaatcttctcttactagtgaacatttcgttttgaccaatgtgggtttagtttctccacacaaattttaacggcaggaatccgacattttaagatgcagactgcaccatctctgtgccttcactgtaggctgtttagaaatcatcttttgcttgattccaatgccagttgtatgtaacttatatataatccccatcttttatttttaaagaatctcaaaagtgaaaacctaggttct

SEQ ID NO: 6896 - protein, 385 aa, Glycine max
  peptide (1)..(385): Ceres Seq. ID no. 12610324
  misc_feature (26)..(92): Pfam Name: TDP Pfam Description: Transcription factor E2F/dimerisation partner
  misc_feature (2)..(383): NCBI GI NO: 22331664 NR Description: DP-E2F-like protein 1; protein id: At3g48160
  misc_feature (2)..(358): NCBI GI NO: 30692988 NR Description: DP-E2F-related protein 1 [Arabidopsis thaliana]
  misc_feature (51)..(358): NCBI GI NO: 7487385 NR Description: hypothetical protein T24C20
  misc_feature (25)..(372): NCBI GI NO: 22330789 NR Description: DP-E2F-like protein 3; protein id: At3g01330
  misc_feature (25)..(352): NCBI GI NO: 6094551 NR Description: hypothetical protein [Arabidopsis thaliana]
  misc_feature (25)..(371): NCBI GI NO: 15242176 NR Description: DP-E2F-like 2; protein id: At5g14960
  misc_feature (25)..(212): NCBI GI NO: 19578317 NR Description: transcription factor E2Ff [Arabidopsis thaliana]
  misc_feature (26)..(342): NCBI GI NO: 29741773 NR Description: similar to Transcription factor E2F dimerisationpartner
  misc_feature (26)..(239): NCBI GI NO: 26334515 NR Description: unnamed protein product [Mus musculus]
  misc_feature (26)..(340): NCBI GI NO: 40254337 NR Description: E2F transcription factor 7 [Mus musculus]
TMSDLPPENPNLPLTSSSSSLHHSYSRKQKSLGLLCTNFLALYNRHGIETIGLDDAASKLGVERRRIYDIVNVLESVGVLTKRAKNQYTWKGFSAIPAALKELQEEGAKDTFHRFYTNENVKVSDDEDDEEESSSQPLSSSQTDTSKPGSLDSSKIDNRREKSLGLLTQNFIKLFVCSEARIISLDEAAKLLLGDAHNTSIMRTKVRRLYDIANVLSSMNLIEKTHTLDSRKPAFKWLGYNGEPTFTLSSDLMQAESTKRVFGTDLTNVSVKRSRTHENATERRIKMKQHAIADSSYNQSSDDAHESRRYKFGLFAPAAGGTYPAARLEDNSKRAFDVENLVSDYRPTYQNQVLKDLFAHYMDAWKSWYSEVTQKNPLPDTSKRH

SEQ ID NO: 6897 - protein, 384 aa, Glycine max
  peptide (1)..(384): Ceres Seq. ID no. 12610325
  misc_feature (25)..(91): Pfam Name: TDP Pfam Description: Transcription factor E2F/dimerisation partner
  misc_feature (1)..(382): NCBI GI NO: 22331664 NR Description: DP-E2F-like protein 1; protein id: At3g48160
  misc_feature (1)..(357): NCBI GI NO: 30692988 NR Description: DP-E2F-related protein 1 [Arabidopsis thaliana]
  misc_feature (50)..(357): NCBI GI NO: 7487385 NR Description: hypothetical protein T24C20
  misc_feature (24)..(371): NCBI GI NO: 22330789 NR Description: DP-E2F-like protein 3; protein id: At3g01330
  misc_feature (24)..(351): NCBI GI NO: 6094551 NR Description: hypothetical protein [Arabidopsis thaliana]
  misc_feature (24)..(370): NCBI GI NO: 15242176 NR Description: DP-E2F-like 2; protein id: At5g14960
  misc_feature (24)..(211): NCBI GI NO: 19578317 NR Description: transcription factor E2Ff [Arabidopsis thaliana]
  misc_feature (25)..(341): NCBI GI NO: 29741773 NR Description: similar to Transcription factor E2F dimerisationpartner
  misc_feature (25)..(238): NCBI GI NO: 26334515 NR Description: unnamed protein product [Mus musculus]
  misc_feature (25)..(339): NCBI GI NO: 40254337 NR Description: E2F transcription factor 7 [Mus musculus]
MSDLPPENPNLPLTSSSSSLHHSYSRKQKSLGLLCTNFLALYNRHGIETIGLDDAASKLGVERRRIYDIVNVLESVGVLTKRAKNQYTWKGFSAIPAALKELQEEGAKDTFHRFYTNENVKVSDDEDDEEESSSQPLSSSQTDTSKPGSLDSSKIDNRREKSLGLLTQNFIKLFVCSEARIISLDEAAKLLLGDAHNTSIMRTKVRRLYDIANVLSSMNLIEKTHTLDSRKPAFKWLGYNGEPTFTLSSDLMQAESTKRVFGTDLTNVSVKRSRTHENATERRIKMKQHAIADSSYNQSSDDAHESRRYKFGLFAPAAGGTYPAARLEDNSKRAFDVENLVSDYRPTYQNQVLKDLFAHYMDAWKSWYSEVTQKNPLPDTSKRH

SEQ ID NO: 6898 - DNA, 1147 bp, Glycine max
  misc_feature (1)..(1147): Ceres Seq. ID no. 13595271
accattacctagaacatcctaatcgaaaacagccctacctgccattttcctccgttcgttcatctccttcgcctcgccaccgtccctcctcctctcttccctccctcatccctcatctcgtgtcggctcgaaagtcgaaaccctagaccaaccaccctcccctagtacgtaggaacagggacagagatgtatgcagaccagatctccaccggccgcaagcgctccatccatgaccgccttgacgccgacctcccctccgaccgcggcggcgcggacgccgccggccgggctcgtaacgcgctgtccaagaggcaacgacaaactgatgataaatggaagcatgatctttaccgggatgatgaatcagcttcaagatcagttgatccacgggatttgcgattcaagcttcagaagaaaagctctcagcaagggtttgctggccaaaagggttccggggtacgtgatctacgtgagatgttatctggaacaatgcacgcacaaccatcaaatgttgaccctcaaaagaggaaaccggtgtcagaggttgtgaaagtcacaaggcgtgaaattgttgatgaaaggcctgtacgcctaagtaagaaagtatcaaaaccatcaacatccaagaagacttctcagccaaaggctgaaagtccactcgacagttttctgaaatcacttggacttgagaagtattctattaccttccaggcggaggaggttgacatggcggccctacgtcacatgactgaaagtgatctcaaggcgttgggcatcccgatgggtcctaggaagaagattacccttgccttggaatccagagcgtagggcaatgtccctggagtacaatgtagaaaagcagggagatgtggtaggtttttgctcatctgcaaatttggcatatcttggaaagcagtggtacaggtaaacaatgcggtgtctcttgtaatggcatgttgctgtaagattattagactgctgttgtttatctggtctgcatgctttcctggccagaccagctgatttaactgatgaggtatccgtgctgttgaagctgcggtgatgttctcgctgtatactattattatgccttttttttcattggaaactggcattattagagtaatagagttgagattcttcagtc

SEQ ID NO: 6899 - protein, 213 aa, Glycine max
  peptide (1)..(213): Ceres Seq. ID no. 13595272
  misc_feature (153)..(209): Pfam Name: Sterile alpha motif Pfam Description: SAM domain
  misc_feature (1)..(199): NCBI GI NO: 39546279 NR Description: OSJNBa0083D01.12
  misc_feature (1)..(212): NCBI GI NO: 18397861 NR Description: expressed protein [Arabidopsis thaliana]
  misc_feature (1)..(209): NCBI GI NO: 30695517 NR Description: expressed protein [Arabidopsis thaliana]
  misc_feature (140)..(209): NCBI GI NO: 38345636 NR Description: OSJNBb0048E02.6
  misc_feature (143)..(211): NCBI GI NO: 22330538 NR Description: expressed protein [Arabidopsis thaliana]
MYADQISTGRKRSIHDRLDADLPSDRGGADAAGRARNALSKRQRQTDDKWKHDLYRDDESASRSVDPRDLRFKLQKKSSQQGFAGQKGSGVRDLREMLSGTMHAQPSNVDPQKRKPVSEVVKVTRREIVDERPVRLSKKVSKPSTSKKTSQPKAESPLDSFLKSLGLEKYSITFQAEEVDMAALRHMTESDLKALGIPMGPRKKITLALESRA

SEQ ID NO: 6900 - protein, 119 aa, Glycine max
  peptide (1)..(119): Ceres Seq. ID no. 13595273
MQTRSPPAASAPSMTALTPTSPPTAAARTPPAGLVTRCPRGNDKLMINGSMIFTGMMNQLQDQLIHGICDSSFRRKALSKGLLAKRVPGYVIYVRCYLEQCTHNHQMLTLKRGNRCQRL

SEQ ID NO: 6901 - protein, 117 aa, Glycine max
  peptide (1)..(117): Ceres Seq. ID no. 13595274
  misc_feature (57)..(113): Pfam Name: Sterile alpha motif Pfam Description: SAM domain
  misc_feature (1)..(103): NCBI GI NO: 39546279 NR Description: OSJNBa0083D01.12
  misc_feature (1)..(116): NCBI GI NO: 18397861 NR Description: expressed protein [Arabidopsis thaliana]
  misc_feature (1)..(113): NCBI GI NO: 30695517 NR Description: expressed protein [Arabidopsis thaliana]
  misc_feature (44)..(113): NCBI GI NO: 38345636 NR Description: OSJNBb0048E02.6
  misc_feature (47)..(115): NCBI GI NO: 22330538 NR Description: expressed protein [Arabidopsis thaliana]
MLSGTMHAQPSNVDPQKRKPVSEVVKVTRREIVDERPVRLSKKVSKPSTSKKTSQPKAESPLDSFLKSLGLEKYSITFQAEEVDMAALRHMTESDLKALGIPMGPRKKITLALESRA

SEQ ID NO: 6902 - DNA, 1061 bp, Glycine max
  misc_feature (1)..(1061): Ceres Seq. ID no. 13595183
gctaggttttcagtctctcgcctccaccagcgcctccacgccgccgaggaacggagcaggaagtgacgccggaggaggacgctctgctcgtcgtccgccgcatctcgcgcccgcccaacccgaacgccccgaaaggccaccaaagccgtagccttcttcttcctagagctcccgcagcatgtcggcatccaccagcggcggcggggggctctcgccgcaggcggccgcggcgctccaggagggcgtcgggctggtgttcatgcggtggacggcgctgcagatggcggtggagaacgggtggggcggccgcgactcccgcgccaaggccgaccggctcgccgccgacgtcctcgccttcttcaccacctccaaaggtccatattattatgatgacttggaggagatgatgtttgacagcatatccgaatccttcaatgctgactttgaggatggaagtgttggggaggttgctgaacaagtattgattatgcatgaagaatgcctgcaaaacaactattcgtcgattgagaagctaaggaacacacgtgctcaaggaaatgctgtttcccaaagtagaatgatggtaactgatgaaggcgatgatagctcggatgatagctcggacgatgacgacggcgatgaaccagccagcgcagatgatatgtcggtggatgagccaaagcctcccaagcctgcccctgacgctgatgggtggactgttgtgccaccgaagcgcggcggccggggcaagaattaagcacagaagcaaaccctggcaacaaactgccatctgagaggccgttttggtctgaaggctttgaggtgtgattagcaaaaccttggcaaccacttcctgccacttgtgccattttggtcttggaggttttgaagtgttgcgcttcacctgtattacttcgattttgtcaggaatgttggttgtgtagcatgttttccttggttactctcttggtgttcagacttggcggcgaaagatctggattgtaagcgggtctgacatatccttatgcacattttgaactgatgcttatctgtatcgtcgc

SEQ ID NO: 6903 - protein, 192 aa, Glycine max
  peptide (1)..(192): Ceres Seq. ID no. 13595184
  misc_feature (11)..(191): NCBI GI NO: 15241108 NR Description: expressed protein [Arabidopsis thaliana]
  misc_feature (11)..(186): NCBI GI NO: 27545344 NR Description: hypothetical protein DT1P1A10 (human) - like
  misc_feature (17)..(162): NCBI GI NO: 23613422 NR Description: hypothetical protein [Plasmodium falciparum 3D7]
  misc_feature (10)..(186): NCBI GI NO: 24308388 NR Description: hypothetical protein DT1P1A10 [Homo sapiens]
  misc_feature (30)..(186): NCBI GI NO: 19483873 NR Description: 2310007F12Rik protein [Mus musculus]
  misc_feature (30)..(186): NCBI GI NO: 30424736 NR Description: RIKEN cDNA 2310007F12 [Mus musculus]
  misc_feature (22)..(186): NCBI GI NO: 27708338 NR Description: similar to hypothetical protein DT1P1A10
  misc_feature (12)..(165): NCBI GI NO: 23489768 NR Description: hypothetical protein [Plasmodium yoelii yoelii]
  misc_feature (15)..(157): NCBI GI NO: 40745755 NR Description: hypothetical protein AN2079.2
  misc_feature (30)..(186): NCBI GI NO: 39588127 NR Description: Hypothetical protein CBG13670
MSASTSGGGGLSPQAAAALQEGVGLVFMRWTALQMAVENGWGGRDSRAKADRLAADVLAFFTTSKGPYYYDDLEEMMFDSISESFNADFEDGSVGEVAEQVLIMHEECLQNNYSSIEKLRNTRAQGNAVSQSRMMVTDEGDDSSDDSSDDDDGDEPASADDMSVDEPKPPKPAPDADGWTVVPPKRGGRGKN

SEQ ID NO: 6904 - protein, 165 aa, Glycine max
  peptide (1)..(165): Ceres Seq. ID no. 13595185
  misc_feature (1)..(164): NCBI GI NO: 15241108 NR Description: expressed protein [Arabidopsis thaliana]
  misc_feature (1)..(159): NCBI GI NO: 27545344 NR Description: hypothetical protein DT1P1A10 (human) - like
  misc_feature (1)..(135): NCBI GI NO: 23613422 NR Description: hypothetical protein [Plasmodium falciparum 3D7]
  misc_feature (1)..(159): NCBI GI NO: 24308388 NR Description: hypothetical protein DT1P1A10 [Homo sapiens]
  misc_feature (3)..(159): NCBI GI NO: 19483873 NR Description: 2310007F12Rik protein [Mus musculus]
  misc_feature (3)..(159): NCBI GI NO: 30424736 NR Description: RIKEN cDNA 2310007F12 [Mus musculus]
  misc_feature (1)..(159): NCBI GI NO: 27708338 NR Description: similar to hypothetical protein DT1P1A10
  misc_feature (1)..(138): NCBI GI NO: 23489768 NR Description: hypothetical protein [Plasmodium yoelii yoelii]
  misc_feature (1)..(130): NCBI GI NO: 40745755 NR Description: hypothetical protein AN2079.2
  misc_feature (3)..(159): NCBI GI NO: 39588127 NR Description: Hypothetical protein CBG13670
MRWTALQMAVENGWGGRDSRAKADRLAADVLAFFTTSKGPYYYDDLEEMMFDSISESFNADFEDGSVGEVAEQVLIMHEECLQNNYSSIEKLRNTRAQGNAVSQSRMMVTDEGDDSSDDSSDDDDGDEPASADDMSVDEPKPPKPAPDADGWTVVPPKRGGRGKN

SEQ ID NO: 6905 - protein, 158 aa, Glycine max
  peptide (1)..(158): Ceres Seq. ID no. 13595186
  misc_feature (1)..(157): NCBI GI NO: 15241108 NR Description: expressed protein [Arabidopsis thaliana]
  misc_feature (1)..(152): NCBI GI NO: 27545344 NR Description: hypothetical protein DT1P1A10 (human) - like
  misc_feature (1)..(128): NCBI GI NO: 23613422 NR Description: hypothetical protein [Plasmodium falciparum 3D7]
  misc_feature (1)..(152): NCBI GI NO: 24308388 NR Description: hypothetical protein DT1P1A10 [Homo sapiens]
  misc_feature (1)..(152): NCBI GI NO: 19483873 NR Description: 2310007F12Rik protein [Mus musculus]
  misc_feature (1)..(152): NCBI GI NO: 30424736 NR Description: RIKEN cDNA 2310007F12 [Mus musculus]
  misc_feature (1)..(152): NCBI GI NO: 27708338 NR Description: similar to hypothetical protein DT1P1A10
  misc_feature (1)..(131): NCBI GI NO: 23489768 NR Description: hypothetical protein [Plasmodium yoelii yoelii]
  misc_feature (1)..(123): NCBI GI NO: 40745755 NR Description: hypothetical protein AN2079.2
  misc_feature (1)..(152): NCBI GI NO: 39588127 NR Description: Hypothetical protein CBG13670
MAVENGWGGRDSRAKADRLAADVLAFFTTSKGPYYYDDLEEMMFDSISESFNADFEDGSVGEVAEQVLIMHEECLQNNYSSIEKLRNTRAQGNAVSQSRMMVTDEGDDSSDDSSDDDDGDEPASADDMSVDEPKPPKPAPDADGWTVVPPKRGGRGKN

SEQ ID NO: 6906 - DNA, 931 bp, Glycine max
  misc_feature (1)..(931): Ceres Seq. ID no. 12611212
gcggtgtgaacgatgggctctctgtcggactcgcaggcgaatggcgaccgtcagccgccgccggcggaggcggaggatgccgggccgcaggtcgaggagggagataccggcgagaagatggagggcgtcgcatccatcgcgctgctaccctctggcgccatctccggccacttcatccgcctcccggactccgcctgctacggcctccagggcaccccgataccatgcgagagggaatgtagccgaggagatgattaccgccttataaagctatccatcattaattttaagaggaagacagagaaggtggttgtggtggaatgcaggggacatgatgctgctcgattacaaaacattgaccatttgcatggatgggaagatgacgttgttggactggttcaaaagaaacatgggaataagaaagtcttggtctctttcgaatgcgagacgctgaaggctgataaagccgctgaagaacatattagcaagtatatgccaaatctttgcggactggacgcagttgtaaacacggggaagatgagtatctccggcatcaacctagacgaggacgatgaaccaagcggcgacagctgagagcagaaacacgttgtcaatgtgttagctgcgacggtttctctgcctcgtcgatgccgtcgacaaagcaggactgtgtgtcgctgttacccacagcatgagttttatgcaacaaatcagcacttgtgcacttgaaacggagcgctgtgtagcaagtgtatacctaaacggaatgtgtgttgctgttgctgcctctggcatgatcctgctgaggcgattgtacacccttggacctaggtttggtgttgggtgggccattggcggcgcaagccttcgtccccgcccgtgctgtttgtcacgcatgtacgggcagatatcttgcatttcctgtttcctc

SEQ ID NO: 6907 - protein, 193 aa, Glycine max
  peptide (1)..(193): Ceres Seq. ID no. 12611213
  misc_feature (28)..(188): NCBI GI NO: 15228659 NR Description: hypothetical protein; protein id: At3g29280.1
  misc_feature (57)..(170): NCBI GI NO: 11994768 NR Description: gene_id:MMF24.3~unknown protein
MGSLSDSQANGDRQPPPAEAEDAGPQVEEGDTGEKMEGVASIALLPSGAISGHFIRLPDSACYGLQGTPIPCERECSRGDDYRLIKLSIINFKRKTEKVVVVECRGHDAARLQNIDHLHGWEDDVVGLVQKKHGNKKVLVSFECETLKADKAAEEHISKYMPNLCGLDAVVNTGKMSISGINLDEDDEPSGDS

SEQ ID NO: 6908 - protein, 158 aa, Glycine max
  peptide (1)..(158): Ceres Seq. ID no. 12611214
  misc_feature (1)..(153): NCBI GI NO: 15228659 NR Description: hypothetical protein; protein id: At3g29280.1
  misc_feature (22)..(135): NCBI GI NO: 11994768 NR Description: gene_id:MMF24.3~unknown protein
MEGVASIALLPSGAISGHFIRLPDSACYGLQGTPIPCERECSRGDDYRLIKLSIINFKRKTEKVVVVECRGHDAARLQNIDHLHGWEDDVVGLVQKKHGNKKVLVSFECETLKADKAAEEHISKYMPNLCGLDAVVNTGKMSISGINLDEDDEPSGDS

SEQ ID NO: 6909 - DNA, 708 bp, Glycine max
  misc_feature (1)..(708): Ceres Seq. ID no. 15172705
atcaccaccacttctaacacagcctcctcctcctcttcgatctctctctctctcgatcaaaatggctaacccaagagtcttcttcgacatgaccctcgacggcgcccccgccggccgcatcgtgatggagctttacaaagacacgaccccgaacaccgccgagaacttccgagccctctgcaccggcgagaaaggtgtcggaaagaaggggaagcctctccacttcaagggatcggccttccaccgcgtgatccccgggttcatgtgccagggaggcgatttcaccgccgggaacgggaccggcggggagtcgatctacggcgataagttcaaggacgagaacttcgcgaagaagcacaccggggcggggatcctctccatggcgaactctggtcccaacactaacggatctcagttttttatctgcaccgcggagacgtcgtggctcgatgggaagcacgtggtgtttgggaaggttgttgaaggtatggaggttgtgaaggcgatcgagaaggttggatcgtcttctgggacgacgaagaagaaggttgttgttgctgattgtggtcaggttgcttagatctgagtgatctgatgatgatgaatgttatcttttgcttttttaatgtttttttttctgatcgttcgagtttgtaaaaccctgagggttttttggatttgactgcctttgaataattatgaataact

SEQ ID NO: 6910 - protein, 192 aa, Glycine max
  peptide (1)..(192): Ceres Seq. ID no. 15172706
  misc_feature (22)..(192): NCBI GI NO: 18076088 NR Description: cyclophilin [Ricinus communis]
  misc_feature (21)..(192): NCBI GI NO: 3334157 NR Description: Peptidyl-prolyl cis-trans isomerase
  misc_feature (21)..(191): NCBI GI NO: 11270322 NR Description: peptidylprolyl isomerase (EC 5.2.1.8)
  misc_feature (21)..(191): NCBI GI NO: 11270316 NR Description: peptidylprolyl isomerase (EC 5.2.1.8)
  misc_feature (21)..(192): NCBI GI NO: 15236211 NR Description: peptidylprolyl isomerase (cyclophilin)
  misc_feature (21)..(191): NCBI GI NO: 68406 NR Description: peptidylprolyl isomerase (EC 5.2.1.8) - tomato
  misc_feature (21)..(191): NCBI GI NO: 118103 NR Description: Peptidyl-prolyl cis-trans isomerase
  misc_feature (21)..(192): NCBI GI NO: 29124975 NR Description: cyclophilin [Populus tremuloides]
  misc_feature (21)..(192): NCBI GI NO: 15234781 NR Description: peptidylprolyl isomerase ROC1
  misc_feature (21)..(192): NCBI GI NO: 18376589 NR Description: putative cyclosporin A-binding protein
SPPLLTQPPPPLRSLSLSIKMANPRVFFDMTLDGAPAGRIVMELYKDTTPNTAENFRALCTGEKGVGKKGKPLHFKGSAFHRVIPGFMCQGGDFTAGNGTGGESIYGDKFKDENFAKKHTGAGILSMANSGPNTNGSQFFICTAETSWLDGKHVVFGKVVEGMEVVKAIEKVGSSSGTTKKKVVVADCGQVA

SEQ ID NO: 6911 - protein, 172 aa, Glycine max
  peptide (1)..(172): Ceres Seq. ID no. 15172707
  misc_feature (2)..(172): NCBI GI NO: 18076088 NR Description: cyclophilin [Ricinus communis]
  misc_feature (1)..(172): NCBI GI NO: 3334157 NR Description: Peptidyl-prolyl cis-trans isomerase
  misc_feature (1)..(171): NCBI GI NO: 11270322 NR Description: peptidylprolyl isomerase (EC 5.2.1.8)
  misc_feature (1)..(171): NCBI GI NO: 11270316 NR Description: peptidylprolyl isomerase (EC 5.2.1.8)
  misc_feature (1)..(172): NCBI GI NO: 15236211 NR Description: peptidylprolyl isomerase (cyclophilin)
  misc_feature (1)..(171): NCBI GI NO: 68406 NR Description: peptidylprolyl isomerase (EC 5.2.1.8) - tomato
  misc_feature (1)..(171): NCBI GI NO: 118103 NR Description: Peptidyl-prolyl cis-trans isomerase
  misc_feature (1)..(172): NCBI GI NO: 29124975 NR Description: cyclophilin [Populus tremuloides]
  misc_feature (1)..(172): NCBI GI NO: 15234781 NR Description: peptidylprolyl isomerase ROC1
  misc_feature (1)..(172): NCBI GI NO: 18376589 NR Description: putative cyclosporin A-binding protein
MANPRVFFDMTLDGAPAGRIVMELYKDTTPNTAENFRALCTGEKGVGKKGKPLHFKGSAFHRVIPGFMCQGGDFTAGNGTGGESIYGDKFKDENFAKKHTGAGILSMANSGPNTNGSQFFICTAETSWLDGKHVVFGKVVEGMEVVKAIEKVGSSSGTTKKKVVVADCGQVA

SEQ ID NO: 6912 - protein, 163 aa, Glycine max
  peptide (1)..(163): Ceres Seq. ID no. 15172708
  misc_feature (1)..(163): NCBI GI NO: 18076088 NR Description: cyclophilin [Ricinus communis]
  misc_feature (1)..(163): NCBI GI NO: 3334157 NR Description: Peptidyl-prolyl cis-trans isomerase
  misc_feature (1)..(162): NCBI GI NO: 11270322 NR Description: peptidylprolyl isomerase (EC 5.2.1.8)
  misc_feature (1)..(162): NCBI GI NO: 11270316 NR Description: peptidylprolyl isomerase (EC 5.2.1.8)
  misc_feature (1)..(163): NCBI GI NO: 15236211 NR Description: peptidylprolyl isomerase (cyclophilin)
  misc_feature (1)..(162): NCBI GI NO: 68406 NR Description: peptidylprolyl isomerase (EC 5.2.1.8) - tomato
  misc_feature (1)..(162): NCBI GI NO: 118103 NR Description: Peptidyl-prolyl cis-trans isomerase
  misc_feature (1)..(163): NCBI GI NO: 29124975 NR Description: cyclophilin [Populus tremuloides]
  misc_feature (1)..(163): NCBI GI NO: 15234781 NR Description: peptidylprolyl isomerase ROC1
  misc_feature (1)..(163): NCBI GI NO: 18376589 NR Description: putative cyclosporin A-binding protein
MTLDGAPAGRIVMELYKDTTPNTAENFRALCTGEKGVGKKGKPLHFKGSAFHRVIPGFMCQGGDFTAGNGTGGESIYGDKFKDENFAKKHTGAGILSMANSGPNTNGSQFFICTAETSWLDGKHVVFGKVVEGMEVVKAIEKVGSSSGTTKKKVVVADCGQVA

SEQ ID NO: 6913 - DNA, 801 bp, Glycine max
  misc_feature (1)..(801): Ceres Seq. ID no. 12610341
cttaaaagaaaaattagcaggcaatgtctgagaattctgataattgaagagaaaacagccgggttcgtgaaaaatatttgatcgtctggcgtaaatctaaccttgttcgcattcagcttttcttgtggaaggatagaaaaggttgagaagagacttgtgaatggcagacatacctagacacctgcgtgcttgtttggatatggggaaaatagctttcttagctatccttgtttctggaggaatcgtcttgcaaattctggcttgtgctctgtataataactggtggccaatgctaagtgtgataatgtatgtgcttctcccaatgcctttgctcttcttcgctggatcggacagtacatctctcttcaatgaatcagacaatagctggatcaatgcagcaaagttcttgactggtgcatcagcagttggaagcatcgccataccttcgattctaaaacacgctggactcatcggttggggagcattagcctttgatctctcttcctacgttgtcttcattgttgctattctgagttacatttgcataggagatgacagtgacaactactacagctacatataaaagtgacatacaaagtcatcatcattattttctcaagctctctgctcttttaccaccttgccgacggttcaaaaaggagaatctcttcttgagagggatcactcaattgtatgtatgattgaatgaatgaatgactgaatggctgttgtaagttgaaaactttatatgtttttgtgttggttttggtgtatagaatgaaaatatttcatttttttcct

SEQ ID NO: 6914 - protein, 140 aa, Glycine max
  peptide (1)..(140): Ceres Seq. ID no. 12610342
  misc_feature (1)..(140): NCBI GI NO: 18398420 NR Description: Expressed protein; protein id: At1g32410
  misc_feature (1)..(140): NCBI GI NO: 21554354 NR Description: unknown [Arabidopsis thaliana]
  misc_feature (1)..(139): NCBI GI NO: 25518386 NR Description: hypothetical protein F5D14
  misc_feature (17)..(134): NCBI GI NO: 12322900 NR Description: unknown protein; 72859-71336
  misc_feature (17)..(134): NCBI GI NO: 16648828 NR Description: AT3g11530/F24K9_21 [Arabidopsis thaliana]
  misc_feature (23)..(134): NCBI GI NO: 18399269 NR Description: expressed protein; protein id: At3g11530
  misc_feature (55)..(126): NCBI GI NO: 34905898 NR Description: P0458E05.25
  misc_feature (16)..(126): NCBI GI NO: 31211645 NR Description: ENSANGP00000014293 [Anopheles gambiae]
  misc_feature (16)..(105): NCBI GI NO: 6322504 NR Description: Vacuolar Protein Sorting; Vps55p
  misc_feature (14)..(135): NCBI GI NO: 32564913 NR Description: vacuolar protein sorting 55
MADIPRHLRACLDMGKIAFLAILVSGGIVLQILACALYNNWWPMLSVIMYVLLPMPLLFFAGSDSTSLFNESDNSWINAAKFLTGASAVGSIAIPSILKHAGLIGWGALAFDLSSYVVFIVAILSYICIGDDSDNYYSYI

SEQ ID NO: 6915 - protein, 127 aa, Glycine max
  peptide (1)..(127): Ceres Seq. ID no. 12610343
  misc_feature (1)..(127): NCBI GI NO: 18398420 NR Description: Expressed protein; protein id: At1g32410
  misc_feature (1)..(127): NCBI GI NO: 21554354 NR Description: unknown [Arabidopsis thaliana]
  misc_feature (1)..(126): NCBI GI NO: 25518386 NR Description: hypothetical protein F5D14
  misc_feature (4)..(121): NCBI GI NO: 12322900 NR Description: unknown protein; 72859-71336
  misc_feature (4)..(121): NCBI GI NO: 16648828 NR Description: AT3g11530/F24K9_21 [Arabidopsis thaliana]
  misc_feature (10)..(121): NCBI GI NO: 18399269 NR Description: expressed protein; protein id: At3g11530
  misc_feature (42)..(113): NCBI GI NO: 34905898 NR Description: P0458E05.25
  misc_feature (3)..(113): NCBI GI NO: 31211645 NR Description: ENSANGP00000014293 [Anopheles gambiae]
  misc_feature (3)..(92): NCBI GI NO: 6322504 NR Description: Vacuolar Protein Sorting; Vps55p
  misc_feature (1)..(122): NCBI GI NO: 32564913 NR Description: vacuolar protein sorting 55
MGKIAFLAILVSGGIVLQILACALYNNWWPMLSVIMYVLLPMPLLFFAGSDSTSLFNESDNSWINAAKFLTGASAVGSIAIPSILKHAGLIGWGALAFDLSSYVVFIVAILSYICIGDDSDNYYSYI

SEQ ID NO: 6916 - protein, 97 aa, Glycine max
  peptide (1)..(97): Ceres Seq. ID no. 12610344
  misc_feature (1)..(97): NCBI GI NO: 18398420 NR Description: Expressed protein; protein id: At1g32410
  misc_feature (1)..(97): NCBI GI NO: 21554354 NR Description: unknown [Arabidopsis thaliana]
  misc_feature (1)..(96): NCBI GI NO: 25518386 NR Description: hypothetical protein F5D14
  misc_feature (1)..(91): NCBI GI NO: 12322900 NR Description: unknown protein; 72859-71336
  misc_feature (1)..(91): NCBI GI NO: 16648828 NR Description: AT3g11530/F24K9_21 [Arabidopsis thaliana]
  misc_feature (1)..(91): NCBI GI NO: 18399269 NR Description: expressed protein; protein id: At3g11530
  misc_feature (12)..(83): NCBI GI NO: 34905898 NR Description: P0458E05.25
  misc_feature (1)..(83): NCBI GI NO: 31211645 NR Description: ENSANGP00000014293 [Anopheles gambiae]
  misc_feature (1)..(62): NCBI GI NO: 6322504 NR Description: Vacuolar Protein Sorting; Vps55p
  misc_feature (1)..(92): NCBI GI NO: 32564913 NR Description: vacuolar protein sorting 55
MLSVIMYVLLPMPLLFFAGSDSTSLFNESDNSWINAAKFLTGASAVGSIAIPSILKHAGLIGWGALAFDLSSYVVFIVAILSYICIGDDSDNYYSYI

SEQ ID NO: 6917 - DNA, 711 bp, Glycine max
  misc_feature (1)..(711): Ceres Seq. ID no. 12610679
aaggtaatcaactcgctcctactgactcagtccgagtcacccgattcactaacgaatcttcactcttgttcacagaacttgagatgaaaggcggccaatcgaaagcagaagcaacgagcacagatcaaagactcaaaaccagaggaaggaagaagaagacggcgacgaaggacccaaacaaacctaagagacctccaagcgctttcttcgtcttcttagatgattttcgacgggagttcaaagaggcgaaccctaacaacaagtccgtcgccgccgttggtaaggctgctggagctaagtggaagtctatgactgaggaagagaaagctccttatgcttccaaggcagagaccaggaagagtgaatataataagagtatgcaacagtacaacatgaaactggctaatggaaccagtagaggtgaagatgatgagtccaagtctgaagttgacgaagctggaggagcaagcgaagcggaggaagaagacgatgattaaggaggctttctcgtctaggttactgccattgactgactcagatttgtggatgggattagtaatttaaatgtgtcccaaaaaaaaactgaaaaactggttatgctttgtgtttgtaatattaagaacctcagttgctacttcttcgtgtttaggtcagttgtatggtcggataggatcacttggatgctatgtctccttattaccttctgtgttt

SEQ ID NO: 6918 - protein, 164 aa, Glycine max
  peptide (1)..(164): Ceres Seq. ID no. 12610680
  misc_feature (61)..(130): Pfam Name: high mobility group Pfam Description: HMG
  misc_feature (28)..(164): NCBI GI NO: 21592453 NR Description: putative HMG protein [Arabidopsis thaliana]
  misc_feature (28)..(164): NCBI GI NO: 15227862 NR Description: putative HMG protein; protein id: At2g17560
  misc_feature (28)..(164): NCBI GI NO: 11346367 NR Description: high mobility group protein HMG-gamma
  misc_feature (28)..(164): NCBI GI NO: 13877775 NR Description: putative HMG protein [Arabidopsis thaliana]
  misc_feature (28)..(164): NCBI GI NO: 541968 NR Description: high mobility group protein HMG-1 - garden pea
  misc_feature (28)..(164): NCBI GI NO: 7446212 NR Description: high mobility group protein - potato
  misc_feature (28)..(151): NCBI GI NO: 15237040 NR Description: HMG delta protein; protein id: At4g35570
  misc_feature (28)..(164): NCBI GI NO: 7446213 NR Description: high mobility group protein HMG-1 - common tobacco
  misc_feature (28)..(164): NCBI GI NO: 1052956 NR Description: high mobility group protein 2 HMG2 [Ipomoea nil]
  misc_feature (28)..(164): NCBI GI NO: 729736 NR Description: HMG1/2-LIKE PROTEIN
GNQLAPTDSVRVTRFTNESSLLFTELEMKGGQSKAEATSTDQRLKTRGRKKKTATKDPNKPKRPPSAFFVFLDDFRREFKEANPNNKSVAAVGKAAGAKWKSMTEEEKAPYASKAETRKSEYNKSMQQYNMKLANGTSRGEDDESKSEVDEAGGASEAEEEDDD

SEQ ID NO: 6919 - protein, 137 aa, Glycine max
  peptide (1)..(137): Ceres Seq. ID no. 12610681
  misc_feature (34)..(103): Pfam Name: high mobility group Pfam Description: HMG
  misc_feature (1)..(137): NCBI GI NO: 21592453 NR Description: putative HMG protein [Arabidopsis thaliana]
  misc_feature (1)..(137): NCBI GI NO: 15227862 NR Description: putative HMG protein; protein id: At2g17560
  misc_feature (1)..(137): NCBI GI NO: 11346367 NR Description: high mobility group protein HMG-gamma
  misc_feature (1)..(137): NCBI GI NO: 13877775 NR Description: putative HMG protein [Arabidopsis thaliana]
  misc_feature (1)..(137): NCBI GI NO: 541968 NR Description: high mobility group protein HMG-1 - garden pea
  misc_feature (1)..(137): NCBI GI NO: 7446212 NR Description: high mobility group protein - potato
  misc_feature (1)..(124): NCBI GI NO: 15237040 NR Description: HMG delta protein; protein id: At4g35570
  misc_feature (1)..(137): NCBI GI NO: 7446213 NR Description: high mobility group protein HMG-1 - common tobacco
  misc_feature (1)..(137): NCBI GI NO: 1052956 NR Description: high mobility group protein 2 HMG2 [Ipomoea nil]
  misc_feature (1)..(137): NCBI GI NO: 729736 NR Description: HMG1/2-LIKE PROTEIN
MKGGQSKAEATSTDQRLKTRGRKKKTATKDPNKPKRPPSAFFVFLDDFRREFKEANPNNKSVAAVGKAAGAKWKSMTEEEKAPYASKAETRKSEYNKSMQQYNMKLANGTSRGEDDESKSEVDEAGGASEAEEEDDD

SEQ ID NO: 6920 - DNA, 1128 bp, Glycine max
  misc_feature (1)..(1128): Ceres Seq. ID no. 13595304
  misc_feature (1121)..(1121): n is a, c, t, g, unknown, or other
atttacctcgtcaggtcctcccaacaccataacttagcaggtaggttcgcttagagttcagccgaggtttctccatcagccaagcgcaatcggactaggaaagtgtactgcgactccggagtgagggataggaaggaggaggaggcttcagccgagacccaagggagaaagatctcgtatcagataggcaactgcagcagtagagttcaacaagcgaagggggaaatggcaattggacagaccatgccgaaggggtctctcgccacgagcttgagcttcccaagcagcggcagcacaaggattctggggaggaagagggtcgctgtttctccggctccaagcccctcaggcccgcactccccggttcggactctgcgcaagcagcgcagcattaggttccacatggacgacaccatctgcctccttgaatcgctgcctcaagatgtattggtcaaagtcctgtgcaaggtgaaccacagcgacctgaggcagctcctcctggtgtcgaagccagtcagcgaagcaacagtggttgctaaggagctgcatttcgccttcgcgacgccctcgaaggcctccgcggatgcggaggaagaagacgatggccccggggcgcccaagcaacacagggttgcacggtcgcgctgccggggcatgaatttggcaagcgtcgccgtcaatctgtcggagtcgttcagcagcttgatgtcagaggtgtaggtgtacataccacggcacgaattttcccgcttgtacttgtccatcggagcgctcttttttcttcataggccacgtcgaacaaactttagttagtgatatatgtagtgatcatcatatgtattagtagtaagttatatatggtcattcttcaatgatgcgattgaagaggacacgctgtcttatttctgtgtactgtatgtaatagtgtaagttatatgtaagcgtctgagtgttggagctcatcaaaagagtatttagtgtaagttwwwtgcaagcgtcagtgttggaactcatgagaagagaagtctcttctcactttgtgtatgctgtagtgtacgatctctgtatactcgtgtgcatgggaagtttctcttatcaataaaagtaaaagcagtttgttntcggtcg

SEQ ID NO: 6921 - protein, 164 aa, Glycine max
  peptide (1)..(164): Ceres Seq. ID no. 15221536
  misc_feature (1)..(164): NCBI GI NO: 34393368 NR Description: unknown protein
  misc_feature (24)..(153): NCBI GI NO: 7485710 NR Description: hypothetical protein F18E5
  misc_feature (24)..(153): NCBI GI NO: 18415709 NR Description: F-box protein family [Arabidopsis thaliana]
  misc_feature (1)..(153): NCBI GI NO: 15219910 NR Description: F-box protein family [Arabidopsis thaliana]
  misc_feature (1)..(153): NCBI GI NO: 28372904 NR Description: At1g61340 [Arabidopsis thaliana]
  misc_feature (24)..(116): NCBI GI NO: 18412772 NR Description: F-box protein family [Arabidopsis thaliana]
MAIGQTMPKGSLATSLSFPSSGSTRILGRKRVAVSPAPSPSGPHSPVRTLRKQRSIRFHMDDTICLLESLPQDVLVKVLCKVNHSDLRQLLLVSKPVSEATVVAKELHFAFATPSKASADAEEEDDGPGAPKQHRVARSRCRGMNLASVAVNLSESFSSLMSEV

SEQ ID NO: 6922 - protein, 158 aa, Glycine max
  peptide (1)..(158): Ceres Seq. ID no. 15221537
  misc_feature (1)..(158): NCBI GI NO: 34393368 NR Description: unknown protein
  misc_feature (18)..(147): NCBI GI NO: 7485710 NR Description: hypothetical protein F18E5
  misc_feature (18)..(147): NCBI GI NO: 18415709 NR Description: F-box protein family [Arabidopsis thaliana]
  misc_feature (1)..(147): NCBI GI NO: 15219910 NR Description: F-box protein family [Arabidopsis thaliana]
  misc_feature (1)..(147): NCBI GI NO: 28372904 NR Description: At1g61340 [Arabidopsis thaliana]
  misc_feature (18)..(110): NCBI GI NO: 18412772 NR Description: F-box protein family [Arabidopsis thaliana]
MPKGSLATSLSFPSSGSTRILGRKRVAVSPAPSPSGPHSPVRTLRKQRSIRFHMDDTICLLESLPQDVLVKVLCKVNHSDLRQLLLVSKPVSEATVVAKELHFAFATPSKASADAEEEDDGPGAPKQHRVARSRCRGMNLASVAVNLSESFSSLMSEV

SEQ ID NO: 6923 - protein, 105 aa, Glycine max
  peptide (1)..(105): Ceres Seq. ID no. 15221538
  misc_feature (1)..(105): NCBI GI NO: 34393368 NR Description: unknown protein
  misc_feature (1)..(94): NCBI GI NO: 7485710 NR Description: hypothetical protein F18E5
  misc_feature (1)..(94): NCBI GI NO: 18415709 NR Description: F-box protein family [Arabidopsis thaliana]
  misc_feature (1)..(94): NCBI GI NO: 15219910 NR Description: F-box protein family [Arabidopsis thaliana]
  misc_feature (1)..(94): NCBI GI NO: 28372904 NR Description: At1g61340 [Arabidopsis thaliana]
  misc_feature (1)..(57): NCBI GI NO: 18412772 NR Description: F-box protein family [Arabidopsis thaliana]
MDDTICLLESLPQDVLVKVLCKVNHSDLRQLLLVSKPVSEATVVAKELHFAFATPSKASADAEEEDDGPGAPKQHRVARSRCRGMNLASVAVNLSESFSSLMSEV

SEQ ID NO: 6924 - DNA, 978 bp, Glycine max
  misc_feature (1)..(978): Ceres Seq. ID no. 13595376
acctagaacatcctaatcgaaaaaaaaaaactccgattccgagtaccataggacccaacggtaaaaggatggcgaccaaagcagccccaccgaccctggtggtctcgcaccattagaatccccttccccaacccaaatcggccgccgccgagccctcgaccgtcaccggagccgccgagccaaccaccgaagcgcctcgaacccctcgtcctcctcctcgtgcctgccatcctccaccggatcggcgcggatcggaggctcccgcgaagcgattcctcctgtcaggcagtcgagatgtcggagtaccagaacgtcgttggggggaggctcaagctgaaggggaaaccgctggatgtcaaggagggcggagtcaagaagaagaataagaagaagcaccgccgcgaggagtcgtctcaaggcgagcacggcgagctccgcgaaggtggaagctctgaattgccaggtgaccctgacaatgagttcagtgaagctgacaagctgggagaggaagggagtgcgcaagccgattatgatcacctcactccagctgagaggcgttacattgaacagaagcagaagatcgacgtacacaagttggccaaggtggctgacaagtcgcacagggaccgcatccaggacttcaaccagtacctcgcaaatcttagtgagcactatgatatcccgaaggtcggccctggttaattaaggtccgcaagtgctccagtgtgctggacctatgcatgtagctcgtcaatttcgcgtgggtgtgctctgaaacaatggatgattgtgttgtcttcagagataaactgagtatctctgcacttataagctgattgcactttatctctgtttaaagaccatgtttaatatacttccaagtgttctgagtaaaaaaaaaaaaaaaaaagcttatcgataccgtcgacctcgagggggggcccgkttaaacmcaataaagttggaacgggagggggg

SEQ ID NO: 6925 - protein, 135 aa, Glycine max
  peptide (1)..(135): Ceres Seq. ID no. 15221565
  misc_feature (1)..(135): NCBI GI NO: 18394403 NR Description: expressed protein [Arabidopsis thaliana]
  misc_feature (69)..(135): NCBI GI NO: 20269115 NR Description: CGI-144-like protein [Lycopersicon esculentum]
  misc_feature (1)..(135): NCBI GI NO: 40746298 NR Description: hypothetical protein AN0678.2
  misc_feature (8)..(135): NCBI GI NO: 23509013 NR Description: hypothetical protein, conserved
  misc_feature (8)..(135): NCBI GI NO: 19114925 NR Description: hypothetical protein [Schizosaccharomyces pombe]
  misc_feature (68)..(132): NCBI GI NO: 7512937 NR Description: hypothetical protein DKFZp586O0120
  misc_feature (68)..(132): NCBI GI NO: 7661696 NR Description: DKFZP586O0120 protein [Homo sapiens]
  misc_feature (68)..(132): NCBI GI NO: 13325257 NR Description: Similar to CG15432 gene product [Homo sapiens]
  misc_feature (68)..(132): NCBI GI NO: 13385950 NR Description: RIKEN cDNA 2510049I19 [Mus musculus]
MSEYQNVVGGRLKLKGKPLDVKEGGVKKKNKKKHRREESSQGEHGELREGGSSELPGDPDNEFSEADKLGEEGSAQADYDHLTPAERRYIEQKQKIDVHKLAKVADKSHRDRIQDFNQYLANLSEHYDIPKVGPG

SEQ ID NO: 6926 - protein, 117 aa, Glycine max
  peptide (1)..(117): Ceres Seq. ID no. 15221566
MSRRAESRRRIRRSTAARSRLKASTASSAKVEALNCQVTLTMSSVKLTSWERKGVRKPIMITSLQLRGVTLNRSRRSTYTSWPRWLTSRTGTASRTSTSTSQILVSTMISRRSALVN

SEQ ID NO: 6927 - protein, 76 aa, Glycine max
  peptide (1)..(76): Ceres Seq. ID no. 15221567
MSSVKLTSWERKGVRKPIMITSLQLRGVTLNRSRRSTYTSWPRWLTSRTGTASRTSTSTSQILVSTMISRRSALVN

SEQ ID NO: 6928 - DNA, 809 bp, Glycine max
  misc_feature (1)..(809): Ceres Seq. ID no. 13595377
ccatcccaccacattcaagtcgaagaagctcctcgatctccatcactgcaaccagccacttgagctctgaatctttgaagctcagccagttcgccgcgaccaccgagagcctcaagtttcgccatgtcgagcgccggccagaagcagcagcagcagcagcaggcgaagaagccggcggcggcggaggacgtcgagatcaagaaggtcttctcccgcttcgacacggacggcgacggccggatctcgccgtccgagctggcggccgtgtcgcgcgccatcgcgccgccggccaccgagtccgcgcagggccgcgaggtggcgtccatgatggacgagctcgacaccgaccgcgacggctacgtggacctcggcgagttcgccgccttccacggccgcggccgcgaggagcgcgagctcgacgccgagctgcgcgacgccttcgacgtctacgacatcaacggcgacggccgcatctccgtcgccgagctcagcaaggtcctgagccgcatcggcgagggatgcagcaccgaggagtgcgagaagatgatcgcctccgtcgacgtcgacggcgacggctgcgtcggattcgaggagttcaagaagatgatgaccgccggtgacgccggcgcaccacctcaacccgaagcgatcgccgtgcctgacagcaacaaacccaagaaggagtgatacatgtgcttttgcttgtaaaaaaattgtaatccgagggagcgaattagttgtcagtccctgttggccatagtcttctggtctgaaaaaaaatgggaataaggatcaatgtgcaattgccg

SEQ ID NO: 6929 - protein, 205 aa, Glycine max
  peptide (1)..(205): Ceres Seq. ID no. 13595378
IPPHSSRRSSSISITATSHLSSESLKLSQFAATTESLKFRHVERRPEAAAAAAGEEAGGGGGRRDQEGLLPLRHGRRRPDLAVRAGGRVARHRAAGHRVRAGPRGGVHDGRARHRPRRLRGPRRVRRLPRPRPRGARARRRAARRLRRLRHQRRRPHLRRRAQQGPEPHRRGMQHRGVREDDRLRRRRRRRLRRIRGVQEDDDRR

SEQ ID NO: 6930 - protein, 187 aa, Glycine max
  peptide (1)..(187): Ceres Seq. ID no. 13595379
  misc_feature (64)..(92): Pfam Name: Pfam Description:  EF hand
  misc_feature (1)..(169): NCBI GI NO: 34895640 NR Description: OSJNBa0083M16.33
  misc_feature (24)..(169): NCBI GI NO: 15240340 NR Description: calmodulin-related protein 2, touch-induced (TCH2)
  misc_feature (8)..(163): NCBI GI NO: 14589311 NR Description: calcium binding protein [Sesbania rostrata]
  misc_feature (1)..(164): NCBI GI NO: 15221030 NR Description: calcium-binding protein, putative
  misc_feature (24)..(162): NCBI GI NO: 21618074 NR Description: calmodulin-related protein [Arabidopsis thaliana]
  misc_feature (24)..(162): NCBI GI NO: 18408502 NR Description: calmodulin-related protein, putative
  misc_feature (17)..(169): NCBI GI NO: 19386815 NR Description: B1147A04.10
  misc_feature (15)..(164): NCBI GI NO: 15219514 NR Description: calcium-binding protein, putative
  misc_feature (16)..(174): NCBI GI NO: 6901654 NR Description: calcium-binding protein [Olea europaea]
  misc_feature (13)..(165): NCBI GI NO: 15221781 NR Description: polcalcin
MSSAGQKQQQQQQAKKPAAAEDVEIKKVFSRFDTDGDGRISPSELAAVSRAIAPPATESAQGREVASMMDELDTDRDGYVDLGEFAAFHGRGREERELDAELRDAFDVYDINGDGRISVAELSKVLSRIGEGCSTEECEKMIASVDVDGDGCVGFEEFKKMMTAGDAGAPPQPEAIAVPDSNKPKKE

SEQ ID NO: 6931 - protein, 120 aa, Glycine max
  peptide (1)..(120): Ceres Seq. ID no. 13595380
  misc_feature (1)..(25): Pfam Name: Pfam Description:  EF hand
  misc_feature (1)..(102): NCBI GI NO: 34895640 NR Description: OSJNBa0083M16.33
  misc_feature (1)..(102): NCBI GI NO: 15240340 NR Description: calmodulin-related protein 2, touch-induced (TCH2)
  misc_feature (1)..(96): NCBI GI NO: 14589311 NR Description: calcium binding protein [Sesbania rostrata]
  misc_feature (1)..(97): NCBI GI NO: 15221030 NR Description: calcium-binding protein, putative
  misc_feature (1)..(95): NCBI GI NO: 21618074 NR Description: calmodulin-related protein [Arabidopsis thaliana]
  misc_feature (1)..(95): NCBI GI NO: 18408502 NR Description: calmodulin-related protein, putative
  misc_feature (1)..(102): NCBI GI NO: 19386815 NR Description: B1147A04.10
  misc_feature (1)..(97): NCBI GI NO: 15219514 NR Description: calcium-binding protein, putative
  misc_feature (1)..(107): NCBI GI NO: 6901654 NR Description: calcium-binding protein [Olea europaea]
  misc_feature (1)..(98): NCBI GI NO: 15221781 NR Description: polcalcin
MMDELDTDRDGYVDLGEFAAFHGRGREERELDAELRDAFDVYDINGDGRISVAELSKVLSRIGEGCSTEECEKMIASVDVDGDGCVGFEEFKKMMTAGDAGAPPQPEAIAVPDSNKPKKE

SEQ ID NO: 6932 - DNA, 679 bp, Glycine max
  misc_feature (1)..(679): Ceres Seq. ID no. 13595826
acaaccaatcatacaaaaacacacacaacagataaaaagaagaaaatcttcggttgataaaaactatttaaatgaagaggaacggtgaaactaagcggcggaggaacgtggcggaagaggcggagcagggaggaggagatccggcgatgtgggaggatcttgatcggaatttcagacaagtgcaatctgttttggacagaaacagatcacttatccagcaagtcaacgacaatcaccagtcaagaatggcagataacatgtccaagaacgttgctttgatccaagaactcaatggaaacatctctaaggttgcttcgatgtattctgacctcaacaccaatttctcctcggcgtttcacggtggaaagaacggacgcgacggtggtggaactaccggaaccagagctaattaaccaaccctgatcaaattgatctttcttagttggaccggccggtttgaaaatttcgaatcagtcggtttaacatataattttttttttgttgtcacggaacatatgatctaaacctgttatataagttatgttattgcaatgattgtcgttagaataatccgtgggagaaaacccattgtttgggttattttaattatggttttgagtctttttcaacgtgtctctactctactgcaatttctctgataataacaataaatatttag

SEQ ID NO: 6933 - protein, 113 aa, Glycine max
  peptide (1)..(113): Ceres Seq. ID no. 13595827
  misc_feature (1)..(112): NCBI GI NO: 18405258 NR Description: expressed protein [Arabidopsis thaliana]
  misc_feature (2)..(113): NCBI GI NO: 34499881 NR Description: early flowering 4 [Mesembryanthemum crystallinum]
  misc_feature (23)..(110): NCBI GI NO: 15227672 NR Description: hypothetical protein [Arabidopsis thaliana]
  misc_feature (17)..(107): NCBI GI NO: 4680489 NR Description: hypothetical protein [Oryza sativa]
  misc_feature (23)..(111): NCBI GI NO: 18396289 NR Description: expressed protein [Arabidopsis thaliana]
  misc_feature (20)..(110): NCBI GI NO: 38637104 NR Description: unknown protein
  misc_feature (20)..(107): NCBI GI NO: 4680201 NR Description: hypothetical protein [Sorghum bicolor]
  misc_feature (23)..(105): NCBI GI NO: 18410139 NR Description: expressed protein [Arabidopsis thaliana]
  misc_feature (23)..(105): NCBI GI NO: 25406197 NR Description: hypothetical protein F28P22.18
  misc_feature (23)..(105): NCBI GI NO: 8778455 NR Description: F1L3.15 [Arabidopsis thaliana]
MKRNGETKRRRNVAEEAEQGGGDPAMWEDLDRNFRQVQSVLDRNRSLIQQVNDNHQSRMADNMSKNVALIQELNGNISKVASMYSDLNTNFSSAFHGGKNGRDGGGTTGTRAN

SEQ ID NO: 6934 - protein, 88 aa, Glycine max
  peptide (1)..(88): Ceres Seq. ID no. 13595828
  misc_feature (1)..(87): NCBI GI NO: 18405258 NR Description: expressed protein [Arabidopsis thaliana]
  misc_feature (1)..(88): NCBI GI NO: 34499881 NR Description: early flowering 4 [Mesembryanthemum crystallinum]
  misc_feature (1)..(85): NCBI GI NO: 15227672 NR Description: hypothetical protein [Arabidopsis thaliana]
  misc_feature (1)..(82): NCBI GI NO: 4680489 NR Description: hypothetical protein [Oryza sativa]
  misc_feature (1)..(86): NCBI GI NO: 18396289 NR Description: expressed protein [Arabidopsis thaliana]
  misc_feature (1)..(85): NCBI GI NO: 38637104 NR Description: unknown protein
  misc_feature (1)..(82): NCBI GI NO: 4680201 NR Description: hypothetical protein [Sorghum bicolor]
  misc_feature (1)..(80): NCBI GI NO: 18410139 NR Description: expressed protein [Arabidopsis thaliana]
  misc_feature (1)..(80): NCBI GI NO: 25406197 NR Description: hypothetical protein F28P22.18
  misc_feature (1)..(80): NCBI GI NO: 8778455 NR Description: F1L3.15 [Arabidopsis thaliana]
MWEDLDRNFRQVQSVLDRNRSLIQQVNDNHQSRMADNMSKNVALIQELNGNISKVASMYSDLNTNFSSAFHGGKNGRDGGGTTGTRAN

SEQ ID NO: 6935 - DNA, 1010 bp, Glycine max
  misc_feature (1)..(1010): Ceres Seq. ID no. 13595084
cgtcgcctcgtgcgcatcaccacttcaccacaatccccatttcccaaagctcgaccaaagccgtgacactcctcccccacctcgtcccaaaccctagccacccccgccgatcccaatggccgccgcccaccaccggcccctccacgccctcctcggcggcggcgcagtcgccgacctgctcctctggaggcggaggaacgcctccgcggcggccgtcgcgggcgccacgctcgtctggttcctcttcgagcgcgccgggtacagcctcgcgtcggtcctctccaacgccctcctcctcctcgtcgtcatcctcttcttctgggccaagtccgcctcgctgctcaacagacctcttccaccactgcctaatctagaggtctcagatggggtcgttgagaaagttgtaggtcgggctcttgtatggataaacaaggtgttggctgttgcccatgacattgccatcaagagagaccggacagtttttatacaggttataatggctctatgggtggtttcatgtattgggatgctcttcaacttctttacgctcatttacattggtgtactactcgctctgttggttcccccggtatatgagaggcaccaggatgttattgatgaaaaggttggtttagcacacagcatactgtcaaggcagttgagtaccgtcgctagcaagacagggcaaccacctaaacaaaagaaggctgagtagaagaaatattttggcccatttggaagctctccagttgttctactatgttacaaacaccgtgatccatccaccgctgagagtatttctggatatccagggcataatgtttaactgctgatacgtgggtttagatgcacgctcttcaatctgggaagtggaatgatttgtatattgtttccatgaacatgaaacttgtcgaggtttaccatgggcacatcttgtggataatgctgtatacctttctctacgtgcgatgttgtgtcttgcatgtacaaatgcggtgcttgctcgtgtc

SEQ ID NO: 6936 - protein, 199 aa, Glycine max
  peptide (1)..(199): Ceres Seq. ID no. 13595085
  misc_feature (1)..(199): NCBI GI NO: 38345298 NR Description: OSJNBa0043A12.26
  misc_feature (9)..(197): NCBI GI NO: 18402246 NR Description: expressed protein [Arabidopsis thaliana]
  misc_feature (9)..(197): NCBI GI NO: 21593206 NR Description: unknown [Arabidopsis thaliana]
  misc_feature (9)..(181): NCBI GI NO: 30679374 NR Description: expressed protein [Arabidopsis thaliana]
  misc_feature (23)..(181): NCBI GI NO: 25411624 NR Description: hypothetical protein At2g15280
  misc_feature (7)..(167): NCBI GI NO: 15232423 NR Description: expressed protein [Arabidopsis thaliana]
  misc_feature (9)..(185): NCBI GI NO: 26450318 NR Description: unknown protein [Arabidopsis thaliana]
  misc_feature (8)..(168): NCBI GI NO: 34904202 NR Description: P0492F05.25
  misc_feature (1)..(181): NCBI GI NO: 18406991 NR Description: expressed protein [Arabidopsis thaliana]
  misc_feature (17)..(185): NCBI GI NO: 30681541 NR Description: reticulon family [Arabidopsis thaliana]
MAAAHHRPLHALLGGGAVADLLLWRRRNASAAAVAGATLVWFLFERAGYSLASVLSNALLLLVVILFFWAKSASLLNRPLPPLPNLEVSDGVVEKVVGRALVWINKVLAVAHDIAIKRDRTVFIQVIMALWVVSCIGMLFNFFTLIYIGVLLALLVPPVYERHQDVIDEKVGLAHSILSRQLSTVASKTGQPPKQKKAE

SEQ ID NO: 6937 - protein, 123 aa, Glycine max
  peptide (1)..(123): Ceres Seq. ID no. 13595086
  misc_feature (3)..(117): Pfam Name: BLLF1 Pfam Description: Herpes virus major outer envelope glycoprotein
  misc_feature (1)..(109): NCBI GI NO: 32699068 NR Description: hypothetical protein FLJ35107 [Homo sapiens]
SPRAHHHFTTIPISQSSTKAVTLLPHLVPNPSHPRRSQWPPPTTGPSTPSSAAAQSPTCSSGGGGTPPRRPSRAPRSSGSSSSAPGTASRRSSPTPSSSSSSSSSSGPSPPRCSTDLFHHCLI

SEQ ID NO: 6938 - DNA, 654 bp, Glycine max
  misc_feature (1)..(654): Ceres Seq. ID no. 13638986
actgttctctaatctaaatctaatttcacctttcctacaaaacctaaaacctttttcttattacacaacctaaaagtctctaagtttctgacaatgtcggaagagttcgacgaatctgagatcattttctccgacagcttcttcccaattcgccgccgcgaggacgtgatcgagaaagagaatcgtccggttaatttccgagaaaactccgaaagcagaatgagaaacacatcgaggctgagtaaaacgacgccgttgccttcaccggcggttttctcatcgtcgcttccagtgaatattccgggaaggaggtattctgaggatgaggaatattcggaagacggaggaaggagaatggttccgccgcatctgatcgttggacggaggatcgaaagcggtcaaatggcgttttccgtttgtacaggtcagggaaggactcttaaaggccgagatctgagccgggttcgtaattcggttctcaggttaaccggttttttggaggcttaaatatggaccggtttttgatttattaaaaaaattcgtcttccaatttttttttttatttagcggaagaaatcagttgtctgatattgttgttagtttagtcacttgaacgaatgtcaaaaggaaaatgtcaaaaagaacatttatttc

SEQ ID NO: 6939 - protein, 137 aa, Glycine max
  peptide (1)..(137): Ceres Seq. ID no. 13638987
  misc_feature (1)..(136): Pfam Name: Pfam Description:  Protein of unknown function, DUF584
  misc_feature (1)..(137): NCBI GI NO: 15220508 NR Description: expressed protein [Arabidopsis thaliana]
  misc_feature (1)..(137): NCBI GI NO: 18403527 NR Description: expressed protein [Arabidopsis thaliana]
  misc_feature (52)..(137): NCBI GI NO: 34910798 NR Description: P0042A10.28
  misc_feature (1)..(136): NCBI GI NO: 7485420 NR Description: hypothetical protein F13C5
  misc_feature (27)..(136): NCBI GI NO: 30684599 NR Description: expressed protein [Arabidopsis thaliana]
  misc_feature (75)..(136): NCBI GI NO: 18412629 NR Description: expressed protein [Arabidopsis thaliana]
  misc_feature (75)..(136): NCBI GI NO: 26452217 NR Description: unknown protein [Arabidopsis thaliana]
  misc_feature (75)..(136): NCBI GI NO: 25354620 NR Description: hypothetical protein AT4g04630
  misc_feature (62)..(133): NCBI GI NO: 34910794 NR Description: P0042A10.26
  misc_feature (6)..(136): NCBI GI NO: 15230636 NR Description: expressed protein [Arabidopsis thaliana]
MSEEFDESEIIFSDSFFPIRRREDVIEKENRPVNFRENSESRMRNTSRLSKTTPLPSPAVFSSSLPVNIPGRRYSEDEEYSEDGGRRMVPPHLIVGRRIESGQMAFSVCTGQGRTLKGRDLSRVRNSVLRLTGFLEA

SEQ ID NO: 6940 - protein, 95 aa, Glycine max
  peptide (1)..(95): Ceres Seq. ID no. 13638988
  misc_feature (1)..(94): Pfam Name: Pfam Description:  Protein of unknown function, DUF584
  misc_feature (1)..(95): NCBI GI NO: 15220508 NR Description: expressed protein [Arabidopsis thaliana]
  misc_feature (1)..(95): NCBI GI NO: 18403527 NR Description: expressed protein [Arabidopsis thaliana]
  misc_feature (10)..(95): NCBI GI NO: 34910798 NR Description: P0042A10.28
  misc_feature (1)..(94): NCBI GI NO: 7485420 NR Description: hypothetical protein F13C5
  misc_feature (1)..(94): NCBI GI NO: 30684599 NR Description: expressed protein [Arabidopsis thaliana]
  misc_feature (33)..(94): NCBI GI NO: 18412629 NR Description: expressed protein [Arabidopsis thaliana]
  misc_feature (33)..(94): NCBI GI NO: 26452217 NR Description: unknown protein [Arabidopsis thaliana]
  misc_feature (33)..(94): NCBI GI NO: 25354620 NR Description: hypothetical protein AT4g04630
  misc_feature (20)..(91): NCBI GI NO: 34910794 NR Description: P0042A10.26
  misc_feature (1)..(94): NCBI GI NO: 15230636 NR Description: expressed protein [Arabidopsis thaliana]
MRNTSRLSKTTPLPSPAVFSSSLPVNIPGRRYSEDEEYSEDGGRRMVPPHLIVGRRIESGQMAFSVCTGQGRTLKGRDLSRVRNSVLRLTGFLEA

SEQ ID NO: 6941 - DNA, 1165 bp, Glycine max
  misc_feature (1)..(1165): Ceres Seq. ID no. 12611235
agagcgagggcgaccaataaattcctaatttttcccacttttccaccccgggattccccgcctcttgttccaatcgattggtgggcgtcctcgttcttggcttcccgattgaatccgtgggaagccagagataattctctctccgctgcgaatttttttttggtggtttgagttcttgatttgtttgcgaggaagccatcatgagcgccggaagcgccagtttcctcgagatccagccctcggagctggcatttccctttgaattgatgaagcagagctcgtgctccatgcaactcgcaaataagaccgaccgttatgtagcattcaaggtcaaaactaccaacccaaagcagtactgtgtgcgccctaatatcggcgttgtacttcctgggtcgacttgtgatgttacagttacaatgcaagcgcagagggaagcacctgctgatctgcagtgtaaggacaagttcctagttcaaagtgttgcagctgagaatggcgcagcaactcaagatattagtgcagcaatgttcaacaaagagccagggaaggttgttgatgaatgcaagctgcgtgtaatttatgtgccaacatcttcacctagcccgttctctgaagattcagaacaagggagttctgctcgttcattggaaaacgggacccctaattctacattgccacaatctgtatttagatcatctggtgaagcatcaaaggataagtcctcggaggcgacgtccatgatttccaagctaactgaggagaaaatgtctgctgttcagcaaaaccagaagttgagacaagagctggatgtcctacgcaaagagagcagcaaaagcaacggcggtttctcaatcaccttcttgattgtggtgggtattctgggcatcatcgctggtttcatcctcaagaagacataggagaagagtagtccccaacaaagttacattcccaggaaaggacggataccagcaacatcccttgtgtttttactcctaaaaggagcgcctgttctattctaacttgtaacggcttagaagctttggtttgtgtacattacatggtggttttcatgattttaatcacatcgagtagacttgttttaattataattcttaacagctgcaagttatgtcacgttcaccataacctttaattcattctggtc

SEQ ID NO: 6942 - protein, 238 aa, Glycine max
  peptide (1)..(238): Ceres Seq. ID no. 12611236
  misc_feature (1)..(238): NCBI GI NO: 11288307 NR Description: 27k vesicle-associated membrane protein-associatedprotein
  misc_feature (5)..(237): NCBI GI NO: 18411240 NR Description: putative proline-rich protein
  misc_feature (5)..(237): NCBI GI NO: 21592874 NR Description: putative proline-rich protein
  misc_feature (5)..(238): NCBI GI NO: 15225415 NR Description: putative VAMP-associated protein
  misc_feature (1)..(238): NCBI GI NO: 18411661 NR Description: putative protein; protein id: At3g60600
  misc_feature (5)..(238): NCBI GI NO: 21554053 NR Description: putative VAMP-associated protein
  misc_feature (1)..(238): NCBI GI NO: 11288305 NR Description: hypothetical protein T4C21
  misc_feature (5)..(202): NCBI GI NO: 7486542 NR Description: hypothetical protein F6N15
  misc_feature (3)..(184): NCBI GI NO: 37535894 NR Description: putative vesicle-associated membrane protein
  misc_feature (176)..(237): NCBI GI NO: 37535894 NR Description: putative vesicle-associated membrane protein
MSAGSASFLEIQPSELAFPFELMKQSSCSMQLANKTDRYVAFKVKTTNPKQYCVRPNIGVVLPGSTCDVTVTMQAQREAPADLQCKDKFLVQSVAAENGAATQDISAAMFNKEPGKVVDECKLRVIYVPTSSPSPFSEDSEQGSSARSLENGTPNSTLPQSVFRSSGEASKDKSSEATSMISKLTEEKMSAVQQNQKLRQELDVLRKESSKSNGGFSITFLIVVGILGIIAGFILKKT

SEQ ID NO: 6943 - protein, 216 aa, Glycine max
  peptide (1)..(216): Ceres Seq. ID no. 12611237
  misc_feature (1)..(216): NCBI GI NO: 11288307 NR Description: 27k vesicle-associated membrane protein-associatedprotein
  misc_feature (1)..(215): NCBI GI NO: 18411240 NR Description: putative proline-rich protein
  misc_feature (1)..(215): NCBI GI NO: 21592874 NR Description: putative proline-rich protein
  misc_feature (1)..(216): NCBI GI NO: 15225415 NR Description: putative VAMP-associated protein
  misc_feature (1)..(216): NCBI GI NO: 18411661 NR Description: putative protein; protein id: At3g60600
  misc_feature (1)..(216): NCBI GI NO: 21554053 NR Description: putative VAMP-associated protein
  misc_feature (1)..(216): NCBI GI NO: 11288305 NR Description: hypothetical protein T4C21
  misc_feature (1)..(180): NCBI GI NO: 7486542 NR Description: hypothetical protein F6N15
  misc_feature (1)..(162): NCBI GI NO: 37535894 NR Description: putative vesicle-associated membrane protein
  misc_feature (154)..(215): NCBI GI NO: 37535894 NR Description: putative vesicle-associated membrane protein
MKQSSCSMQLANKTDRYVAFKVKTTNPKQYCVRPNIGVVLPGSTCDVTVTMQAQREAPADLQCKDKFLVQSVAAENGAATQDISAAMFNKEPGKVVDECKLRVIYVPTSSPSPFSEDSEQGSSARSLENGTPNSTLPQSVFRSSGEASKDKSSEATSMISKLTEEKMSAVQQNQKLRQELDVLRKESSKSNGGFSITFLIVVGILGIIAGFILKKT

SEQ ID NO: 6944 - protein, 209 aa, Glycine max
  peptide (1)..(209): Ceres Seq. ID no. 12611238
  misc_feature (1)..(209): NCBI GI NO: 11288307 NR Description: 27k vesicle-associated membrane protein-associatedprotein
  misc_feature (1)..(208): NCBI GI NO: 18411240 NR Description: putative proline-rich protein
  misc_feature (1)..(208): NCBI GI NO: 21592874 NR Description: putative proline-rich protein
  misc_feature (1)..(209): NCBI GI NO: 15225415 NR Description: putative VAMP-associated protein
  misc_feature (1)..(209): NCBI GI NO: 18411661 NR Description: putative protein; protein id: At3g60600
  misc_feature (1)..(209): NCBI GI NO: 21554053 NR Description: putative VAMP-associated protein
  misc_feature (1)..(209): NCBI GI NO: 11288305 NR Description: hypothetical protein T4C21
  misc_feature (1)..(173): NCBI GI NO: 7486542 NR Description: hypothetical protein F6N15
  misc_feature (1)..(155): NCBI GI NO: 37535894 NR Description: putative vesicle-associated membrane protein
  misc_feature (147)..(208): NCBI GI NO: 37535894 NR Description: putative vesicle-associated membrane protein
MQLANKTDRYVAFKVKTTNPKQYCVRPNIGVVLPGSTCDVTVTMQAQREAPADLQCKDKFLVQSVAAENGAATQDISAAMFNKEPGKVVDECKLRVIYVPTSSPSPFSEDSEQGSSARSLENGTPNSTLPQSVFRSSGEASKDKSSEATSMISKLTEEKMSAVQQNQKLRQELDVLRKESSKSNGGFSITFLIVVGILGIIAGFILKKT

SEQ ID NO: 6945 - DNA, 750 bp, Glycine max
  misc_feature (1)..(750): Ceres Seq. ID no. 13639786
accggtaaagtaactagtggcaagtggtactgtaaaacatcacatcgtcgcaccgtgacggtgttcggccgagccggtcgatcgacacggcagccagcatgaaggcgtcctgcttactggtcgtgcttctgctcgccgtcgccacggggagcaggctctcgctcgccgcccgcgagggcagcaccctgggcggcgagctcggcgagctcatcgccaaggccggcagcttcctcacgtcggcgcgccgcgcgggagcagacggctggcactccgccacggccgcggaggtggacgcctcggcgaagaaggggcacggccatccggcggggccgaggaagcgtctgaagaagtcgtcggtgaactgcatcccggccgacatgtgccggaagaagaaggtgctgtgcggcaagcggtgctacaagacgtcgcacgctgccggcgccggcctcgaccacgtcccctccaaccggtgcgtcgtcaggtgcaagaagtgcgtgcccacctgctagatcgatcgttggttgctcctacccttccctcttctgggttacgtgtcgtgtcgtgtcgtggtgctcgatccgtgcatgctagctacatttgcttttccttccatagggttcatgcatcagttgaataagcaggcgggcttcccgccatcatgcatgcagtataggtagtggatgggttctactctaaaagaaatgcaccacggttgtgtgctaagtttgaacgtgatctcatctcatcttt

SEQ ID NO: 6946 - protein, 136 aa, Glycine max
  peptide (1)..(136): Ceres Seq. ID no. 13639787
  misc_feature (1)..(136): NCBI GI NO: 21742079 NR Description: OSJNBa0074L08.2
MKASCLLVVLLLAVATGSRLSLAAREGSTLGGELGELIAKAGSFLTSARRAGADGWHSATAAEVDASAKKGHGHPAGPRKRLKKSSVNCIPADMCRKKKVLCGKRCYKTSHAAGAGLDHVPSNRCVVRCKKCVPTC

SEQ ID NO: 6947 - DNA, 1003 bp, Glycine max
  misc_feature (1)..(1003): Ceres Seq. ID no. 13504028
ttgacaatgtgaaatccatataatgtagtgcttgatttgggatgcttgttattgttattccatactgaaaaggtgtgtccttgtggttaactttcattaactatgttgctattgccagatgaattgaagccttctaatgtgggtcttgaacaagaggcgcaattggtgcgtggatggaaaggttctttgaatggcaccaatggcaaaaaggggcgcaatggaagttatcagtatccaccctccattaagtacattcacttgcatgaatgtgacaaattctctatgggaatcttctgtatgtctcctggttccgttattccgcttcataaccatcccggaatgactgttttgagcaagcttctttatggttcattacttgtgaggtcatatgattggctggatttacctgggccagatgatccatctcaagctagaccagcaaaacttgtgaaagattgtcagatgagtgccccctgtaacaccacagttctttatccaagcaagggtggcaacattcattgtttcaaagccttaaccccttgcgctctctttgacgttctttcccctccttactcatcagaagatggaagacactgctcatatttcaggaagtcaactaggaaagatcttccaggtgttgagcttgatcagctgagtggtgtaaagccatctgaaataacctggctagaagagatccaagcacctgaaaacctggtggttagaagaggtgtttacaaaggccctactataagacgatgaaggatacaactaatttgtatttacataacattagccaggcatgactagaaactaaatatgatggggatataaattaaaggtggtatatcttgggaataattgaccatctgctttatatgattgttaactgtacatactgtgataaatgatggcagttaatgttgatcatgccttgtgtatccttgttctaactagcccctttttagattattagaggaatagcaccaacatggtgatctttggc

SEQ ID NO: 6948 - protein, 218 aa, Glycine max
  peptide (1)..(218): Ceres Seq. ID no. 13504029
  misc_feature (6)..(217): NCBI GI NO: 18406030 NR Description: expressed protein [Arabidopsis thaliana]
  misc_feature (6)..(218): NCBI GI NO: 15231104 NR Description: expressed protein [Arabidopsis thaliana]
  misc_feature (6)..(217): NCBI GI NO: 25370572 NR Description: hypothetical protein At2g42670
  misc_feature (6)..(217): NCBI GI NO: 21536850 NR Description: unknown [Arabidopsis thaliana]
  misc_feature (4)..(218): NCBI GI NO: 38345647 NR Description: OSJNBb0040D15.1
  misc_feature (6)..(216): NCBI GI NO: 15242218 NR Description: expressed protein [Arabidopsis thaliana]
  misc_feature (10)..(216): NCBI GI NO: 34906308 NR Description: unnamed protein product
  misc_feature (6)..(217): NCBI GI NO: 18394617 NR Description: expressed protein [Arabidopsis thaliana]
  misc_feature (6)..(217): NCBI GI NO: 15451150 NR Description: Unknown protein [Arabidopsis thaliana]
  misc_feature (6)..(217): NCBI GI NO: 10176982 NR Description: contains similarity to unknownprotein~emb|CAB89322
MLLLPDELKPSNVGLEQEAQLVRGWKGSLNGTNGKKGRNGSYQYPPSIKYIHLHECDKFSMGIFCMSPGSVIPLHNHPGMTVLSKLLYGSLLVRSYDWLDLPGPDDPSQARPAKLVKDCQMSAPCNTTVLYPSKGGNIHCFKALTPCALFDVLSPPYSSEDGRHCSYFRKSTRKDLPGVELDQLSGVKPSEITWLEEIQAPENLVVRRGVYKGPTIRR

SEQ ID NO: 6949 - protein, 158 aa, Glycine max
  peptide (1)..(158): Ceres Seq. ID no. 13504030
  misc_feature (1)..(157): NCBI GI NO: 18406030 NR Description: expressed protein [Arabidopsis thaliana]
  misc_feature (1)..(158): NCBI GI NO: 15231104 NR Description: expressed protein [Arabidopsis thaliana]
  misc_feature (1)..(157): NCBI GI NO: 25370572 NR Description: hypothetical protein At2g42670
  misc_feature (1)..(157): NCBI GI NO: 21536850 NR Description: unknown [Arabidopsis thaliana]
  misc_feature (1)..(158): NCBI GI NO: 38345647 NR Description: OSJNBb0040D15.1
  misc_feature (1)..(156): NCBI GI NO: 15242218 NR Description: expressed protein [Arabidopsis thaliana]
  misc_feature (1)..(156): NCBI GI NO: 34906308 NR Description: unnamed protein product
  misc_feature (1)..(157): NCBI GI NO: 18394617 NR Description: expressed protein [Arabidopsis thaliana]
  misc_feature (1)..(157): NCBI GI NO: 15451150 NR Description: Unknown protein [Arabidopsis thaliana]
  misc_feature (1)..(157): NCBI GI NO: 10176982 NR Description: contains similarity to unknownprotein~emb|CAB89322
MGIFCMSPGSVIPLHNHPGMTVLSKLLYGSLLVRSYDWLDLPGPDDPSQARPAKLVKDCQMSAPCNTTVLYPSKGGNIHCFKALTPCALFDVLSPPYSSEDGRHCSYFRKSTRKDLPGVELDQLSGVKPSEITWLEEIQAPENLVVRRGVYKGPTIRR

SEQ ID NO: 6950 - protein, 153 aa, Glycine max
  peptide (1)..(153): Ceres Seq. ID no. 13504031
  misc_feature (1)..(152): NCBI GI NO: 18406030 NR Description: expressed protein [Arabidopsis thaliana]
  misc_feature (1)..(153): NCBI GI NO: 15231104 NR Description: expressed protein [Arabidopsis thaliana]
  misc_feature (1)..(152): NCBI GI NO: 25370572 NR Description: hypothetical protein At2g42670
  misc_feature (1)..(152): NCBI GI NO: 21536850 NR Description: unknown [Arabidopsis thaliana]
  misc_feature (1)..(153): NCBI GI NO: 38345647 NR Description: OSJNBb0040D15.1
  misc_feature (1)..(151): NCBI GI NO: 15242218 NR Description: expressed protein [Arabidopsis thaliana]
  misc_feature (1)..(151): NCBI GI NO: 34906308 NR Description: unnamed protein product
  misc_feature (1)..(152): NCBI GI NO: 18394617 NR Description: expressed protein [Arabidopsis thaliana]
  misc_feature (1)..(152): NCBI GI NO: 15451150 NR Description: Unknown protein [Arabidopsis thaliana]
  misc_feature (1)..(152): NCBI GI NO: 10176982 NR Description: contains similarity to unknownprotein~emb|CAB89322
MSPGSVIPLHNHPGMTVLSKLLYGSLLVRSYDWLDLPGPDDPSQARPAKLVKDCQMSAPCNTTVLYPSKGGNIHCFKALTPCALFDVLSPPYSSEDGRHCSYFRKSTRKDLPGVELDQLSGVKPSEITWLEEIQAPENLVVRRGVYKGPTIRR

SEQ ID NO: 6951 - DNA, 794 bp, Glycine max
  misc_feature (1)..(794): Ceres Seq. ID no. 12583773
gacacgaaacacgcagaagtgttgtggcattcggtagataaaaatctctcgaaacataggcttataaaatgccaaagattgggccattttggtaatttcatgttacaagatatgttttctgcgttccccttttgcctatataaatgctagtatgtagagtgagcaagtcactaactcaattagaattcttcaaaaaactctagaatttgcatgcactgttcttcatacaatggcattacgcgagcttattgtgatggggttattgctgctggtttgtcttgcaaaggtttcatctgatgttaacatagaaaaggagcaagatgaagaatttcgctttcctgttgaccatcttatcgtgagaggcgggaacagaaggctaatgcaggacatagattgtggaggattgtgcaagacaaggtgcagtgcccattcaaggccaaatgtgtgcaacagggcttgtggcacatgttgtgtgaggtgcaagtgtgttccacctggaacttccggcaacagggagctttgtgggacctgctatactgatatgaccacccatggtaacaagaccaagtgcccgtaaagcccatagaaggtgagccctatccaattgggcccttcacacacctagctaatcacaccaagcaaagctagcatagtttagtaaataataaatgtgttatctacacttttgtagatttggatttgtcatctttaagatgtgttctagtttttatctttgttataaaggtatggtactatatgaatcaagtatataaactttgcgcttagattactcc

SEQ ID NO: 6952 - protein, 115 aa, Glycine max
  peptide (1)..(115): Ceres Seq. ID no. 12583774
  misc_feature (39)..(115): Pfam Name: Pfam Description:  Gibberellin regulated protein
  misc_feature (39)..(115): NCBI GI NO: 2253442 NR Description: LTCOR11 [Lavatera thuringiaca]
  misc_feature (54)..(115): NCBI GI NO: 14625945 NR Description: snakin2 [Solanum tuberosum]
  misc_feature (39)..(115): NCBI GI NO: 2792297 NR Description: GAST-like gene product [Fragaria x ananassa]
  misc_feature (54)..(115): NCBI GI NO: 14625943 NR Description: snakin2 [Solanum tuberosum]
  misc_feature (54)..(115): NCBI GI NO: 5102600 NR Description: GEG protein [Gerbera hybrid cultivar]
  misc_feature (39)..(115): NCBI GI NO: 3094012 NR Description: cold-regulated LTCOR12 [Lavatera thuringiaca]
  misc_feature (54)..(115): NCBI GI NO: 15242165 NR Description: putative protein; protein id: At5g14920
  misc_feature (54)..(115): NCBI GI NO: 21592790 NR Description: unknown [Arabidopsis thaliana]
  misc_feature (1)..(115): NCBI GI NO: 15233952 NR Description: gibberellin-regulated protein GASA3 precursor
  misc_feature (1)..(115): NCBI GI NO: 15219934 NR Description: putative gibberellin-regulated protein
MALRELIVMGLLLLVCLAKVSSDVNIEKEQDEEFRFPVDHLIVRGGNRRLMQDIDCGGLCKTRCSAHSRPNVCNRACGTCCVRCKCVPPGTSGNRELCGTCYTDMTTHGNKTKCP

SEQ ID NO: 6953 - protein, 107 aa, Glycine max
  peptide (1)..(107): Ceres Seq. ID no. 12583775
  misc_feature (31)..(107): Pfam Name: Pfam Description:  Gibberellin regulated protein
  misc_feature (31)..(107): NCBI GI NO: 2253442 NR Description: LTCOR11 [Lavatera thuringiaca]
  misc_feature (46)..(107): NCBI GI NO: 14625945 NR Description: snakin2 [Solanum tuberosum]
  misc_feature (31)..(107): NCBI GI NO: 2792297 NR Description: GAST-like gene product [Fragaria x ananassa]
  misc_feature (46)..(107): NCBI GI NO: 14625943 NR Description: snakin2 [Solanum tuberosum]
  misc_feature (46)..(107): NCBI GI NO: 5102600 NR Description: GEG protein [Gerbera hybrid cultivar]
  misc_feature (31)..(107): NCBI GI NO: 3094012 NR Description: cold-regulated LTCOR12 [Lavatera thuringiaca]
  misc_feature (46)..(107): NCBI GI NO: 15242165 NR Description: putative protein; protein id: At5g14920
  misc_feature (46)..(107): NCBI GI NO: 21592790 NR Description: unknown [Arabidopsis thaliana]
  misc_feature (1)..(107): NCBI GI NO: 15233952 NR Description: gibberellin-regulated protein GASA3 precursor
  misc_feature (1)..(107): NCBI GI NO: 15219934 NR Description: putative gibberellin-regulated protein
MGLLLLVCLAKVSSDVNIEKEQDEEFRFPVDHLIVRGGNRRLMQDIDCGGLCKTRCSAHSRPNVCNRACGTCCVRCKCVPPGTSGNRELCGTCYTDMTTHGNKTKCP

SEQ ID NO: 6954 - protein, 65 aa, Glycine max
  peptide (1)..(65): Ceres Seq. ID no. 12583776
  misc_feature (1)..(65): Pfam Name: Pfam Description:  Gibberellin regulated protein
  misc_feature (1)..(65): NCBI GI NO: 2253442 NR Description: LTCOR11 [Lavatera thuringiaca]
  misc_feature (4)..(65): NCBI GI NO: 14625945 NR Description: snakin2 [Solanum tuberosum]
  misc_feature (1)..(65): NCBI GI NO: 2792297 NR Description: GAST-like gene product [Fragaria x ananassa]
  misc_feature (4)..(65): NCBI GI NO: 14625943 NR Description: snakin2 [Solanum tuberosum]
  misc_feature (4)..(65): NCBI GI NO: 5102600 NR Description: GEG protein [Gerbera hybrid cultivar]
  misc_feature (1)..(65): NCBI GI NO: 3094012 NR Description: cold-regulated LTCOR12 [Lavatera thuringiaca]
  misc_feature (4)..(65): NCBI GI NO: 15242165 NR Description: putative protein; protein id: At5g14920
  misc_feature (4)..(65): NCBI GI NO: 21592790 NR Description: unknown [Arabidopsis thaliana]
  misc_feature (1)..(65): NCBI GI NO: 15233952 NR Description: gibberellin-regulated protein GASA3 precursor
  misc_feature (1)..(65): NCBI GI NO: 15219934 NR Description: putative gibberellin-regulated protein
MQDIDCGGLCKTRCSAHSRPNVCNRACGTCCVRCKCVPPGTSGNRELCGTCYTDMTTHGNKTKCP

SEQ ID NO: 6955 - DNA, 633 bp, Glycine max
  misc_feature (1)..(633): Ceres Seq. ID no. 12610457
tgtggctgagaattaattattattatcaattatgggtctctcaaatttcccaagtgcatctgaaggggtgctacctgcttgtgataaacacggttctctcagtggcagtgttgaagaacatgtttagatccatgctccaagtagtacttggtggcagtgctgctgctaatggttcaaacattgaacatgatgaaagttcatcatcatcatgggaaaggagggtgtcaataactcagtacaagtcattgtgccacagccacgacataggaggaacaagtatggctatggtggagtgctgcgtttgtttgtgtcgttttgaagccaatcaagaggtcagtgatttgccttgcaagcattacttccacagaggttgcttggacaaatggtttgataacaaacacaccacttgtcccttgtgccgttccatcgactagacatgcagacatatacatacaaaggttgattaattaccattagagatatagctagctagttaattagttgttgctatatactgttaactggttatagtgaaaagaatcaatgcctcttttcatttctttactttagatttgtaaaactccttcaaccaactcagtttctctttgttttagtttttatggaacgtaagag

SEQ ID NO: 6956 - protein, 143 aa, Glycine max
  peptide (1)..(143): Ceres Seq. ID no. 12610458
  misc_feature (98)..(139): Pfam Name: RING finger Pfam Description: Zinc finger, C3HC4 type
  misc_feature (25)..(142): NCBI GI NO: 25403249 NR Description: protein F21J9.24 [imported] - Arabidopsis thaliana
  misc_feature (23)..(141): NCBI GI NO: 20340241 NR Description: putative RING zinc finger protein-like protein
  misc_feature (23)..(141): NCBI GI NO: 15228108 NR Description: putative RING zinc finger protein
  misc_feature (10)..(140): NCBI GI NO: 15239242 NR Description: putative protein; protein id: At5g66070.1
  misc_feature (48)..(140): NCBI GI NO: 34903102 NR Description: unnamed protein product
  misc_feature (57)..(140): NCBI GI NO: 29477113 NR Description: Similar to hypothetical protein LOC51255
  misc_feature (98)..(141): NCBI GI NO: 15233117 NR Description: RING finger protein; protein id: At3g61460
  misc_feature (97)..(140): NCBI GI NO: 33146524 NR Description: putative RES protein
  misc_feature (88)..(140): NCBI GI NO: 37534730 NR Description: putative RING zinc finger protein
  misc_feature (93)..(140): NCBI GI NO: 7487667 NR Description: hypothetical protein T5C23
WLRINYYYQLWVSQISQVHLKGCYLLVINTVLSVAVLKNMFRSMLQVVLGGSAAANGSNIEHDESSSSSWERRVSITQYKSLCHSHDIGGTSMAMVECCVCLCRFEANQEVSDLPCKHYFHRGCLDKWFDNKHTTCPLCRSID

SEQ ID NO: 6957 - protein, 104 aa, Glycine max
  peptide (1)..(104): Ceres Seq. ID no. 12610459
  misc_feature (59)..(100): Pfam Name: RING finger Pfam Description: Zinc finger, C3HC4 type
  misc_feature (1)..(103): NCBI GI NO: 25403249 NR Description: protein F21J9.24 [imported] - Arabidopsis thaliana
  misc_feature (1)..(102): NCBI GI NO: 20340241 NR Description: putative RING zinc finger protein-like protein
  misc_feature (1)..(102): NCBI GI NO: 15228108 NR Description: putative RING zinc finger protein
  misc_feature (1)..(101): NCBI GI NO: 15239242 NR Description: putative protein; protein id: At5g66070.1
  misc_feature (9)..(101): NCBI GI NO: 34903102 NR Description: unnamed protein product
  misc_feature (18)..(101): NCBI GI NO: 29477113 NR Description: Similar to hypothetical protein LOC51255
  misc_feature (59)..(102): NCBI GI NO: 15233117 NR Description: RING finger protein; protein id: At3g61460
  misc_feature (58)..(101): NCBI GI NO: 33146524 NR Description: putative RES protein
  misc_feature (49)..(101): NCBI GI NO: 37534730 NR Description: putative RING zinc finger protein
  misc_feature (54)..(101): NCBI GI NO: 7487667 NR Description: hypothetical protein T5C23
MFRSMLQVVLGGSAAANGSNIEHDESSSSSWERRVSITQYKSLCHSHDIGGTSMAMVECCVCLCRFEANQEVSDLPCKHYFHRGCLDKWFDNKHTTCPLCRSID

SEQ ID NO: 6958 - protein, 100 aa, Glycine max
  peptide (1)..(100): Ceres Seq. ID no. 12610460
  misc_feature (55)..(96): Pfam Name: RING finger Pfam Description: Zinc finger, C3HC4 type
  misc_feature (1)..(99): NCBI GI NO: 25403249 NR Description: protein F21J9.24 [imported] - Arabidopsis thaliana
  misc_feature (1)..(98): NCBI GI NO: 20340241 NR Description: putative RING zinc finger protein-like protein
  misc_feature (1)..(98): NCBI GI NO: 15228108 NR Description: putative RING zinc finger protein
  misc_feature (1)..(97): NCBI GI NO: 15239242 NR Description: putative protein; protein id: At5g66070.1
  misc_feature (5)..(97): NCBI GI NO: 34903102 NR Description: unnamed protein product
  misc_feature (14)..(97): NCBI GI NO: 29477113 NR Description: Similar to hypothetical protein LOC51255
  misc_feature (55)..(98): NCBI GI NO: 15233117 NR Description: RING finger protein; protein id: At3g61460
  misc_feature (54)..(97): NCBI GI NO: 33146524 NR Description: putative RES protein
  misc_feature (45)..(97): NCBI GI NO: 37534730 NR Description: putative RING zinc finger protein
  misc_feature (50)..(97): NCBI GI NO: 7487667 NR Description: hypothetical protein T5C23
MLQVVLGGSAAANGSNIEHDESSSSSWERRVSITQYKSLCHSHDIGGTSMAMVECCVCLCRFEANQEVSDLPCKHYFHRGCLDKWFDNKHTTCPLCRSID

SEQ ID NO: 6959 - DNA, 808 bp, Glycine max
  misc_feature (1)..(808): Ceres Seq. ID no. 12610475
aggacgagccggcggcgcagccagtcagaggagcggcggcggcgcgagctctgtctccggggagaagccgaggagcgagtgagcagcagccactccgtgcgttgcggggtggggaggcaactccgtgagctcgtcttcgtgcggccgccggcgccggtggtgaccaggccaggtccgccatgtcggccttcaccggcgtgtccatcgccgacggctacaagcggtgcggctgcgagacgctggccgtggacgcccgcggggacagcggctaccacctgctcatggtcaacggctactcgcgcaccaaagagctgattcccaccggccagagcatcaccgccaactctttcaatgtgggaggccatgactggttgatcgagtactaccctaacggcgagaaccttctctacgacaccgatgacgacgacgaagagcccgtggaggtcaggttcagtttcagcttggtggaccaggtggagaagcagatgcccatgtacattcgtgcaacccgcagcttctccagcaccacttcaatctggggcaacgacaggtttatcagaaagagcgattcattcctgataaaatccttatgttctataccataagagaacctacctcaaggccaacacgttccctagtggaaaatgatgctgatgcttgttctatactatatgttggtgatgcattctttcagcattgccatgagcctctgttttctttctactcctctgttttcttagtttttttcctgaaagagtatgtttctttcagtggaagcactatgcatgtttacgtcattcattcattc

SEQ ID NO: 6960 - protein, 141 aa, Glycine max
  peptide (1)..(141): Ceres Seq. ID no. 12610476
  misc_feature (3)..(130): NCBI GI NO: 37534588 NR Description: putative speckle-type protein
  misc_feature (3)..(128): NCBI GI NO: 37534594 NR Description: putative speckle-type protein
  misc_feature (22)..(130): NCBI GI NO: 37534574 NR Description: putative speckle-type protein
  misc_feature (29)..(130): NCBI GI NO: 37534558 NR Description: putative speckle-type protein
  misc_feature (22)..(130): NCBI GI NO: 37534532 NR Description: putative speckle-type protein
  misc_feature (22)..(128): NCBI GI NO: 37534570 NR Description: putative speckle-type protein
  misc_feature (17)..(128): NCBI GI NO: 37534516 NR Description: putative speckle-type protein
  misc_feature (29)..(130): NCBI GI NO: 37534534 NR Description: putative speckle-type protein
  misc_feature (22)..(130): NCBI GI NO: 37534548 NR Description: putative speckle-type protein
  misc_feature (22)..(128): NCBI GI NO: 21740758 NR Description: OSJNBa0088K19.10
MSAFTGVSIADGYKRCGCETLAVDARGDSGYHLLMVNGYSRTKELIPTGQSITANSFNVGGHDWLIEYYPNGENLLYDTDDDDEEPVEVRFSFSLVDQVEKQMPMYIRATRSFSSTTSIWGNDRFIRKSDSFLIKSLCSIP

SEQ ID NO: 6961 - protein, 107 aa, Glycine max
  peptide (1)..(107): Ceres Seq. ID no. 12610477
  misc_feature (1)..(96): NCBI GI NO: 37534588 NR Description: putative speckle-type protein
  misc_feature (1)..(94): NCBI GI NO: 37534594 NR Description: putative speckle-type protein
  misc_feature (1)..(96): NCBI GI NO: 37534574 NR Description: putative speckle-type protein
  misc_feature (1)..(96): NCBI GI NO: 37534558 NR Description: putative speckle-type protein
  misc_feature (1)..(96): NCBI GI NO: 37534532 NR Description: putative speckle-type protein
  misc_feature (1)..(94): NCBI GI NO: 37534570 NR Description: putative speckle-type protein
  misc_feature (1)..(94): NCBI GI NO: 37534516 NR Description: putative speckle-type protein
  misc_feature (1)..(96): NCBI GI NO: 37534534 NR Description: putative speckle-type protein
  misc_feature (1)..(96): NCBI GI NO: 37534548 NR Description: putative speckle-type protein
  misc_feature (1)..(94): NCBI GI NO: 21740758 NR Description: OSJNBa0088K19.10
MVNGYSRTKELIPTGQSITANSFNVGGHDWLIEYYPNGENLLYDTDDDDEEPVEVRFSFSLVDQVEKQMPMYIRATRSFSSTTSIWGNDRFIRKSDSFLIKSLCSIP

SEQ ID NO: 6962 - protein, 104 aa, Glycine max
  peptide (1)..(104): Ceres Seq. ID no. 12610478
  misc_feature (8)..(82): Pfam Name: Pfam Description:  TT viral ORF2
RTSRRRSQSEERRRRELCLRGEAEERVSSSHSVRCGVGRQLRELVFVRPPAPVVTRPGPPCRPSPACPSPTATSGAAARRWPWTPAGTAATTCSWSTATRAPKS

SEQ ID NO: 6963 - DNA, 1213 bp, Glycine max
  misc_feature (1)..(1213): Ceres Seq. ID no. 12610790
attaaccccaggcacgcctcccgctgcaaccaacccgagtccttccaccctgcacagaatctcagcccaacccacaggtctcgactcaagccatgggcgccggcgacaagacggccgcgggcatgccgcgcatcggcatgggcacggcggtgcaggggcccaagccggaccccatccgccgcgccgtcctccgcgccatcgaggtagggtaccgccacttcgacacggccgcgcactacgagaccgaggcccccatcggcgaggccgccgccgaggccgtgcgctccggcgccgtcgcctcccgggacgacctcttcatcacctccaagctctggtgcagcgatgcgcaccgcgacagggtcgtccccgccctcaggcagacgctccggaatctccagatggagtacgtggacctgtacctcgtccactggccggtgtccatgaagcccgggcggttcaaggcccccttcacggcggaggacttcgtgccgttcgacatgcgggccgtgtgggaggccatggaggagtgccacaggctgggcctcgccaaggccatcggcgtcgccaatttctcctgcaagaagcttgagaccctcctctccttcgccaccatccctcccaccgtcaatcaggtggaggtgaacccggtgtggcagcagaggaagctgagggagttctgcaggggcaagggcatccagctgtgcgcctactcgccgctgggggccaagggcacgcactggggcagcgacgccgtgatggacgcgggcgtcctgcaggagatcgccgcgtccaggggcaagagtgtggcgcaggtgtgcctgaggtgggtgtacgagcagggggactgcctcatcgtcaagagcttcgacgaggcccggatgcgggagaacctggacgtggacggctgggagctcaccgaggaggagcaccgcaggatcgcggagatcccgcagcgcaagatcaacctcggcaagcgctacgtgtccgagcacgggccctacaagtccctcgaggagctctgggacggtgagatatgagtgatcactggagaggctggctggccggtgcgacgggttctgttgggttgtcatccttggccatggatgggtggttgatcgggggacgatttccctttgaataaaatcatgttctgcattgtgtttcagtgaataaatggagatgtttactaccggatttaaggagagttactaag

SEQ ID NO: 6964 - protein, 314 aa, Glycine max
  peptide (1)..(314): Ceres Seq. ID no. 12610791
  misc_feature (2)..(314): NCBI GI NO: 27357979 NR Description: Putative NADPH-dependent oxidoreductase
  misc_feature (11)..(314): NCBI GI NO: 37530522 NR Description: putative NADPH-dependent oxidoreductase
  misc_feature (11)..(312): NCBI GI NO: 37530524 NR Description: putative NADPH-dependent oxidoreductase
  misc_feature (11)..(314): NCBI GI NO: 37530540 NR Description: putative NADPH-dependent oxidoreductase
  misc_feature (10)..(314): NCBI GI NO: 6478216 NR Description: putative NADPH-dependent oxidoreductase
  misc_feature (11)..(314): NCBI GI NO: 40781599 NR Description: reductase 1 [Hydrangea macrophylla]
  misc_feature (11)..(313): NCBI GI NO: 40781598 NR Description: reductase 2 [Hydrangea macrophylla]
  misc_feature (11)..(314): NCBI GI NO: 15218958 NR Description: aldo/keto reductase, putative
  misc_feature (11)..(314): NCBI GI NO: 25283477 NR Description: probable Aldo/keto reductase F23H11.26
  misc_feature (1)..(314): NCBI GI NO: 15218960 NR Description: aldo/keto reductase, putative
MGAGDKTAAGMPRIGMGTAVQGPKPDPIRRAVLRAIEVGYRHFDTAAHYETEAPIGEAAAEAVRSGAVASRDDLFITSKLWCSDAHRDRVVPALRQTLRNLQMEYVDLYLVHWPVSMKPGRFKAPFTAEDFVPFDMRAVWEAMEECHRLGLAKAIGVANFSCKKLETLLSFATIPPTVNQVEVNPVWQQRKLREFCRGKGIQLCAYSPLGAKGTHWGSDAVMDAGVLQEIAASRGKSVAQVCLRWVYEQGDCLIVKSFDEARMRENLDVDGWELTEEEHRRIAEIPQRKINLGKRYVSEHGPYKSLEELWDGEI

SEQ ID NO: 6965 - protein, 304 aa, Glycine max
  peptide (1)..(304): Ceres Seq. ID no. 12610792
  misc_feature (1)..(304): NCBI GI NO: 27357979 NR Description: Putative NADPH-dependent oxidoreductase
  misc_feature (1)..(304): NCBI GI NO: 37530522 NR Description: putative NADPH-dependent oxidoreductase
  misc_feature (1)..(302): NCBI GI NO: 37530524 NR Description: putative NADPH-dependent oxidoreductase
  misc_feature (1)..(304): NCBI GI NO: 37530540 NR Description: putative NADPH-dependent oxidoreductase
  misc_feature (1)..(304): NCBI GI NO: 6478216 NR Description: putative NADPH-dependent oxidoreductase
  misc_feature (1)..(304): NCBI GI NO: 40781599 NR Description: reductase 1 [Hydrangea macrophylla]
  misc_feature (1)..(303): NCBI GI NO: 40781598 NR Description: reductase 2 [Hydrangea macrophylla]
  misc_feature (1)..(304): NCBI GI NO: 15218958 NR Description: aldo/keto reductase, putative
  misc_feature (1)..(304): NCBI GI NO: 25283477 NR Description: probable Aldo/keto reductase F23H11.26
  misc_feature (1)..(304): NCBI GI NO: 15218960 NR Description: aldo/keto reductase, putative
MPRIGMGTAVQGPKPDPIRRAVLRAIEVGYRHFDTAAHYETEAPIGEAAAEAVRSGAVASRDDLFITSKLWCSDAHRDRVVPALRQTLRNLQMEYVDLYLVHWPVSMKPGRFKAPFTAEDFVPFDMRAVWEAMEECHRLGLAKAIGVANFSCKKLETLLSFATIPPTVNQVEVNPVWQQRKLREFCRGKGIQLCAYSPLGAKGTHWGSDAVMDAGVLQEIAASRGKSVAQVCLRWVYEQGDCLIVKSFDEARMRENLDVDGWELTEEEHRRIAEIPQRKINLGKRYVSEHGPYKSLEELWDGEI

SEQ ID NO: 6966 - protein, 299 aa, Glycine max
  peptide (1)..(299): Ceres Seq. ID no. 12610793
  misc_feature (1)..(299): NCBI GI NO: 27357979 NR Description: Putative NADPH-dependent oxidoreductase
  misc_feature (1)..(299): NCBI GI NO: 37530522 NR Description: putative NADPH-dependent oxidoreductase
  misc_feature (1)..(297): NCBI GI NO: 37530524 NR Description: putative NADPH-dependent oxidoreductase
  misc_feature (1)..(299): NCBI GI NO: 37530540 NR Description: putative NADPH-dependent oxidoreductase
  misc_feature (1)..(299): NCBI GI NO: 6478216 NR Description: putative NADPH-dependent oxidoreductase
  misc_feature (1)..(299): NCBI GI NO: 40781599 NR Description: reductase 1 [Hydrangea macrophylla]
  misc_feature (1)..(298): NCBI GI NO: 40781598 NR Description: reductase 2 [Hydrangea macrophylla]
  misc_feature (1)..(299): NCBI GI NO: 15218958 NR Description: aldo/keto reductase, putative
  misc_feature (1)..(299): NCBI GI NO: 25283477 NR Description: probable Aldo/keto reductase F23H11.26
  misc_feature (1)..(299): NCBI GI NO: 15218960 NR Description: aldo/keto reductase, putative
MGTAVQGPKPDPIRRAVLRAIEVGYRHFDTAAHYETEAPIGEAAAEAVRSGAVASRDDLFITSKLWCSDAHRDRVVPALRQTLRNLQMEYVDLYLVHWPVSMKPGRFKAPFTAEDFVPFDMRAVWEAMEECHRLGLAKAIGVANFSCKKLETLLSFATIPPTVNQVEVNPVWQQRKLREFCRGKGIQLCAYSPLGAKGTHWGSDAVMDAGVLQEIAASRGKSVAQVCLRWVYEQGDCLIVKSFDEARMRENLDVDGWELTEEEHRRIAEIPQRKINLGKRYVSEHGPYKSLEELWDGEI

SEQ ID NO: 6967 - DNA, 1479 bp, Glycine max
  misc_feature (1)..(1479): Ceres Seq. ID no. 15175496
gatcctagctctctcctcaggccttttctttctctctctctctcgcgagctcctcgctctctagattcttttctaggatgggtactgccagcggtgccgtggccctgctgctggtggtgctaggagccagcgtctccagctccagtgggcagctgcaggtggggttctactccaagtcgtgccccagcgccgagtccaccgtcgcgtccgtcgtccggggaaccgccgccgccgactccaccatcctccccgccctcctccggctccagttccacgactgcttcgtcagggggtgcgacgcgtcggtgctgatcaagggcgggaacaacaacgcggaggtggacaacaacaagcaccaggggctccgcgggatggacgtcatcgaaaacgccaaggcgcagctcgagtccgagtgccccggcgtcgtctcgtgcgccgacatcgtcgtcctcgccgcgcgcgacgccgtcgcattcaccggcgggccgtcgttcgacgtgccgacggggcgccgcgacgggaaggtgtccaacgtgcgggacggcgacgtgctgccggacgtgcgcgactccgcccaggtgctccgctccaagttccgcgccagcggcctcgacgacaaggacctcgtcctcctcagctcggcgcacacggtgggcacaacggcgtgcttcttcatccaggaccggctctacaagttcccgctcccgggcggcgggctcgggtcagatccgtcgatcccggacggcttcctgtcggagctcaagtcccggtgcgcgccgggggactccaactcgcgcgtctccctggaccgcggcagcgagcgcgtgttcgacacctccatcctccgcaacatccgcaacggcttcgcggtgatcgcctccgacgccgcgctctacaacgacaccagcaccgtcgacgtggtggactcctactcgggcctcctcagcaccatcttcgggccctacttccggcaggacttcgcggactccatggtgaagatgggcagcatcggcgtgctcaccggcgccagcggggaggtcaggaaggtctgctccaagttcaactgagagagacccatccatggatccagattccattcattgcgctgccggccggagtactggtactggttggctagctggagatgaaaagcactagctagcccatgcggacatgcatctcgtgggtgcatggcccggtctcgtggcgctttcatggcttttcttcttcttcaatttattgtgtacatgttattgaaaagagagaggggaaatttagtggattcatgtgattctggcgccaaggtctagtacgtacggccaaggatctgtgcagttttctcttttgcagcggctggaagcgagattaaattcatatagctagggtatatataagatgtgcttctgtatgcttgtatgtacactacacacaccatatgtgcaattaagtggaggtgtaatttatggtcttgtcttgggt

SEQ ID NO: 6968 - protein, 329 aa, Glycine max
  peptide (1)..(329): Ceres Seq. ID no. 15175497
  misc_feature (42)..(288): Pfam Name: Pfam Description:  Peroxidase
  misc_feature (1)..(329): NCBI GI NO: 6979323 NR Description: putative peroxidase [Oryza sativa]
  misc_feature (6)..(329): NCBI GI NO: 19698450 NR Description: class III peroxidase [Gossypium hirsutum]
  misc_feature (1)..(329): NCBI GI NO: 15236089 NR Description: cationic peroxidase, putative
  misc_feature (10)..(329): NCBI GI NO: 5002236 NR Description: peroxidase [Glycine max]
  misc_feature (7)..(329): NCBI GI NO: 26397928 NR Description: Peroxidase 43 precursor (Atperox P43)
  misc_feature (8)..(329): NCBI GI NO: 7433068 NR Description: probable peroxidase (EC 1
  misc_feature (8)..(329): NCBI GI NO: 30688665 NR Description: peroxidase, putative [Arabidopsis thaliana]
  misc_feature (8)..(329): NCBI GI NO: 22330687 NR Description: peroxidase, putative [Arabidopsis thaliana]
  misc_feature (8)..(329): NCBI GI NO: 25453193 NR Description: Peroxidase 13 precursor (Atperox P13)
  misc_feature (20)..(329): NCBI GI NO: 7433080 NR Description: probable peroxidase (EC 1
MGTASGAVALLLVVLGASVSSSSGQLQVGFYSKSCPSAESTVASVVRGTAAADSTILPALLRLQFHDCFVRGCDASVLIKGGNNNAEVDNNKHQGLRGMDVIENAKAQLESECPGVVSCADIVVLAARDAVAFTGGPSFDVPTGRRDGKVSNVRDGDVLPDVRDSAQVLRSKFRASGLDDKDLVLLSSAHTVGTTACFFIQDRLYKFPLPGGGLGSDPSIPDGFLSELKSRCAPGDSNSRVSLDRGSERVFDTSILRNIRNGFAVIASDAALYNDTSTVDVVDSYSGLLSTIFGPYFRQDFADSMVKMGSIGVLTGASGEVRKVCSKFN

SEQ ID NO: 6969 - protein, 231 aa, Glycine max
  peptide (1)..(231): Ceres Seq. ID no. 15175498
  misc_feature (1)..(190): Pfam Name: Pfam Description:  Peroxidase
  misc_feature (1)..(231): NCBI GI NO: 6979323 NR Description: putative peroxidase [Oryza sativa]
  misc_feature (1)..(231): NCBI GI NO: 19698450 NR Description: class III peroxidase [Gossypium hirsutum]
  misc_feature (1)..(231): NCBI GI NO: 15236089 NR Description: cationic peroxidase, putative
  misc_feature (1)..(231): NCBI GI NO: 5002236 NR Description: peroxidase [Glycine max]
  misc_feature (1)..(231): NCBI GI NO: 26397928 NR Description: Peroxidase 43 precursor (Atperox P43)
  misc_feature (1)..(231): NCBI GI NO: 7433068 NR Description: probable peroxidase (EC 1
  misc_feature (1)..(231): NCBI GI NO: 30688665 NR Description: peroxidase, putative [Arabidopsis thaliana]
  misc_feature (1)..(231): NCBI GI NO: 22330687 NR Description: peroxidase, putative [Arabidopsis thaliana]
  misc_feature (1)..(231): NCBI GI NO: 25453193 NR Description: Peroxidase 13 precursor (Atperox P13)
  misc_feature (1)..(231): NCBI GI NO: 7433080 NR Description: probable peroxidase (EC 1
MDVIENAKAQLESECPGVVSCADIVVLAARDAVAFTGGPSFDVPTGRRDGKVSNVRDGDVLPDVRDSAQVLRSKFRASGLDDKDLVLLSSAHTVGTTACFFIQDRLYKFPLPGGGLGSDPSIPDGFLSELKSRCAPGDSNSRVSLDRGSERVFDTSILRNIRNGFAVIASDAALYNDTSTVDVVDSYSGLLSTIFGPYFRQDFADSMVKMGSIGVLTGASGEVRKVCSKFN

SEQ ID NO: 6970 - DNA, 438 bp, Glycine max
  misc_feature (1)..(438): Ceres Seq. ID no. 13582222
agattagtcacactcttcgcaagcacacaaaaaaaaaaaacccccaaatagcgtaaggataagcctcgccggcgacgaaatcagggtttcatcgaacaagaagatggctcacgcttgcgtctccacatcagcttcctctctcaggtttacagccggattcgtctccgcgagtcccaacgcctcctctttcgattctcagaagctttccctccctttcgagcctcttcgttcaagaaagacgaagaagttggttagcggcagaaagacggctccgaaggctgtatactccggcaatgtctggactccggagactccttcgcctcaaggagtttggtccatcagagatgatttacaagtcccttcttcgccgtattttcctgtgtacgctcaaggacaaggaccacctcctatggtgcaagagcgtttccagagtatcat

SEQ ID NO: 6971 - protein, 111 aa, Glycine max
  peptide (1)..(111): Ceres Seq. ID no. 13582223
  misc_feature (1)..(110): NCBI GI NO: 18378982 NR Description: ATP-dependent Clp protease proteolytic subunit
  misc_feature (1)..(110): NCBI GI NO: 15485610 NR Description: Clp protease 2 proteolytic subunit
MAHACVSTSASSLRFTAGFVSASPNASSFDSQKLSLPFEPLRSRKTKKLVSGRKTAPKAVYSGNVWTPETPSPQGVWSIRDDLQVPSSPYFPVYAQGQGPPPMVQERFQSI

SEQ ID NO: 6972 - DNA, 1005 bp, Glycine max
  misc_feature (1)..(1005): Ceres Seq. ID no. 13595093
ctagaacatcctaatcgaaaaacaacacttgactgatcttttctctcatcctcagacgcaacaagcagcttgttgcaacacacaaaaatggatcaaaccatgctgctaacttccggcatctctgcaaaccatttcttgaggaacaagaaccctctggctcagcccaaagttcaccatctcttcctctccggaaactctccggttactctaccatctcgaataccatcgttggttcctctcgctatcttcaaacccaaaaccaaagctgctcccaaaaaggttgagaaagtgaagccaaaggttgaagacggtatcttcggaacgtctggtgggataggattcacgaagcagaacgagctctttgtgggccgtgttgctatgatcggtttcgctgcatcgttgctaggtgaggcgttgactgggaaagggatattagcacagctgaatttggagacaggaataccgatttacgaagcagagccattgcttctcttcttcatattgttcactctgttgggtgccattggagctcttggagacagaggaaaattcgtcgacgatcctcccaccggactcgagaaagccgtcattcctcccggcaaaggcgttcgctctgccctcggtctcaaagaacaaggtcctttgtttgggttcacgaaggcgaacgagttgttcgtaggaagattggcacaattgggaatagcattttcattgataggagagattattacagggaaaggagcacttgctcaactcaacattgagactggtattccaattcaagatatcgaaccactcgtcctcttaaacgttgctttcttcttcgctgctgccattaatcctggtaatggaaagttcattactgatgatggtgaagaaagctaaactctctatgtactttccagttagtagtttgggagaccattatcatgttgagacaaaaaagaaatggacatcttaaactattgtaatacttaaatccttttgttttaacttggtttttct

SEQ ID NO: 6973 - protein, 265 aa, Glycine max
  peptide (1)..(265): Ceres Seq. ID no. 13595094
  misc_feature (60)..(213): Pfam Name: Pfam Description:  Chlorophyll A-B binding protein
  misc_feature (1)..(265): NCBI GI NO: 15219418 NR Description: photosystem II 22kDa protein -related
  misc_feature (1)..(265): NCBI GI NO: 15294226 NR Description: unknown protein [Arabidopsis thaliana]
  misc_feature (8)..(264): NCBI GI NO: 400890 NR Description: Photosystem II 22 kDa protein
  misc_feature (1)..(264): NCBI GI NO: 1709846 NR Description: Photosystem II 22 kDa protein
  misc_feature (1)..(264): NCBI GI NO: 18202913 NR Description: Photosystem II 22 kDa protein
  misc_feature (1)..(264): NCBI GI NO: 18203444 NR Description: Photosystem II 22 kDa protein
  misc_feature (1)..(264): NCBI GI NO: 34908652 NR Description: putative photosystem II subunit (22KDa) precursor
  misc_feature (36)..(264): NCBI GI NO: 38345525 NR Description: OSJNBa0039K24.28
  misc_feature (36)..(264): NCBI GI NO: 7489520 NR Description: photosystem II 22-K chlorophyll-binding protein -rice
  misc_feature (111)..(265): NCBI GI NO: 6006279 NR Description: photosystem II 22 kDa protein
MDQTMLLTSGISANHFLRNKNPLAQPKVHHLFLSGNSPVTLPSRIPSLVPLAIFKPKTKAAPKKVEKVKPKVEDGIFGTSGGIGFTKQNELFVGRVAMIGFAASLLGEALTGKGILAQLNLETGIPIYEAEPLLLFFILFTLLGAIGALGDRGKFVDDPPTGLEKAVIPPGKGVRSALGLKEQGPLFGFTKANELFVGRLAQLGIAFSLIGEIITGKGALAQLNIETGIPIQDIEPLVLLNVAFFFAAAINPGNGKFITDDGEES

SEQ ID NO: 6974 - protein, 261 aa, Glycine max
  peptide (1)..(261): Ceres Seq. ID no. 13595095
  misc_feature (56)..(209): Pfam Name: Pfam Description:  Chlorophyll A-B binding protein
  misc_feature (1)..(261): NCBI GI NO: 15219418 NR Description: photosystem II 22kDa protein -related
  misc_feature (1)..(261): NCBI GI NO: 15294226 NR Description: unknown protein [Arabidopsis thaliana]
  misc_feature (4)..(260): NCBI GI NO: 400890 NR Description: Photosystem II 22 kDa protein
  misc_feature (1)..(260): NCBI GI NO: 1709846 NR Description: Photosystem II 22 kDa protein
  misc_feature (1)..(260): NCBI GI NO: 18202913 NR Description: Photosystem II 22 kDa protein
  misc_feature (1)..(260): NCBI GI NO: 18203444 NR Description: Photosystem II 22 kDa protein
  misc_feature (1)..(260): NCBI GI NO: 34908652 NR Description: putative photosystem II subunit (22KDa) precursor
  misc_feature (32)..(260): NCBI GI NO: 38345525 NR Description: OSJNBa0039K24.28
  misc_feature (32)..(260): NCBI GI NO: 7489520 NR Description: photosystem II 22-K chlorophyll-binding protein -rice
  misc_feature (107)..(261): NCBI GI NO: 6006279 NR Description: photosystem II 22 kDa protein
MLLTSGISANHFLRNKNPLAQPKVHHLFLSGNSPVTLPSRIPSLVPLAIFKPKTKAAPKKVEKVKPKVEDGIFGTSGGIGFTKQNELFVGRVAMIGFAASLLGEALTGKGILAQLNLETGIPIYEAEPLLLFFILFTLLGAIGALGDRGKFVDDPPTGLEKAVIPPGKGVRSALGLKEQGPLFGFTKANELFVGRLAQLGIAFSLIGEIITGKGALAQLNIETGIPIQDIEPLVLLNVAFFFAAAINPGNGKFITDDGEES

SEQ ID NO: 6975 - protein, 168 aa, Glycine max
  peptide (1)..(168): Ceres Seq. ID no. 13595096
  misc_feature (1)..(116): Pfam Name: Pfam Description:  Chlorophyll A-B binding protein
  misc_feature (1)..(168): NCBI GI NO: 15219418 NR Description: photosystem II 22kDa protein -related
  misc_feature (1)..(168): NCBI GI NO: 15294226 NR Description: unknown protein [Arabidopsis thaliana]
  misc_feature (1)..(167): NCBI GI NO: 400890 NR Description: Photosystem II 22 kDa protein
  misc_feature (1)..(167): NCBI GI NO: 1709846 NR Description: Photosystem II 22 kDa protein
  misc_feature (1)..(167): NCBI GI NO: 18202913 NR Description: Photosystem II 22 kDa protein
  misc_feature (1)..(167): NCBI GI NO: 18203444 NR Description: Photosystem II 22 kDa protein
  misc_feature (1)..(167): NCBI GI NO: 34908652 NR Description: putative photosystem II subunit (22KDa) precursor
  misc_feature (1)..(167): NCBI GI NO: 38345525 NR Description: OSJNBa0039K24.28
  misc_feature (1)..(167): NCBI GI NO: 7489520 NR Description: photosystem II 22-K chlorophyll-binding protein -rice
  misc_feature (14)..(168): NCBI GI NO: 6006279 NR Description: photosystem II 22 kDa protein
MIGFAASLLGEALTGKGILAQLNLETGIPIYEAEPLLLFFILFTLLGAIGALGDRGKFVDDPPTGLEKAVIPPGKGVRSALGLKEQGPLFGFTKANELFVGRLAQLGIAFSLIGEIITGKGALAQLNIETGIPIQDIEPLVLLNVAFFFAAAINPGNGKFITDDGEES

SEQ ID NO: 6976 - DNA, 1076 bp, Glycine max
  misc_feature (1)..(1076): Ceres Seq. ID no. 12583280
accatcacacaatatccagaaccatctcactgtcatggcgttccgacgccctctcgcattccaccatgagtgcatgctcgtgatcgccttcgtgctggtctcctgtctcgccggcgccgccacggcgaagcagacgggccagctgaccgtgttctggggccggaacgccggcgagggcacgctgcgcgaggcctgcgacacggggctctactccaccgtcgtcatctccttctacagcgtcttcgggcacggccgctactggggcgacctctccggccaccctctcgccggcgtcggtgccgacatcaagcactgccagtccaggaacatcctcgtcctcctctccatcggcgggcccgggaacggctactccctcccgtcctccgcctccgccgcagccgtcgccgacaacctctggaacgcgcacctcggcgggcgccggaacggcgtgtaccgcccgttcggcgacgccgccgtcgacggcatcgacttctacatcgaccagggcgcccccgaccactacgacgagctggccagccgccttgacgggtacaaccggttctaccgcggccggaagggtgtgcgcctgacggccacgccgcggtgcgggttgcccgaccgccgcctgggggcggcgctccggacggggctgttcgagcgcatccacgtcaggttctacggcaacgacacatgctcgctggggaagggcggcacgtacggcgtggtagggcagtgggagaagtggacggcggcgttcccgaggacgcaggtgtacctgggcctcgcgccggcggagagtggcgtgccggagggggcgcagggcaccgtcgccgtttacctcaagtacctgtactacgacctgctgcccaaggtgcagaaggccaacaactatggcggggtcatggtctgggacaggttcgccgacaagaagacacgctggagcagcgtcgtcagcggatgggcctgatcgtttatatcgctggtttacagctacggatcggagtacatactactcctactgtgtatgcgtgtgtatgaataaaacggcatccatatgataatgatatatggatgtg

SEQ ID NO: 6977 - protein, 321 aa, Glycine max
  peptide (1)..(321): Ceres Seq. ID no. 12583281
  misc_feature (46)..(308): Pfam Name: Pfam Description:  Glycosyl hydrolases family 18
  misc_feature (12)..(321): NCBI GI NO: 18693099 NR Description: putative xylanase inhibitor protein
  misc_feature (26)..(321): NCBI GI NO: 7451378 NR Description: chitinase (EC 3.2.1.14) III C10701 - rice
  misc_feature (12)..(314): NCBI GI NO: 7451381 NR Description: chitinase (EC 3.2.1.14) III C10150 - rice
  misc_feature (12)..(315): NCBI GI NO: 7451377 NR Description: chitinase (EC 3.2.1.14) III C00481 - rice
  misc_feature (25)..(321): NCBI GI NO: 7451379 NR Description: chitinase (EC 3.2.1.14) III C10122 - rice
  misc_feature (26)..(321): NCBI GI NO: 4884516 NR Description: class III chitinase homologue (OsChib3H-b)
  misc_feature (26)..(321): NCBI GI NO: 7451380 NR Description: chitinase (EC 3.2.1.14) III C10923 - rice
  misc_feature (26)..(321): NCBI GI NO: 4884518 NR Description: class III chitinase homologue (OsChib3H-c)
  misc_feature (29)..(317): NCBI GI NO: 38346492 NR Description: OSJNBa0020I02.6
  misc_feature (25)..(321): NCBI GI NO: 34913272 NR Description: putative xylanase inhibitor protein
PSHNIQNHLTVMAFRRPLAFHHECMLVIAFVLVSCLAGAATAKQTGQLTVFWGRNAGEGTLREACDTGLYSTVVISFYSVFGHGRYWGDLSGHPLAGVGADIKHCQSRNILVLLSIGGPGNGYSLPSSASAAAVADNLWNAHLGGRRNGVYRPFGDAAVDGIDFYIDQGAPDHYDELASRLDGYNRFYRGRKGVRLTATPRCGLPDRRLGAALRTGLFERIHVRFYGNDTCSLGKGGTYGVVGQWEKWTAAFPRTQVYLGLAPAESGVPEGAQGTVAVYLKYLYYDLLPKVQKANNYGGVMVWDRFADKKTRWSSVVSGWA

SEQ ID NO: 6978 - protein, 310 aa, Glycine max
  peptide (1)..(310): Ceres Seq. ID no. 12583282
  misc_feature (35)..(297): Pfam Name: Pfam Description:  Glycosyl hydrolases family 18
  misc_feature (1)..(310): NCBI GI NO: 18693099 NR Description: putative xylanase inhibitor protein
  misc_feature (15)..(310): NCBI GI NO: 7451378 NR Description: chitinase (EC 3.2.1.14) III C10701 - rice
  misc_feature (1)..(303): NCBI GI NO: 7451381 NR Description: chitinase (EC 3.2.1.14) III C10150 - rice
  misc_feature (1)..(304): NCBI GI NO: 7451377 NR Description: chitinase (EC 3.2.1.14) III C00481 - rice
  misc_feature (14)..(310): NCBI GI NO: 7451379 NR Description: chitinase (EC 3.2.1.14) III C10122 - rice
  misc_feature (15)..(310): NCBI GI NO: 4884516 NR Description: class III chitinase homologue (OsChib3H-b)
  misc_feature (15)..(310): NCBI GI NO: 7451380 NR Description: chitinase (EC 3.2.1.14) III C10923 - rice
  misc_feature (15)..(310): NCBI GI NO: 4884518 NR Description: class III chitinase homologue (OsChib3H-c)
  misc_feature (18)..(306): NCBI GI NO: 38346492 NR Description: OSJNBa0020I02.6
  misc_feature (14)..(310): NCBI GI NO: 34913272 NR Description: putative xylanase inhibitor protein
MAFRRPLAFHHECMLVIAFVLVSCLAGAATAKQTGQLTVFWGRNAGEGTLREACDTGLYSTVVISFYSVFGHGRYWGDLSGHPLAGVGADIKHCQSRNILVLLSIGGPGNGYSLPSSASAAAVADNLWNAHLGGRRNGVYRPFGDAAVDGIDFYIDQGAPDHYDELASRLDGYNRFYRGRKGVRLTATPRCGLPDRRLGAALRTGLFERIHVRFYGNDTCSLGKGGTYGVVGQWEKWTAAFPRTQVYLGLAPAESGVPEGAQGTVAVYLKYLYYDLLPKVQKANNYGGVMVWDRFADKKTRWSSVVSGWA

SEQ ID NO: 6979 - protein, 297 aa, Glycine max
  peptide (1)..(297): Ceres Seq. ID no. 12583283
  misc_feature (22)..(284): Pfam Name: Pfam Description:  Glycosyl hydrolases family 18
  misc_feature (1)..(297): NCBI GI NO: 18693099 NR Description: putative xylanase inhibitor protein
  misc_feature (2)..(297): NCBI GI NO: 7451378 NR Description: chitinase (EC 3.2.1.14) III C10701 - rice
  misc_feature (1)..(290): NCBI GI NO: 7451381 NR Description: chitinase (EC 3.2.1.14) III C10150 - rice
  misc_feature (1)..(291): NCBI GI NO: 7451377 NR Description: chitinase (EC 3.2.1.14) III C00481 - rice
  misc_feature (1)..(297): NCBI GI NO: 7451379 NR Description: chitinase (EC 3.2.1.14) III C10122 - rice
  misc_feature (2)..(297): NCBI GI NO: 4884516 NR Description: class III chitinase homologue (OsChib3H-b)
  misc_feature (2)..(297): NCBI GI NO: 7451380 NR Description: chitinase (EC 3.2.1.14) III C10923 - rice
  misc_feature (2)..(297): NCBI GI NO: 4884518 NR Description: class III chitinase homologue (OsChib3H-c)
  misc_feature (5)..(293): NCBI GI NO: 38346492 NR Description: OSJNBa0020I02.6
  misc_feature (1)..(297): NCBI GI NO: 34913272 NR Description: putative xylanase inhibitor protein
MLVIAFVLVSCLAGAATAKQTGQLTVFWGRNAGEGTLREACDTGLYSTVVISFYSVFGHGRYWGDLSGHPLAGVGADIKHCQSRNILVLLSIGGPGNGYSLPSSASAAAVADNLWNAHLGGRRNGVYRPFGDAAVDGIDFYIDQGAPDHYDELASRLDGYNRFYRGRKGVRLTATPRCGLPDRRLGAALRTGLFERIHVRFYGNDTCSLGKGGTYGVVGQWEKWTAAFPRTQVYLGLAPAESGVPEGAQGTVAVYLKYLYYDLLPKVQKANNYGGVMVWDRFADKKTRWSSVVSGWA

SEQ ID NO: 6980 - DNA, 1004 bp, Glycine max
  misc_feature (1)..(1004): Ceres Seq. ID no. 13594962
ccccctcacaactcgccaacgccaaatccgtctccgccaccggccagccagcgagcgattcgccgccgccgccgtcaccgccgccgccggcgtcaagcccctctctccacccagcaggctcaccctcgcggcccccgccccctcacgggccccgcgtctcccgcgagaaccgcgcccgcccgcctagggtttccgccgccgccggagaggaggggagaagcggaaccagggcgagatggccggacggctcctcgggcagctcctcgtcatgggcggcgccgtcgtcggcagggccgtggtccaggcctaccgccaggccatcgtcaatgcacaaagaaccggagctgctcaggaagctgtgaatggtattcgaagggctagcaaggctatgaccgagcaagaagcccggcaaatattaggtatcagtgaaaagacgagttgggaagagatcgtaaagaagtacgacacgatgtttgagaagaacgccaagagcggaagcttctatctccagtcgaaagtccaccgggccaaagaatgtctggagtccatataccatgataagcccgacataatgaactgagatggccagcgtttcatctaatcgatcgattttgtcgtcgatgtcctgtctgagctatgctgggctgctgcatcaggtcaaatttggttgtaacaggaagtttgttccacttgactcgaataatatattcaacaaaaggaacaccgtcaccgtttgatttgtttttctggaggcgatgcctcgtttccatgcaaattcagatgttgacactttgtgttgttgccatcatctgcaatgtttgattgttgtagcagcttgtgttttgaacctgatatcccatgttgctagcattgacccgtaattttgaagcgcgattatggggttagacacctactttctcccttgaaagtacgctggttggaaaatgtaatctttgatgttggtatggttccaaagatgtaatctctatcacagcatccttccc

SEQ ID NO: 6981 - protein, 126 aa, Glycine max
  peptide (1)..(126): Ceres Seq. ID no. 13594963
PPHNSPTPNPSPPPASQRAIRRRRRHRRRRRQAPLSTQQAHPRGPRPLTGPASPARTAPARLGFPPPPERRGEAEPGRDGRTAPRAAPRHGRRRRRQGRGPGLPPGHRQCTKNRSCSGSCEWYSKG

SEQ ID NO: 6982 - protein, 119 aa, Glycine max
  peptide (1)..(119): Ceres Seq. ID no. 13594964
PSQLANAKSVSATGQPASDSPPPPSPPPPASSPSLHPAGSPSRPPPPHGPRVSRENRARPPRVSAAAGEEGRSGTRARWPDGSSGSSSSWAAPSSAGPWSRPTARPSSMHKEPELLRKL

SEQ ID NO: 6983 - protein, 114 aa, Glycine max
  peptide (1)..(114): Ceres Seq. ID no. 13594965
  misc_feature (2)..(112): Pfam Name: UPF0108 Pfam Description: Uncharacterised protein family
  misc_feature (1)..(112): NCBI GI NO: 34905796 NR Description: P0401G10.24
  misc_feature (1)..(109): NCBI GI NO: 18411133 NR Description: expressed protein [Arabidopsis thaliana]
  misc_feature (2)..(109): NCBI GI NO: 11357639 NR Description: hypothetical protein F25L23
  misc_feature (12)..(111): NCBI GI NO: 37535410 NR Description: putative pol polyprotein
  misc_feature (1)..(106): NCBI GI NO: 18424521 NR Description: auxin-regulated protein [Arabidopsis thaliana]
  misc_feature (12)..(106): NCBI GI NO: 10176880 NR Description: gene_id:MAC9.20~unknown protein
  misc_feature (4)..(104): NCBI GI NO: 19112141 NR Description: conserved hypothetical protein; similar to S
  misc_feature (1)..(103): NCBI GI NO: 21064209 NR Description: AT29287p [Drosophila melanogaster]
  misc_feature (1)..(103): NCBI GI NO: 24640407 NR Description: CG1409-PA [Drosophila melanogaster]
MAGRLLGQLLVMGGAVVGRAVVQAYRQAIVNAQRTGAAQEAVNGIRRASKAMTEQEARQILGISEKTSWEEIVKKYDTMFEKNAKSGSFYLQSKVHRAKECLESIYHDKPDIMN

SEQ ID NO: 6984 - DNA, 990 bp, Glycine max
  misc_feature (1)..(990): Ceres Seq. ID no. 13595308
  misc_feature (954)..(954): n is a, c, t, g, unknown, or other
  misc_feature (959)..(959): n is a, c, t, g, unknown, or other
  misc_feature (955)..(955): n is a, c, t, g, unknown, or other
  misc_feature (958)..(958): n is a, c, t, g, unknown, or other
  misc_feature (953)..(953): n is a, c, t, g, unknown, or other
  misc_feature (957)..(957): n is a, c, t, g, unknown, or other
  misc_feature (956)..(956): n is a, c, t, g, unknown, or other
aaaccgtccaacaaacctctttcccctccccgcatcccaagcctcccagctccatcgccacacgctcgaacccactcctctcacgctcaagcgcacaccgcaccaaccagagcagccatggctctcaccggcggcgccaccaccgcagcgtgcatcctcgtcctcctcgcgctcgccgacgccgcgggggcggctacccgggcgccagcgccggcgccggcgccggactgcatggaggcgttgattagcctcgcagactgcctcgactatgtgacgcccagcaccaagtcggctcggccttccaaggcttgctgcacggaggtgaagaccgccgtcggcacccccgccaccgtgaagtgcctctgcgctgccatggacgccaagacaactccgataccgatcaacatgacacgggtgctcgctctccccaccgcctgcggccaatccgcctccgtcttgaacaagtgccacgctgcacatgggccgggtggtgctcctgctgaagcaccgtcaccttcagcatccagtggcggcgcgaccgcttcaccaccgaaggcgaatgtggcggcgaggtctccgggcggctccgccaccgttctcttggcaactgtggtgacttcgctgctcgccttctattacctctgagggccaacatctcagcctctctcacgtgttatgttgcacagaccttgtgactctgcgttgcgcggtgttgtaatctgagtttactttgtttatcgggatgggttattatcatgtagtgtcgtggactgaatattgagtgcgtagtaaattgcaatgtaccgtggactgggtattttgaagtcgttgccagttatgacactttatttacttttgaatgcgcagatgactttgttgactttggaatgcgcagatgatctgctacgatcttcttttgggctaaaaaaaaaaaaaaaaaagcttatcgatannnnnnnraacctcgaaggggggggcccggtacccaat

SEQ ID NO: 6985 - protein, 214 aa, Glycine max
  peptide (1)..(214): Ceres Seq. ID no. 15221539
  misc_feature (52)..(214): NCBI GI NO: 33146785 NR Description: unknown protein
  misc_feature (52)..(173): NCBI GI NO: 34913126 NR Description: hypothetical protein~predicted by FGENESH etc.
  misc_feature (46)..(210): NCBI GI NO: 18424785 NR Description: protease inhibitor/seed storage/lipid transfer
  misc_feature (44)..(183): NCBI GI NO: 34394120 NR Description: hypothetical protein
  misc_feature (46)..(210): NCBI GI NO: 21618136 NR Description: nonspecific lipid-transfer protein-like protein
  misc_feature (46)..(183): NCBI GI NO: 10176956 NR Description: contains similarity to nonspecific lipid-transferprotein~gene_id:MHJ24
  misc_feature (59)..(209): NCBI GI NO: 7487610 NR Description: hypothetical protein T3F12
  misc_feature (40)..(213): NCBI GI NO: 25553595 NR Description: OJ1656_E11.26
  misc_feature (53)..(199): NCBI GI NO: 18407534 NR Description: protease inhibitor/seed storage/lipid transfer
  misc_feature (53)..(199): NCBI GI NO: 21592774 NR Description: unknown [Arabidopsis thaliana]
KPSNKPLSPPRIPSLPAPSPHARTHSSHAQAHTAPTRAAMALTGGATTAACILVLLALADAAGAATRAPAPAPAPDCMEALISLADCLDYVTPSTKSARPSKACCTEVKTAVGTPATVKCLCAAMDAKTTPIPINMTRVLALPTACGQSASVLNKCHAAHGPGGAPAEAPSPSASSGGATASPPKANVAARSPGGSATVLLATVVTSLLAFYYL

SEQ ID NO: 6986 - protein, 175 aa, Glycine max
  peptide (1)..(175): Ceres Seq. ID no. 15221540
  misc_feature (13)..(175): NCBI GI NO: 33146785 NR Description: unknown protein
  misc_feature (13)..(134): NCBI GI NO: 34913126 NR Description: hypothetical protein~predicted by FGENESH etc.
  misc_feature (7)..(171): NCBI GI NO: 18424785 NR Description: protease inhibitor/seed storage/lipid transfer
  misc_feature (5)..(144): NCBI GI NO: 34394120 NR Description: hypothetical protein
  misc_feature (7)..(171): NCBI GI NO: 21618136 NR Description: nonspecific lipid-transfer protein-like protein
  misc_feature (7)..(144): NCBI GI NO: 10176956 NR Description: contains similarity to nonspecific lipid-transferprotein~gene_id:MHJ24
  misc_feature (20)..(170): NCBI GI NO: 7487610 NR Description: hypothetical protein T3F12
  misc_feature (1)..(174): NCBI GI NO: 25553595 NR Description: OJ1656_E11.26
  misc_feature (14)..(160): NCBI GI NO: 18407534 NR Description: protease inhibitor/seed storage/lipid transfer
  misc_feature (14)..(160): NCBI GI NO: 21592774 NR Description: unknown [Arabidopsis thaliana]
MALTGGATTAACILVLLALADAAGAATRAPAPAPAPDCMEALISLADCLDYVTPSTKSARPSKACCTEVKTAVGTPATVKCLCAAMDAKTTPIPINMTRVLALPTACGQSASVLNKCHAAHGPGGAPAEAPSPSASSGGATASPPKANVAARSPGGSATVLLATVVTSLLAFYYL

SEQ ID NO: 6987 - protein, 137 aa, Glycine max
  peptide (1)..(137): Ceres Seq. ID no. 15221541
  misc_feature (1)..(137): NCBI GI NO: 33146785 NR Description: unknown protein
  misc_feature (1)..(96): NCBI GI NO: 34913126 NR Description: hypothetical protein~predicted by FGENESH etc.
  misc_feature (1)..(133): NCBI GI NO: 18424785 NR Description: protease inhibitor/seed storage/lipid transfer
  misc_feature (1)..(106): NCBI GI NO: 34394120 NR Description: hypothetical protein
  misc_feature (1)..(133): NCBI GI NO: 21618136 NR Description: nonspecific lipid-transfer protein-like protein
  misc_feature (1)..(106): NCBI GI NO: 10176956 NR Description: contains similarity to nonspecific lipid-transferprotein~gene_id:MHJ24
  misc_feature (1)..(132): NCBI GI NO: 7487610 NR Description: hypothetical protein T3F12
  misc_feature (1)..(136): NCBI GI NO: 25553595 NR Description: OJ1656_E11.26
  misc_feature (1)..(122): NCBI GI NO: 18407534 NR Description: protease inhibitor/seed storage/lipid transfer
  misc_feature (1)..(122): NCBI GI NO: 21592774 NR Description: unknown [Arabidopsis thaliana]
MEALISLADCLDYVTPSTKSARPSKACCTEVKTAVGTPATVKCLCAAMDAKTTPIPINMTRVLALPTACGQSASVLNKCHAAHGPGGAPAEAPSPSASSGGATASPPKANVAARSPGGSATVLLATVVTSLLAFYYL

SEQ ID NO: 6988 - DNA, 831 bp, Glycine max
  misc_feature (1)..(831): Ceres Seq. ID no. 15172691
atctcaatttcgctgtacagaagagcttgattcccagagagacaaacccgacccgacaacccggaagaatcgaaaaaaatgggaaaggacggtctgagcgacgaccaggtctcatcgatgaaggaggcattcatgctcttcgacaccgacggtgacggcaaaatcgccccctccgagctcgggatcctgatgcgatccctcggcgggaacccgacccaagcccagctgaaatcgatcaccgcctccgagagcctaaccgccccgttcgatttcaaccgtttcctggatctcatggcgaagcacctgaagacggagcccttcgatcgccagctccgcgacgccttcaaggtgctcgacaaggaaggcactgggttcgttgccgttgcggatctgaggcatatcctcaccagcatcggcgagaagctggagcctaacgagttcgatgagtggatcaaggaggtggatgttggatccgatgggaagatccggtatgaggatttcattgcgaggatggtcgccaagtgagatctaatctgagtcctttgtttccaagtttgaattttgaaattcgaatttttattttgaagtatgttttaatttttttacataaagtttcagtctttatgctcttgtggtttggtttggtttggatcagtgaatctaattgattccagtctgtttactgttcgttgttttattttgttttaactaactctattgttgtgtgcttgtgattcctacttttattccaaggatgttaagtttcgctcttatgcccttataaatttgtaattcgttggtttggatcatgatcatggagtctgattgagt

SEQ ID NO: 6989 - protein, 148 aa, Glycine max
  peptide (1)..(148): Ceres Seq. ID no. 15172692
  misc_feature (120)..(148): Pfam Name: Pfam Description:  EF hand
  misc_feature (1)..(148): NCBI GI NO: 15221284 NR Description: calmodulin, putative [Arabidopsis thaliana]
  misc_feature (1)..(147): NCBI GI NO: 25402719 NR Description: protein F5O11.4 [imported] - Arabidopsis thaliana
  misc_feature (1)..(148): NCBI GI NO: 15221593 NR Description: calmodulin, putative [Arabidopsis thaliana]
  misc_feature (1)..(147): NCBI GI NO: 6630454 NR Description: F23N19.18 [Arabidopsis thaliana]
  misc_feature (1)..(148): NCBI GI NO: 28629126 NR Description: putative serine/threonine kinase [Vitis vinifera]
  misc_feature (1)..(148): NCBI GI NO: 29367559 NR Description: putative serine/threonine kinase
  misc_feature (4)..(148): NCBI GI NO: 4959168 NR Description: calmodulin mutant SYNCAM62 [synthetic construct]
  misc_feature (4)..(148): NCBI GI NO: 4959636 NR Description: calmodulin mutant SYNCAM36 [synthetic construct]
  misc_feature (4)..(148): NCBI GI NO: 4959645 NR Description: calmodulin mutant SYNCAM31 [synthetic construct]
  misc_feature (4)..(148): NCBI GI NO: 4959618 NR Description: calmodulin mutant SYNCAM45 [synthetic construct]
MGKDGLSDDQVSSMKEAFMLFDTDGDGKIAPSELGILMRSLGGNPTQAQLKSITASESLTAPFDFNRFLDLMAKHLKTEPFDRQLRDAFKVLDKEGTGFVAVADLRHILTSIGEKLEPNEFDEWIKEVDVGSDGKIRYEDFIARMVAK

SEQ ID NO: 6990 - protein, 135 aa, Glycine max
  peptide (1)..(135): Ceres Seq. ID no. 15172693
  misc_feature (107)..(135): Pfam Name: Pfam Description:  EF hand
  misc_feature (1)..(135): NCBI GI NO: 15221284 NR Description: calmodulin, putative [Arabidopsis thaliana]
  misc_feature (1)..(134): NCBI GI NO: 25402719 NR Description: protein F5O11.4 [imported] - Arabidopsis thaliana
  misc_feature (1)..(135): NCBI GI NO: 15221593 NR Description: calmodulin, putative [Arabidopsis thaliana]
  misc_feature (1)..(134): NCBI GI NO: 6630454 NR Description: F23N19.18 [Arabidopsis thaliana]
  misc_feature (1)..(135): NCBI GI NO: 28629126 NR Description: putative serine/threonine kinase [Vitis vinifera]
  misc_feature (1)..(135): NCBI GI NO: 29367559 NR Description: putative serine/threonine kinase
  misc_feature (1)..(135): NCBI GI NO: 4959168 NR Description: calmodulin mutant SYNCAM62 [synthetic construct]
  misc_feature (1)..(135): NCBI GI NO: 4959636 NR Description: calmodulin mutant SYNCAM36 [synthetic construct]
  misc_feature (1)..(135): NCBI GI NO: 4959645 NR Description: calmodulin mutant SYNCAM31 [synthetic construct]
  misc_feature (1)..(135): NCBI GI NO: 4959618 NR Description: calmodulin mutant SYNCAM45 [synthetic construct]
MKEAFMLFDTDGDGKIAPSELGILMRSLGGNPTQAQLKSITASESLTAPFDFNRFLDLMAKHLKTEPFDRQLRDAFKVLDKEGTGFVAVADLRHILTSIGEKLEPNEFDEWIKEVDVGSDGKIRYEDFIARMVAK

SEQ ID NO: 6991 - protein, 130 aa, Glycine max
  peptide (1)..(130): Ceres Seq. ID no. 15172694
  misc_feature (102)..(130): Pfam Name: Pfam Description:  EF hand
  misc_feature (1)..(130): NCBI GI NO: 15221284 NR Description: calmodulin, putative [Arabidopsis thaliana]
  misc_feature (1)..(129): NCBI GI NO: 25402719 NR Description: protein F5O11.4 [imported] - Arabidopsis thaliana
  misc_feature (1)..(130): NCBI GI NO: 15221593 NR Description: calmodulin, putative [Arabidopsis thaliana]
  misc_feature (1)..(129): NCBI GI NO: 6630454 NR Description: F23N19.18 [Arabidopsis thaliana]
  misc_feature (1)..(130): NCBI GI NO: 28629126 NR Description: putative serine/threonine kinase [Vitis vinifera]
  misc_feature (1)..(130): NCBI GI NO: 29367559 NR Description: putative serine/threonine kinase
  misc_feature (1)..(130): NCBI GI NO: 4959168 NR Description: calmodulin mutant SYNCAM62 [synthetic construct]
  misc_feature (1)..(130): NCBI GI NO: 4959645 NR Description: calmodulin mutant SYNCAM31 [synthetic construct]
  misc_feature (1)..(130): NCBI GI NO: 4959636 NR Description: calmodulin mutant SYNCAM36 [synthetic construct]
  misc_feature (1)..(130): NCBI GI NO: 4959618 NR Description: calmodulin mutant SYNCAM45 [synthetic construct]
MLFDTDGDGKIAPSELGILMRSLGGNPTQAQLKSITASESLTAPFDFNRFLDLMAKHLKTEPFDRQLRDAFKVLDKEGTGFVAVADLRHILTSIGEKLEPNEFDEWIKEVDVGSDGKIRYEDFIARMVAK

SEQ ID NO: 6992 - DNA, 1022 bp, Glycine max
  misc_feature (1)..(1022): Ceres Seq. ID no. 13594966
aaaaccaacagctgctactccagcatccacccatccatctctcatcttcttcttcttgcgaccaaacgagcgtctagctagctaaagattcgaacgatggccgttcttgtggcgaggcaggggcgcgagctgcagcggtacagcacgagcaccggcgggcgcatcgtggtggggtgcatcccgtaccggatgcgcgacggcggcgacagcgacggcgagggcgagctggaggtgctggtcatcagctcgcagaaggggcacggcatgatgtttcccaagggcgggtgggagctggacgagtccatggacgacgcggcacggcgcgaggccctcgaggaggccggcgtccgcggggagatgggcaaggtgctcggctgctggcactaccagagccgccgctaccagaccacctacgagggcatcatgtacccgctccgcgtcaccgacgagctccagcagtggcccgagatggcgtcccgcaagcgcacctgggcaactgtgcagcaggtcatggagggatgccagcactgctggatgcgggaggcgctcgaggagctcgtcgcccggcacgccaagccgcagtccgccctgtgagcagccaagcgggctggcggggtgactggagctcgagcgcgcgcgactctcgcgagaagaggccgggagcgagcaccaacgtccgtccgtcgtcctcgtcgtctctctctcttctttcctcggtgcagcggcaggcctgccggcgtgtccggtgtcgtacgacgaccggaccggagcatatatttggccgcccttgccggagagacggactgggatccacgatggcacgcgcgcgtcgacgctttcctgaggcgcagagtcgtcgtcgccgtcgtcgcggcaaataatggggacgaacttagaaatgtgtgaggtagagatcgaaagcgaacggggcaggaaaacttgtcaaaacactgccgaacgaacatgctcacgattctttccttaggctctgggagtaaaagatcaaattgtaaattaattct

SEQ ID NO: 6993 - protein, 165 aa, Glycine max
  peptide (1)..(165): Ceres Seq. ID no. 13594967
  misc_feature (22)..(157): Pfam Name: Pfam Description:  NUDIX domain
  misc_feature (1)..(163): NCBI GI NO: 18379275 NR Description: MutT/nudix family protein [Arabidopsis thaliana]
  misc_feature (1)..(163): NCBI GI NO: 21595695 NR Description: unknown [Arabidopsis thaliana]
  misc_feature (1)..(157): NCBI GI NO: 15223919 NR Description: MutT/nudix family protein [Arabidopsis thaliana]
  misc_feature (4)..(162): NCBI GI NO: 22330598 NR Description: MutT/nudix family protein [Arabidopsis thaliana]
  misc_feature (4)..(162): NCBI GI NO: 25367539 NR Description: unknown protein [imported] - Arabidopsis thaliana
  misc_feature (1)..(155): NCBI GI NO: 15221055 NR Description: MutT/nudix family protein [Arabidopsis thaliana]
  misc_feature (1)..(151): NCBI GI NO: 38175436 NR Description: MutT-like protein
  misc_feature (1)..(151): NCBI GI NO: 34900054 NR Description: MutT-like protein~contains ESTsAU085960
  misc_feature (1)..(153): NCBI GI NO: 18399682 NR Description: MutT/nudix family protein [Arabidopsis thaliana]
  misc_feature (1)..(155): NCBI GI NO: 18391450 NR Description: MutT/nudix family protein [Arabidopsis thaliana]
MAVLVARQGRELQRYSTSTGGRIVVGCIPYRMRDGGDSDGEGELEVLVISSQKGHGMMFPKGGWELDESMDDAARREALEEAGVRGEMGKVLGCWHYQSRRYQTTYEGIMYPLRVTDELQQWPEMASRKRTWATVQQVMEGCQHCWMREALEELVARHAKPQSAL

SEQ ID NO: 6994 - protein, 134 aa, Glycine max
  peptide (1)..(134): Ceres Seq. ID no. 13594968
  misc_feature (1)..(126): Pfam Name: Pfam Description:  NUDIX domain
  misc_feature (1)..(132): NCBI GI NO: 18379275 NR Description: MutT/nudix family protein [Arabidopsis thaliana]
  misc_feature (1)..(132): NCBI GI NO: 21595695 NR Description: unknown [Arabidopsis thaliana]
  misc_feature (1)..(126): NCBI GI NO: 15223919 NR Description: MutT/nudix family protein [Arabidopsis thaliana]
  misc_feature (1)..(131): NCBI GI NO: 22330598 NR Description: MutT/nudix family protein [Arabidopsis thaliana]
  misc_feature (1)..(131): NCBI GI NO: 25367539 NR Description: unknown protein [imported] - Arabidopsis thaliana
  misc_feature (1)..(124): NCBI GI NO: 15221055 NR Description: MutT/nudix family protein [Arabidopsis thaliana]
  misc_feature (1)..(120): NCBI GI NO: 38175436 NR Description: MutT-like protein
  misc_feature (1)..(120): NCBI GI NO: 34900054 NR Description: MutT-like protein~contains ESTsAU085960
  misc_feature (1)..(122): NCBI GI NO: 18399682 NR Description: MutT/nudix family protein [Arabidopsis thaliana]
  misc_feature (1)..(124): NCBI GI NO: 18391450 NR Description: MutT/nudix family protein [Arabidopsis thaliana]
MRDGGDSDGEGELEVLVISSQKGHGMMFPKGGWELDESMDDAARREALEEAGVRGEMGKVLGCWHYQSRRYQTTYEGIMYPLRVTDELQQWPEMASRKRTWATVQQVMEGCQHCWMREALEELVARHAKPQSAL

SEQ ID NO: 6995 - protein, 120 aa, Glycine max
  peptide (1)..(120): Ceres Seq. ID no. 13594969
MPALLDAGGARGARRPARQAAVRPVSSQAGWRGDWSSSARDSREKRPGASTNVRPSSSSSLSLLSSVQRQACRRVRCRTTTGPEHIFGRPCRRDGLGSTMARARRRFPEAQSRRRRRRGK

SEQ ID NO: 6996 - DNA, 1265 bp, Glycine max
  misc_feature (1)..(1265): Ceres Seq. ID no. 13581959
ctctcagatgctccggttgtcacgttttctctgctgaaatatttacttttaggatgctaagatgataaagatccacccttgctgtcatttacctgttaacatcttattctctccgttctttgcttgcttattagctgagacggctagtacatgttaacagtatcacccttagggatcagtttcttccagtagtgcccctctgtttttccttttaccttctaagttcatgaagtatacattggagtccaggaaggttcgtcacaagaatgttgtgcaatttattggtgcatgcactaaacccccaaggctatgcatagtcacagaatttatgtccggtgggagtgtgtatgattatcttcataagcataaaggtatcttcaagctccctgccttagttggagttgcaatggatgtgtcaaaaggcatgagctacttacaccaaaataatattattcatcgggatctgaaaaccgccaatcttcttatggatgagaacgggatggttaaagttgctgattttggtgttgcacgtgttaaagttcagtctggagtaatgactgcagaaaccgggacataccgttggatggccccggaggttatagaacacaagccctacgaccacaaggctgatgtttttagttttggaattttgttgtgggaactgctcactgggaagattccttacgagtacctgacaccattacaagcagctgtaggtgtggttcagaagggattgcggcccacaataccaaaaaatgctcatgcaaagcttgcggagctccttcagaagtgctggcagcaggaccctgctgaaaggccagatttctccgagatattagaagctctcaagaaaatagcagaggaggtcggagatgagcacgacggaaagcacaaggacaaaagcctggggggattcttttcgtctctgagggggcgaggacactaaggtggcgctggtgtacatggcttgcaatccgttcggacgggcctgagcgaagatcagcgcctgtttatcagcatacccagtgccagtacattgagatggacagtgaactgggccggatggcaacttttcagctgtagctccactcatcggccacagccaatagtttttttttttgtctggttatttacttccgggttctgttacatgtaacataggaagagaatgcttgtggactgtacattgtttaatctgattttaacaggctgtaacttgcacatgaaataataagcctagcttagggcatgctgtgattctttct

SEQ ID NO: 6997 - protein, 239 aa, Glycine max
  peptide (1)..(239): Ceres Seq. ID no. 13581960
  misc_feature (8)..(207): Pfam Name: Pfam Description:  Protein kinase domain
  misc_feature (1)..(235): NCBI GI NO: 18420244 NR Description: protein kinase family [Arabidopsis thaliana]
  misc_feature (8)..(239): NCBI GI NO: 22329194 NR Description: protein kinase family [Arabidopsis thaliana]
  misc_feature (8)..(239): NCBI GI NO: 7486654 NR Description: hypothetical protein F8D20
  misc_feature (1)..(214): NCBI GI NO: 15227883 NR Description: protein kinase family [Arabidopsis thaliana]
  misc_feature (8)..(226): NCBI GI NO: 34393850 NR Description: putative serine/threonine protein kinase
  misc_feature (8)..(212): NCBI GI NO: 34901608 NR Description: P0571D04.18
  misc_feature (1)..(235): NCBI GI NO: 7485889 NR Description: hypothetical protein F20M13
  misc_feature (1)..(214): NCBI GI NO: 27085278 NR Description: serine/threonine protein kinase
  misc_feature (95)..(239): NCBI GI NO: 33772207 NR Description: protein kinase [Malus x domestica]
  misc_feature (10)..(214): NCBI GI NO: 15235845 NR Description: protein kinase family [Arabidopsis thaliana]
MKYTLESRKVRHKNVVQFIGACTKPPRLCIVTEFMSGGSVYDYLHKHKGIFKLPALVGVAMDVSKGMSYLHQNNIIHRDLKTANLLMDENGMVKVADFGVARVKVQSGVMTAETGTYRWMAPEVIEHKPYDHKADVFSFGILLWELLTGKIPYEYLTPLQAAVGVVQKGLRPTIPKNAHAKLAELLQKCWQQDPAERPDFSEILEALKKIAEEVGDEHDGKHKDKSLGGFFSSLRGRGH

SEQ ID NO: 6998 - protein, 205 aa, Glycine max
  peptide (1)..(205): Ceres Seq. ID no. 13581961
  misc_feature (1)..(173): Pfam Name: Pfam Description:  Protein kinase domain
  misc_feature (1)..(201): NCBI GI NO: 18420244 NR Description: protein kinase family [Arabidopsis thaliana]
  misc_feature (1)..(205): NCBI GI NO: 22329194 NR Description: protein kinase family [Arabidopsis thaliana]
  misc_feature (1)..(205): NCBI GI NO: 7486654 NR Description: hypothetical protein F8D20
  misc_feature (1)..(180): NCBI GI NO: 15227883 NR Description: protein kinase family [Arabidopsis thaliana]
  misc_feature (1)..(192): NCBI GI NO: 34393850 NR Description: putative serine/threonine protein kinase
  misc_feature (1)..(178): NCBI GI NO: 34901608 NR Description: P0571D04.18
  misc_feature (1)..(201): NCBI GI NO: 7485889 NR Description: hypothetical protein F20M13
  misc_feature (1)..(180): NCBI GI NO: 27085278 NR Description: serine/threonine protein kinase
  misc_feature (61)..(205): NCBI GI NO: 33772207 NR Description: protein kinase [Malus x domestica]
  misc_feature (1)..(180): NCBI GI NO: 15235845 NR Description: protein kinase family [Arabidopsis thaliana]
MSGGSVYDYLHKHKGIFKLPALVGVAMDVSKGMSYLHQNNIIHRDLKTANLLMDENGMVKVADFGVARVKVQSGVMTAETGTYRWMAPEVIEHKPYDHKADVFSFGILLWELLTGKIPYEYLTPLQAAVGVVQKGLRPTIPKNAHAKLAELLQKCWQQDPAERPDFSEILEALKKIAEEVGDEHDGKHKDKSLGGFFSSLRGRGH

SEQ ID NO: 6999 - protein, 179 aa, Glycine max
  peptide (1)..(179): Ceres Seq. ID no. 13581962
  misc_feature (1)..(147): Pfam Name: Pfam Description:  Protein kinase domain
  misc_feature (1)..(175): NCBI GI NO: 18420244 NR Description: protein kinase family [Arabidopsis thaliana]
  misc_feature (1)..(179): NCBI GI NO: 22329194 NR Description: protein kinase family [Arabidopsis thaliana]
  misc_feature (1)..(179): NCBI GI NO: 7486654 NR Description: hypothetical protein F8D20
  misc_feature (1)..(154): NCBI GI NO: 15227883 NR Description: protein kinase family [Arabidopsis thaliana]
  misc_feature (1)..(166): NCBI GI NO: 34393850 NR Description: putative serine/threonine protein kinase
  misc_feature (1)..(152): NCBI GI NO: 34901608 NR Description: P0571D04.18
  misc_feature (1)..(175): NCBI GI NO: 7485889 NR Description: hypothetical protein F20M13
  misc_feature (1)..(154): NCBI GI NO: 27085278 NR Description: serine/threonine protein kinase
  misc_feature (35)..(179): NCBI GI NO: 33772207 NR Description: protein kinase [Malus x domestica]
  misc_feature (1)..(154): NCBI GI NO: 15235845 NR Description: protein kinase family [Arabidopsis thaliana]
MDVSKGMSYLHQNNIIHRDLKTANLLMDENGMVKVADFGVARVKVQSGVMTAETGTYRWMAPEVIEHKPYDHKADVFSFGILLWELLTGKIPYEYLTPLQAAVGVVQKGLRPTIPKNAHAKLAELLQKCWQQDPAERPDFSEILEALKKIAEEVGDEHDGKHKDKSLGGFFSSLRGRGH

SEQ ID NO: 7000 - DNA, 1424 bp, Glycine max
  misc_feature (1)..(1424): Ceres Seq. ID no. 13595337
ctaaaccacccctgaaaaccctcagacgaacgaaagacctagcgctcctctcccttcgtctctcgcgactggcggcggcggtcgaacgaggccacccgacggcggcagagcgagtaggtgctttccaagcttcgccagaggtgtaaacccttcgctagaggcctcagtccctttcccgcgcggcttgagcaagatgagcaagatggcgatcagggttcccaagtccatgcgcgccaagcgtgagctcctcaagcacgcgcccaagctcgttgagaatggcaagaagatgcttattcttcatggtacaaagaccagcgcagttttgaactctgtgctggcagatcttttccacctgaagcgtgatcatgctgtcaagtacaccaagaagaacgacagcatcaggccatttgagagcgggggtgaaacttccctggagttcttctcccttaaatctgactgcagcctcttagtgtatggttctcactcaaagaagaggcccaacaatcttgttctgggaaggacttacgatcaccacatatatgacctcgttgaagtgggagttgagaactacaaatccatagaatcctatgcatatgataaaaagttggcacctaaacttgggacaaagcctttctttgctttcattggggagcactttgagagtgttgaaggactgaagcatttgaaggaaatgctgcttgatcatttcaaaggagaggtggtagagaatctgaaccttgctggtgtagatcggatattcgtgtgcacagcaatttctcctactaccgtctacatgatgcactgcgctctccgtctaaaaaggtcaggcacatctattcctagaatggagctggttgaagttgggccttcagtggacctggtacttaggcggcaccgacaagcagctgaaagtttacagaaagaagctatgaaggctcctggtcatgctaagaaggtgaaaaatgtcaccaataatccagttgaaggcaagcagggcaggatctacattccagaccaggaggtctcaaaattgaccgtaacaagcaacataaagggtctgaagcgggagcgccgtgacgccaagaaaaacaaggagcactcgaagaagcaaaaggtggccgaaaaccctgagtgaccactggagaaggctagtatctgtaaccggtcagtttaaggactttcggtcgataggttcagtggtaaatagtccagtaccatcttttaaggctatcaaacctgtgtacggacttaggcatcagtatcgaggcagcctctctatcagacataagcatgaaattttggagcaacatatgctacaagtattttttttactgttgttattcgcccctgatattagccaatcagagacgactgttgtgatgacatggttaagtttggttatcatggacattatgccttttctg

SEQ ID NO: 7001 - protein, 313 aa, Glycine max
  peptide (1)..(313): Ceres Seq. ID no. 13595338
  misc_feature (5)..(313): NCBI GI NO: 34914658 NR Description: P0504D03.20
  misc_feature (4)..(309): NCBI GI NO: 18403828 NR Description: expressed protein [Arabidopsis thaliana]
  misc_feature (4)..(309): NCBI GI NO: 21554561 NR Description: unknown [Arabidopsis thaliana]
  misc_feature (9)..(307): NCBI GI NO: 39930469 NR Description: brix domain containing 1 [Homo sapiens]
  misc_feature (6)..(311): NCBI GI NO: 7670547 NR Description: unnamed protein product [Mus musculus]
  misc_feature (9)..(307): NCBI GI NO: 27705690 NR Description: similar to RIKEN cDNA 2810470K21 gene
  misc_feature (9)..(311): NCBI GI NO: 12850727 NR Description: unnamed protein product [Mus musculus]
  misc_feature (9)..(307): NCBI GI NO: 28461332 NR Description: Similar to RIKEN cDNA 2810470K21 gene
  misc_feature (9)..(256): NCBI GI NO: 10437105 NR Description: unnamed protein product [Homo sapiens]
  misc_feature (9)..(307): NCBI GI NO: 34935586 NR Description: similar to RIKEN cDNA 2810470K21 gene
MSKMAIRVPKSMRAKRELLKHAPKLVENGKKMLILHGTKTSAVLNSVLADLFHLKRDHAVKYTKKNDSIRPFESGGETSLEFFSLKSDCSLLVYGSHSKKRPNNLVLGRTYDHHIYDLVEVGVENYKSIESYAYDKKLAPKLGTKPFFAFIGEHFESVEGLKHLKEMLLDHFKGEVVENLNLAGVDRIFVCTAISPTTVYMMHCALRLKRSGTSIPRMELVEVGPSVDLVLRRHRQAAESLQKEAMKAPGHAKKVKNVTNNPVEGKQGRIYIPDQEVSKLTVTSNIKGLKRERRDAKKNKEHSKKQKVAENPE

SEQ ID NO: 7002 - protein, 310 aa, Glycine max
  peptide (1)..(310): Ceres Seq. ID no. 13595339
  misc_feature (2)..(310): NCBI GI NO: 34914658 NR Description: P0504D03.20
  misc_feature (1)..(306): NCBI GI NO: 18403828 NR Description: expressed protein [Arabidopsis thaliana]
  misc_feature (1)..(306): NCBI GI NO: 21554561 NR Description: unknown [Arabidopsis thaliana]
  misc_feature (6)..(304): NCBI GI NO: 39930469 NR Description: brix domain containing 1 [Homo sapiens]
  misc_feature (3)..(308): NCBI GI NO: 7670547 NR Description: unnamed protein product [Mus musculus]
  misc_feature (6)..(304): NCBI GI NO: 27705690 NR Description: similar to RIKEN cDNA 2810470K21 gene
  misc_feature (6)..(308): NCBI GI NO: 12850727 NR Description: unnamed protein product [Mus musculus]
  misc_feature (6)..(304): NCBI GI NO: 28461332 NR Description: Similar to RIKEN cDNA 2810470K21 gene
  misc_feature (6)..(253): NCBI GI NO: 10437105 NR Description: unnamed protein product [Homo sapiens]
  misc_feature (6)..(304): NCBI GI NO: 34935586 NR Description: similar to RIKEN cDNA 2810470K21 gene
MAIRVPKSMRAKRELLKHAPKLVENGKKMLILHGTKTSAVLNSVLADLFHLKRDHAVKYTKKNDSIRPFESGGETSLEFFSLKSDCSLLVYGSHSKKRPNNLVLGRTYDHHIYDLVEVGVENYKSIESYAYDKKLAPKLGTKPFFAFIGEHFESVEGLKHLKEMLLDHFKGEVVENLNLAGVDRIFVCTAISPTTVYMMHCALRLKRSGTSIPRMELVEVGPSVDLVLRRHRQAAESLQKEAMKAPGHAKKVKNVTNNPVEGKQGRIYIPDQEVSKLTVTSNIKGLKRERRDAKKNKEHSKKQKVAENPE

SEQ ID NO: 7003 - protein, 302 aa, Glycine max
  peptide (1)..(302): Ceres Seq. ID no. 13595340
  misc_feature (1)..(302): NCBI GI NO: 34914658 NR Description: P0504D03.20
  misc_feature (1)..(298): NCBI GI NO: 18403828 NR Description: expressed protein [Arabidopsis thaliana]
  misc_feature (1)..(298): NCBI GI NO: 21554561 NR Description: unknown [Arabidopsis thaliana]
  misc_feature (1)..(296): NCBI GI NO: 39930469 NR Description: brix domain containing 1 [Homo sapiens]
  misc_feature (1)..(300): NCBI GI NO: 7670547 NR Description: unnamed protein product [Mus musculus]
  misc_feature (1)..(296): NCBI GI NO: 27705690 NR Description: similar to RIKEN cDNA 2810470K21 gene
  misc_feature (1)..(300): NCBI GI NO: 12850727 NR Description: unnamed protein product [Mus musculus]
  misc_feature (1)..(296): NCBI GI NO: 28461332 NR Description: Similar to RIKEN cDNA 2810470K21 gene
  misc_feature (1)..(245): NCBI GI NO: 10437105 NR Description: unnamed protein product [Homo sapiens]
  misc_feature (1)..(296): NCBI GI NO: 34935586 NR Description: similar to RIKEN cDNA 2810470K21 gene
MRAKRELLKHAPKLVENGKKMLILHGTKTSAVLNSVLADLFHLKRDHAVKYTKKNDSIRPFESGGETSLEFFSLKSDCSLLVYGSHSKKRPNNLVLGRTYDHHIYDLVEVGVENYKSIESYAYDKKLAPKLGTKPFFAFIGEHFESVEGLKHLKEMLLDHFKGEVVENLNLAGVDRIFVCTAISPTTVYMMHCALRLKRSGTSIPRMELVEVGPSVDLVLRRHRQAAESLQKEAMKAPGHAKKVKNVTNNPVEGKQGRIYIPDQEVSKLTVTSNIKGLKRERRDAKKNKEHSKKQKVAENPE

SEQ ID NO: 7004 - DNA, 1283 bp, Glycine max
  misc_feature (1)..(1283): Ceres Seq. ID no. 13595392
cttgccttagttttagacgccggcgccgtagagcccgttccccctcacgcggccagcgaccatgtcgagtggcctgaacatgtccctagatgacctcatcaagcaatccaagtccaggcccaaagccaaccccgccttctcttccgggcccacccgccgggcggcgccgtccgcccggaccatgccctacccgccgtctgctcccaaggccgccaccgccgactctctgtacggtgtctactccgagcacgttgccgccatggcaacctccccgccaccgccggcggtggccgggccacaggcactcgagacgggcacgaagctgcacatctccaacctcgactccagcgtcaccgtcgaggacgtccaggaactcttttcagagattggtgagctcaaacgttattctgttaactacgataaggatgggaagtctcagggaagtgcggaagttgtctttgcaagaaaagtagatgctttggatgctattgagagatataatggtgttctgcttgatgggaagccaatgaagatagagctcattggaaataagaccgagccacacccaacagaacctttgatgtacaacggcacttcttctaactacaatgcaatgccaaacagtctgcttcagagaggtggcccgagagggccatttcatggtaatggtcgttctggaggcagtggtcagggcggtgctggcaaaagaggaatgtttcaaggcaacgttcgtcctggaaacactgtccaggacggtggtgggcggggacagggtagagccagggggcatgatcgcagccgagttccgacctctgctgcggatcttgatgctgaactggagcagtatcatgcagcagcagtgaagcaaaaatgaggctctgatgtatattttatactccctccttccatatataagtgacgtagttttagtccaaatttaaactaaaaccacgtcacttatttatgaactgagggagtatatacatagactgttgcattattagttttctgcttttagtcgtcaggtaccatgttgagaaaagttggaaggcattaattcgacatttacatctgctgcgctttttatatccctactccgagtgctggatatattgtattacctaattttgaaacatgggtgttctcttggggtttatttggatagtaagattacaaagaactagttcttgttaaattcaatttctaactgaatcttggatatgtcatatcatcttgtttggattgtctaactgaatctttagatataaaatcctgagttttgc

SEQ ID NO: 7005 - protein, 270 aa, Glycine max
  peptide (1)..(270): Ceres Seq. ID no. 13595393
  misc_feature (1)..(270): NCBI GI NO: 33146678 NR Description: putative RNA and export factor binding protein
  misc_feature (1)..(190): NCBI GI NO: 34900544 NR Description: P0565A07.3
  misc_feature (167)..(270): NCBI GI NO: 34900544 NR Description: P0565A07.3
  misc_feature (27)..(268): NCBI GI NO: 30679669 NR Description: RNA and export factor binding protein, putative
  misc_feature (27)..(268): NCBI GI NO: 11358209 NR Description: hypothetical protein T22P11
  misc_feature (1)..(267): NCBI GI NO: 30693141 NR Description: RNA and export factor binding protein, putative
  misc_feature (1)..(267): NCBI GI NO: 25404603 NR Description: hypothetical protein T6J19.1
  misc_feature (1)..(221): NCBI GI NO: 30697313 NR Description: RNA and export factor binding protein, putative
  misc_feature (1)..(221): NCBI GI NO: 30697310 NR Description: RNA and export factor binding protein, putative
  misc_feature (1)..(216): NCBI GI NO: 21555029 NR Description: transcriptional coactivator-like protein
MSSGLNMSLDDLIKQSKSRPKANPAFSSGPTRRAAPSARTMPYPPSAPKAATADSLYGVYSEHVAAMATSPPPPAVAGPQALETGTKLHISNLDSSVTVEDVQELFSEIGELKRYSVNYDKDGKSQGSAEVVFARKVDALDAIERYNGVLLDGKPMKIELIGNKTEPHPTEPLMYNGTSSNYNAMPNSLLQRGGPRGPFHGNGRSGGSGQGGAGKRGMFQGNVRPGNTVQDGGGRGQGRARGHDRSRVPTSAADLDAELEQYHAAAVKQK

SEQ ID NO: 7006 - protein, 264 aa, Glycine max
  peptide (1)..(264): Ceres Seq. ID no. 13595394
  misc_feature (1)..(264): NCBI GI NO: 33146678 NR Description: putative RNA and export factor binding protein
  misc_feature (1)..(184): NCBI GI NO: 34900544 NR Description: P0565A07.3
  misc_feature (161)..(264): NCBI GI NO: 34900544 NR Description: P0565A07.3
  misc_feature (21)..(262): NCBI GI NO: 30679669 NR Description: RNA and export factor binding protein, putative
  misc_feature (21)..(262): NCBI GI NO: 11358209 NR Description: hypothetical protein T22P11
  misc_feature (1)..(261): NCBI GI NO: 30693141 NR Description: RNA and export factor binding protein, putative
  misc_feature (1)..(261): NCBI GI NO: 25404603 NR Description: hypothetical protein T6J19.1
  misc_feature (1)..(215): NCBI GI NO: 30697313 NR Description: RNA and export factor binding protein, putative
  misc_feature (1)..(215): NCBI GI NO: 30697310 NR Description: RNA and export factor binding protein, putative
  misc_feature (1)..(210): NCBI GI NO: 21555029 NR Description: transcriptional coactivator-like protein
MSLDDLIKQSKSRPKANPAFSSGPTRRAAPSARTMPYPPSAPKAATADSLYGVYSEHVAAMATSPPPPAVAGPQALETGTKLHISNLDSSVTVEDVQELFSEIGELKRYSVNYDKDGKSQGSAEVVFARKVDALDAIERYNGVLLDGKPMKIELIGNKTEPHPTEPLMYNGTSSNYNAMPNSLLQRGGPRGPFHGNGRSGGSGQGGAGKRGMFQGNVRPGNTVQDGGGRGQGRARGHDRSRVPTSAADLDAELEQYHAAAVKQK

SEQ ID NO: 7007 - protein, 230 aa, Glycine max
  peptide (1)..(230): Ceres Seq. ID no. 13595395
  misc_feature (1)..(230): NCBI GI NO: 33146678 NR Description: putative RNA and export factor binding protein
  misc_feature (1)..(150): NCBI GI NO: 34900544 NR Description: P0565A07.3
  misc_feature (127)..(230): NCBI GI NO: 34900544 NR Description: P0565A07.3
  misc_feature (1)..(228): NCBI GI NO: 30679669 NR Description: RNA and export factor binding protein, putative
  misc_feature (1)..(228): NCBI GI NO: 11358209 NR Description: hypothetical protein T22P11
  misc_feature (1)..(227): NCBI GI NO: 30693141 NR Description: RNA and export factor binding protein, putative
  misc_feature (1)..(227): NCBI GI NO: 25404603 NR Description: hypothetical protein T6J19.1
  misc_feature (1)..(181): NCBI GI NO: 30697313 NR Description: RNA and export factor binding protein, putative
  misc_feature (1)..(181): NCBI GI NO: 30697310 NR Description: RNA and export factor binding protein, putative
  misc_feature (1)..(176): NCBI GI NO: 21555029 NR Description: transcriptional coactivator-like protein
MPYPPSAPKAATADSLYGVYSEHVAAMATSPPPPAVAGPQALETGTKLHISNLDSSVTVEDVQELFSEIGELKRYSVNYDKDGKSQGSAEVVFARKVDALDAIERYNGVLLDGKPMKIELIGNKTEPHPTEPLMYNGTSSNYNAMPNSLLQRGGPRGPFHGNGRSGGSGQGGAGKRGMFQGNVRPGNTVQDGGGRGQGRARGHDRSRVPTSAADLDAELEQYHAAAVKQK

SEQ ID NO: 7008 - DNA, 661 bp, Glycine max
  misc_feature (1)..(661): Ceres Seq. ID no. 12610112
attaacccgctccaaaaccctgagctgcgcacccaccggcgatgtcggcgacggccatccgctccggcgagctcctcgcttttcccgccgcgctgaggcgtggcctgcccgtggcttctgcctcggtggtcgcgttccggttgagggcgccagtggccgggcgcgtggcggtcagggttgtcgcggcggcggcggagggggcaggggcggaggcggaggcggaagggaagccgaagccgaagaagaagagggcagcgagcgggatcatgaagcctaagccgatttctccggagctaagggagtttgtcggaggcgcggcggagctgccccggacagaggcgctcaagatcatctgggcgcacatcaagggaaacaacctccaggatcccgagaacaagaagataatagtctgcgatgagaaactgaagaagatatttggagggcgtgaccgtgttgggtttcttgagatctctgggctcctcaatccccatttccagaaatgatagggtttatgtagatgttgcactttttctgtattagctaagacagttgtatcagcatatttagctgaacctggtatggagggtccgtaattctggtttgagaatggtacgtctagtatttgcagtaaatggctttgctggtttttggctcgtgattt

SEQ ID NO: 7009 - protein, 153 aa, Glycine max
  peptide (1)..(153): Ceres Seq. ID no. 12610113
  misc_feature (2)..(153): NCBI GI NO: 14488372 NR Description: hypothetical protein
  misc_feature (5)..(151): NCBI GI NO: 18397658 NR Description: expressed protein; protein id: At2g14880
  misc_feature (37)..(151): NCBI GI NO: 21593713 NR Description: unknown [Arabidopsis thaliana]
  misc_feature (5)..(151): NCBI GI NO: 19698859 NR Description: unknown protein [Arabidopsis thaliana]
  misc_feature (23)..(151): NCBI GI NO: 14423526 NR Description: putative protein [Arabidopsis thaliana]
  misc_feature (23)..(151): NCBI GI NO: 15235320 NR Description: putative protein; protein id: At4g34290
  misc_feature (44)..(151): NCBI GI NO: 21553903 NR Description: unknown [Arabidopsis thaliana]
  misc_feature (38)..(153): NCBI GI NO: 33667910 NR Description: SWIb domain-containing protein [Solanum chacoense]
  misc_feature (24)..(153): NCBI GI NO: 18396594 NR Description: expressed protein; protein id: At3g03590
  misc_feature (24)..(153): NCBI GI NO: 21593643 NR Description: unknown [Arabidopsis thaliana]
MSATAIRSGELLAFPAALRRGLPVASASVVAFRLRAPVAGRVAVRVVAAAAEGAGAEAEAEGKPKPKKKRAASGIMKPKPISPELREFVGGAAELPRTEALKIIWAHIKGNNLQDPENKKIIVCDEKLKKIFGGRDRVGFLEISGLLNPHFQK

SEQ ID NO: 7010 - protein, 91 aa, Glycine max
  peptide (1)..(91): Ceres Seq. ID no. 12610114
  misc_feature (31)..(91): Pfam Name: Pfam Description:  Protein of unknown function, DUF584
LTRSKTLSCAPTGDVGDGHPLRRAPRFSRRAEAWPARGFCLGGRVPVEGASGRARGGQGCRGGGGGGRGGGGGGREAEAEEEEGSERDHEA

SEQ ID NO: 7011 - protein, 78 aa, Glycine max
  peptide (1)..(78): Ceres Seq. ID no. 12610115
  misc_feature (1)..(78): NCBI GI NO: 14488372 NR Description: hypothetical protein
  misc_feature (1)..(76): NCBI GI NO: 18397658 NR Description: expressed protein; protein id: At2g14880
  misc_feature (1)..(76): NCBI GI NO: 21593713 NR Description: unknown [Arabidopsis thaliana]
  misc_feature (1)..(76): NCBI GI NO: 19698859 NR Description: unknown protein [Arabidopsis thaliana]
  misc_feature (1)..(76): NCBI GI NO: 14423526 NR Description: putative protein [Arabidopsis thaliana]
  misc_feature (1)..(76): NCBI GI NO: 15235320 NR Description: putative protein; protein id: At4g34290
  misc_feature (1)..(76): NCBI GI NO: 21553903 NR Description: unknown [Arabidopsis thaliana]
  misc_feature (1)..(78): NCBI GI NO: 33667910 NR Description: SWIb domain-containing protein [Solanum chacoense]
  misc_feature (1)..(78): NCBI GI NO: 18396594 NR Description: expressed protein; protein id: At3g03590
  misc_feature (1)..(78): NCBI GI NO: 21593643 NR Description: unknown [Arabidopsis thaliana]
MKPKPISPELREFVGGAAELPRTEALKIIWAHIKGNNLQDPENKKIIVCDEKLKKIFGGRDRVGFLEISGLLNPHFQK

SEQ ID NO: 7012 - DNA, 660 bp, Glycine max
  misc_feature (1)..(660): Ceres Seq. ID no. 13594979
accaagcaattcaaacaacacggtaacacgcaaactccgagaaaatccccaaatcacataaaattagggttacgaatcggggaaagttgtctctcctttcaccctaattcgatgcctataggtttcaggaaccaagtgatgcggtcgttctcgtggatcatcatccctttactcttattgctattctgcttgatcggctcctcacaagcagcggacgagaaatcaagcggcgacgtgtgcaatacggtttcggatccgggcgggtgcccaataaactgtttccgggcggatccggtttgcggagccgacggagtcacgtactggtgcggttgtcccgacgcggcgtgccacggagctcgcgtggtgaaaacgggagcctgcgacgcgggtaacgcgggaagcgcttctgtgccgggtcaagctttgttactgatccatatcgtttggctcttcttgctcggactctctcttctcgtcggtgctttctgaatggattagataataaggaaattgatcccaattcgtttctgtagcttcttcttttgtcgtgatttatagatcagcacttgtgtttgagatgattcatgcttctgtagatcacacgttatgtgtttgtatgtgtaacgttgagttggtttctcttaatggatttgcttcgtc

SEQ ID NO: 7013 - protein, 162 aa, Glycine max
  peptide (1)..(162): Ceres Seq. ID no. 13594980
  misc_feature (80)..(127): Pfam Name: Pfam Description:  Kazal-type serine protease inhibitor domain
  misc_feature (55)..(162): NCBI GI NO: 18412211 NR Description: expressed protein [Arabidopsis thaliana]
  misc_feature (55)..(162): NCBI GI NO: 21554106 NR Description: unknown [Arabidopsis thaliana]
  misc_feature (67)..(162): NCBI GI NO: 18411677 NR Description: expressed protein [Arabidopsis thaliana]
  misc_feature (67)..(162): NCBI GI NO: 21555759 NR Description: unknown [Arabidopsis thaliana]
  misc_feature (53)..(160): NCBI GI NO: 34909170 NR Description: P0468B07.28
TKQFKQHGNTQTPRKSPNHIKLGLRIGESCLSFHPNSMPIGFRNQVMRSFSWIIIPLLLLLFCLIGSSQAADEKSSGDVCNTVSDPGGCPINCFRADPVCGADGVTYWCGCPDAACHGARVVKTGACDAGNAGSASVPGQALLLIHIVWLFLLGLSLLVGAF

SEQ ID NO: 7014 - protein, 125 aa, Glycine max
  peptide (1)..(125): Ceres Seq. ID no. 13594981
  misc_feature (43)..(90): Pfam Name: Pfam Description:  Kazal-type serine protease inhibitor domain
  misc_feature (18)..(125): NCBI GI NO: 18412211 NR Description: expressed protein [Arabidopsis thaliana]
  misc_feature (18)..(125): NCBI GI NO: 21554106 NR Description: unknown [Arabidopsis thaliana]
  misc_feature (30)..(125): NCBI GI NO: 18411677 NR Description: expressed protein [Arabidopsis thaliana]
  misc_feature (30)..(125): NCBI GI NO: 21555759 NR Description: unknown [Arabidopsis thaliana]
  misc_feature (16)..(123): NCBI GI NO: 34909170 NR Description: P0468B07.28
MPIGFRNQVMRSFSWIIIPLLLLLFCLIGSSQAADEKSSGDVCNTVSDPGGCPINCFRADPVCGADGVTYWCGCPDAACHGARVVKTGACDAGNAGSASVPGQALLLIHIVWLFLLGLSLLVGAF

SEQ ID NO: 7015 - protein, 116 aa, Glycine max
  peptide (1)..(116): Ceres Seq. ID no. 13594982
  misc_feature (34)..(81): Pfam Name: Pfam Description:  Kazal-type serine protease inhibitor domain
  misc_feature (9)..(116): NCBI GI NO: 18412211 NR Description: expressed protein [Arabidopsis thaliana]
  misc_feature (9)..(116): NCBI GI NO: 21554106 NR Description: unknown [Arabidopsis thaliana]
  misc_feature (21)..(116): NCBI GI NO: 18411677 NR Description: expressed protein [Arabidopsis thaliana]
  misc_feature (21)..(116): NCBI GI NO: 21555759 NR Description: unknown [Arabidopsis thaliana]
  misc_feature (7)..(114): NCBI GI NO: 34909170 NR Description: P0468B07.28
MRSFSWIIIPLLLLLFCLIGSSQAADEKSSGDVCNTVSDPGGCPINCFRADPVCGADGVTYWCGCPDAACHGARVVKTGACDAGNAGSASVPGQALLLIHIVWLFLLGLSLLVGAF

SEQ ID NO: 7016 - DNA, 472 bp, Glycine max
  misc_feature (1)..(472): Ceres Seq. ID no. 13582224
cccaaaacccatggttggacccaaggatcaccagcgctttcaagcttcttatgcaactatattaaaggcccatatgactgctataaagaagagagaaaggaaagacaagaagaagcctgcaaaggcagataaaagagaaggaagttcaaagagactgaaaagattttggcttgttttgttttcattagtgttcctatcacaaatggactagatacctgtccttctaccaaagggtcttctgttcatagttccttgccaaagtctcgggtgtgtgagtattcggcagagcgaagggagatatctacaaaaggcacttcaatgctcaagtgaaggtgttacgactaacccttggatcatgaccagcgcacagactatgatttcgttagtctggctagcctaccctatattaaataacctgtaaaagaacacatgatatatctaggcaaatctatatatatatctcattccatcc

SEQ ID NO: 7017 - protein, 69 aa, Glycine max
  peptide (1)..(69): Ceres Seq. ID no. 13582225
  misc_feature (5)..(49): NCBI GI NO: 6175053 NR Description: Signal recognition particle 14 kDa protein (SRP14)
  misc_feature (5)..(49): NCBI GI NO: 15224325 NR Description: signal recognition particle protein 14kD
  misc_feature (8)..(54): NCBI GI NO: 6094345 NR Description: SIGNAL RECOGNITION PARTICLE 14 KD PROTEIN (SRP14)
PKPMVGPKDHQRFQASYATILKAHMTAIKKRERKDKKKPAKADKREGSSKRLKRFWLVLFSLVFLSQMD

SEQ ID NO: 7018 - protein, 66 aa, Glycine max
  peptide (1)..(66): Ceres Seq. ID no. 13582226
  misc_feature (2)..(46): NCBI GI NO: 6175053 NR Description: Signal recognition particle 14 kDa protein (SRP14)
  misc_feature (2)..(46): NCBI GI NO: 15224325 NR Description: signal recognition particle protein 14kD
  misc_feature (5)..(51): NCBI GI NO: 6094345 NR Description: SIGNAL RECOGNITION PARTICLE 14 KD PROTEIN (SRP14)
MVGPKDHQRFQASYATILKAHMTAIKKRERKDKKKPAKADKREGSSKRLKRFWLVLFSLVFLSQMD

SEQ ID NO: 7019 - protein, 45 aa, Glycine max
  peptide (1)..(45): Ceres Seq. ID no. 13582227
  misc_feature (1)..(25): NCBI GI NO: 6175053 NR Description: Signal recognition particle 14 kDa protein (SRP14)
  misc_feature (1)..(25): NCBI GI NO: 15224325 NR Description: signal recognition particle protein 14kD
  misc_feature (1)..(30): NCBI GI NO: 6094345 NR Description: SIGNAL RECOGNITION PARTICLE 14 KD PROTEIN (SRP14)
MTAIKKRERKDKKKPAKADKREGSSKRLKRFWLVLFSLVFLSQMD

SEQ ID NO: 7020 - DNA, 718 bp, Glycine max
  misc_feature (1)..(718): Ceres Seq. ID no. 12611008
gtgtgattcatatctgcttctcagacgaactctctctgcttaatccaaattttaacgcgttctttcgaatttgcccctccaattttaatttaattacgtaaatgtccggaactctaatctacttaggcgttaactcccttcgatcctcgccgggaaatagccttcgtcaaccgaagccaaccagactccacaacggaaacgcgcggctctccaccggagctacgtcgtttagagcttcggcagcgcagactctcaacgccgaaccagccgtaacggaatccgttcgccggcgagcgtcgaacctctacgaactgctgagagtggacgaaacggcgtcgttgacggagattaagacggcgtaccggagcttagctaaggttcaccatccggacgcgtcgtcggaatcggacggacgagatttcatggagattcacaaagcttacgcgacgctggcggatccgacgacgagagcgatctacgattcgacgctgggagcaagagggagacgagtgcacgctggagcgatggggaggacgagtcgggtttacccgacgacccggagatgggagacggatcagtgttggtagtttagtctttaggtttccgattacttttttttactcaatttccccttttcattattttttttactaaggggtaaataagttttttttaccacagatggtttaatgaatagagaggatgtacatttttgggg

SEQ ID NO: 7021 - protein, 161 aa, Glycine max
  peptide (1)..(161): Ceres Seq. ID no. 12611009
  misc_feature (67)..(130): Pfam Name: Pfam Description:  DnaJ domain
  misc_feature (1)..(161): NCBI GI NO: 15231204 NR Description: DnaJ protein, putative; protein id: At3g13310
  misc_feature (11)..(161): NCBI GI NO: 15227919 NR Description: putative DnaJ protein; protein id: At2g17880
  misc_feature (18)..(161): NCBI GI NO: 7488763 NR Description: DnaJ protein homolog - kidney bean (fragment)
  misc_feature (13)..(161): NCBI GI NO: 15233446 NR Description: DnaJ-like protein; protein id: At4g36040.1
  misc_feature (13)..(161): NCBI GI NO: 9843641 NR Description: J11 protein [Arabidopsis thaliana]
  misc_feature (66)..(146): NCBI GI NO: 31544486 NR Description: CbpA/DnaJ [Mycoplasma gallisepticum R]
  misc_feature (68)..(150): NCBI GI NO: 34894012 NR Description: P0672D08.16
  misc_feature (65)..(130): NCBI GI NO: 23136752 NR Description: hypothetical protein [Cytophaga hutchinsonii]
  misc_feature (68)..(130): NCBI GI NO: 13507741 NR Description: similar to j-domain of DnaJ
  misc_feature (63)..(154): NCBI GI NO: 23129135 NR Description: hypothetical protein [Nostoc punctiforme]
MSGTLIYLGVNSLRSSPGNSLRQPKPTRLHNGNARLSTGATSFRASAAQTLNAEPAVTESVRRRASNLYELLRVDETASLTEIKTAYRSLAKVHHPDASSESDGRDFMEIHKAYATLADPTTRAIYDSTLGARGRRVHAGAMGRTSRVYPTTRRWETDQCW

SEQ ID NO: 7022 - DNA, 991 bp, Glycine max
  misc_feature (1)..(991): Ceres Seq. ID no. 12611286
aagcagatcgcgcacccgacgcgatccagaccgcccagcacagacgccgacccacgccgctggcactcccgtctctcggcgatcctcccttctctggcgaccggctgtcaccccgtccgccctcgccgccagatccgcgcggccacgcccacccggcctcgctcctcctctcgggcctcggcagatctacgcgggcggcgaccctccctagccatgattaatttcgtgctcctaatcagccgccagggtaaggtgaggctcaccaagtggtactcgccttacacccagaaggagaggactaaggtcatccgtgagcttagtgggctcattcttactcgagggccaaaactctgcaactttgtcgagtggagaggttacaaggttgtgtacagaaggtatgccagcctctatttctgcatgtgtattgatgctgatgacaatgagcttgaagtccttgaaattatccatcattttgttgagatactcgaccgctatttcggcagtgtatgcgagctggatttgatattcaatttccacaaggcttactacgtactggatgagattctcatttctggtgagcttcaggagtctagcaagaagaatgttgcaagacttattgctgcacaggattcattggtagaggctgctaaagaggaagctggctccatcagtaacatcatcgcccaggctacgaagtaaaagtccgcgtctgatgatgcccctctgctctttggtttatgcttatgttggtaaatttgatgtaatagctcctttgctgtatccattttcccaaagaaatacgactccctggattcaggcctgttcagaatgagtgatatgtaattacaatgcatgtgttcctttgcaactgaatttggaatcttccaaagataaaactgtcatggagattgttcaccagtagtctgtttagtgggtatttaagaaatatttgtaaattcttggtcttaattcggcagagcattatcttgtg

SEQ ID NO: 7023 - protein, 232 aa, Glycine max
  peptide (1)..(232): Ceres Seq. ID no. 12611287
  misc_feature (73)..(213): Pfam Name: Pfam Description:  Clathrin adaptor complex small chain
  misc_feature (70)..(232): NCBI GI NO: 34897116 NR Description: putative clathrin assembly protein [Oryza sativa]
  misc_feature (72)..(232): NCBI GI NO: 1762309 NR Description: AP-1 Golgi-related complex component
  misc_feature (72)..(232): NCBI GI NO: 18398407 NR Description: clathrin assembly protein AP19, small subunit
  misc_feature (72)..(231): NCBI GI NO: 15237005 NR Description: clathrin assembly protein AP19 homolog
  misc_feature (72)..(232): NCBI GI NO: 2231698 NR Description: clathrin assembly protein AP19
  misc_feature (72)..(232): NCBI GI NO: 32129329 NR Description: putative clathrin assembly protein
  misc_feature (72)..(217): NCBI GI NO: 23508378 NR Description: clathrin assembly protein AP19, putative
  misc_feature (72)..(223): NCBI GI NO: 23480730 NR Description: clathrin assembly protein AP19, small subunit
  misc_feature (72)..(180): NCBI GI NO: 30690340 NR Description: clathrin assembly protein AP19 homolog
  misc_feature (55)..(218): NCBI GI NO: 34880078 NR Description: similar to Adapter-related protein complex 1 sigma1B subunit
KQIAHPTRSRPPSTDADPRRWHSRLSAILPSLATGCHPVRPRRQIRAATPTRPRSSSRASADLRGRRPSLAMINFVLLISRQGKVRLTKWYSPYTQKERTKVIRELSGLILTRGPKLCNFVEWRGYKVVYRRYASLYFCMCIDADDNELEVLEIIHHFVEILDRYFGSVCELDLIFNFHKAYYVLDEILISGELQESSKKNVARLIAAQDSLVEAAKEEAGSISNIIAQATK

SEQ ID NO: 7024 - protein, 161 aa, Glycine max
  peptide (1)..(161): Ceres Seq. ID no. 12611288
  misc_feature (2)..(142): Pfam Name: Pfam Description:  Clathrin adaptor complex small chain
  misc_feature (1)..(161): NCBI GI NO: 34897116 NR Description: putative clathrin assembly protein [Oryza sativa]
  misc_feature (1)..(161): NCBI GI NO: 1762309 NR Description: AP-1 Golgi-related complex component
  misc_feature (1)..(161): NCBI GI NO: 18398407 NR Description: clathrin assembly protein AP19, small subunit
  misc_feature (1)..(160): NCBI GI NO: 15237005 NR Description: clathrin assembly protein AP19 homolog
  misc_feature (1)..(161): NCBI GI NO: 2231698 NR Description: clathrin assembly protein AP19
  misc_feature (1)..(161): NCBI GI NO: 32129329 NR Description: putative clathrin assembly protein
  misc_feature (1)..(146): NCBI GI NO: 23508378 NR Description: clathrin assembly protein AP19, putative
  misc_feature (1)..(152): NCBI GI NO: 23480730 NR Description: clathrin assembly protein AP19, small subunit
  misc_feature (1)..(109): NCBI GI NO: 30690340 NR Description: clathrin assembly protein AP19 homolog
  misc_feature (1)..(147): NCBI GI NO: 34880078 NR Description: similar to Adapter-related protein complex 1 sigma1B subunit
MINFVLLISRQGKVRLTKWYSPYTQKERTKVIRELSGLILTRGPKLCNFVEWRGYKVVYRRYASLYFCMCIDADDNELEVLEIIHHFVEILDRYFGSVCELDLIFNFHKAYYVLDEILISGELQESSKKNVARLIAAQDSLVEAAKEEAGSISNIIAQATK

SEQ ID NO: 7025 - DNA, 749 bp, Glycine max
  misc_feature (1)..(749): Ceres Seq. ID no. 15178083
acagcagtcgctctccaaaagcctttctttccctttctctccacagtacgagaagagtagttctaggtagagatgacgagcttcaagggccttgtaggcgaggggagcacggcgctgccgcacgtcctcgccgtggacgacagctcggtggaccgcgccgtcatctccggcatcctccgcagctccaagttccgcgtgaccgccgtggacagcgggaagagggccctggagcttcttggctccgagaccaatgtgagcatgataatcaccgactactggatgccggagatgacgggctacgagctcctcaagaaggtcaaggggtcgtccaagctgagggagatccccgtggtgatcatgtcctcggagaacgtgcctacaaggatcaacaggtgcctggaggagggagccgaggatttcctgctgaagcccgtccagccgtccgacgtgtcgcgcctctgcagccgcgtcctccgctgagcgccgagtggtccggtaactccggttgcaccgtcggacgcccctgcactgcactacatggcgtgcggattcagtgttttggccttctgggacatggtgcgcatatgatggccgtcagtgtgaatgcatgcagcctgtgttttgcttctgctaagtaggatgtgccctgtttccccctgttatgtagcagtcgacgtatatccctgtcagtgttctgtgcttcagtctcgtggatcagtgttcagtaaaaaggaagtttgcctcaagac

SEQ ID NO: 7026 - protein, 211 aa, Glycine max
  peptide (1)..(211): Ceres Seq. ID no. 15178084
SSRSPKAFLSLSLHSTRRVVLGRDDELQGPCRRGEHGAAARPRRGRQLGGPRRHLRHPPQLQVPRDRRGQREEGPGASWLRDQCEHDNHRLLDAGDDGLRAPQEGQGVVQAEGDPRGDHVLGERAYKDQQVPGGGSRGFPAEARPAVRRVAPLQPRPPLSAEWSGNSGCTVGRPCTALHGVRIQCFGLLGHGAHMMAVSVNACSLCFASAK

SEQ ID NO: 7027 - protein, 135 aa, Glycine max
  peptide (1)..(135): Ceres Seq. ID no. 15178085
  misc_feature (16)..(125): Pfam Name: Pfam Description:  Response regulator receiver domain
  misc_feature (1)..(135): NCBI GI NO: 11041692 NR Description: response regulator [Zea mays]
  misc_feature (16)..(135): NCBI GI NO: 32489852 NR Description: OSJNBb0065J09.12
  misc_feature (10)..(135): NCBI GI NO: 34901288 NR Description: similar to response regulator
  misc_feature (9)..(133): NCBI GI NO: 32488053 NR Description: OSJNBa0018M05.2
  misc_feature (17)..(133): NCBI GI NO: 11358972 NR Description: repsonse regulator ZmRR2 [imported] - maize
  misc_feature (3)..(133): NCBI GI NO: 11358973 NR Description: response regulator Cip1 [imported] - maize
  misc_feature (58)..(135): NCBI GI NO: 34906626 NR Description: putative response regulator
  misc_feature (17)..(56): NCBI GI NO: 34906626 NR Description: putative response regulator
  misc_feature (58)..(135): NCBI GI NO: 12060384 NR Description: response regulator 4 [Zea mays]
  misc_feature (17)..(60): NCBI GI NO: 12060384 NR Description: response regulator 4 [Zea mays]
MTSFKGLVGEGSTALPHVLAVDDSSVDRAVISGILRSSKFRVTAVDSGKRALELLGSETNVSMIITDYWMPEMTGYELLKKVKGSSKLREIPVVIMSSENVPTRINRCLEEGAEDFLLKPVQPSDVSRLCSRVLR

SEQ ID NO: 7028 - DNA, 1098 bp, Glycine max
  misc_feature (1)..(1098): Ceres Seq. ID no. 15173129
aattagtccagttcgtcggttggtggtggtggcgtgcgtgcctgggcgactctgcctcaaaccctcatcaggtccctcgatcgccgcgctcgagttggttatatagaactgaagggaggtaaggtgagtataagcatcagagggagtacatagcatgagtaataccagcggcgcacggcgtgccgcaaggaggcaatcgctggatggatctgctgataaagttgttgtggacttggatgcaagctcgccggtggcggggaaccatcatgggctctcggtcttccctggtgcacgcacatcgcctattgatgtggaagctctcgatgatgaagtgcaggccctatcgccttcacaagtgcctccctcgggggtgaaccggagaactagagggcaacctgtgacacaattttctctggatgaagatgctgtcctggaagagaattggagaattataaggcaatgtgcgacaccattttatcttgatgaagatgctgccatggaagagaatcggagaactagaagtcaatttttgacaccactttatctggatgaagatgctgccctggaagataatgcagctatgccttctcatagcacttggaacaaacgccaaagggttgcgcctttgatatgtctctccccagaaagggaagaagggtccagcctgcagtcgaacaatgcggtgcaaattagccaagagcctgctaaggtggtggttccaaaggaaccgaatttcacttgcccggtgtgccttaacaagctggtggagccttcgacaacaaaatgtggccatgatgttgtgggcagagtgcatcaagcaagccatccagtttcagaagaaatgccctacttgccgcaaggccctgaggaagaacaacttccatcgtatttaccttccgaactcggatggttaaggtcagcatcggatcaatcgccaaagagtatcatcacatagattatggttgctgaggaacctgtagcaggtgctcagatgaacaattgattaagttgactgctgtacgtatcattagatggttggtctatgatgtaactgagattaagcttgaagctgagataaaacagtggatagcatcttcg

SEQ ID NO: 7029 - protein, 266 aa, Glycine max
  peptide (1)..(266): Ceres Seq. ID no. 15173130
  misc_feature (47)..(213): NCBI GI NO: 21537318 NR Description: unknown [Arabidopsis thaliana]
  misc_feature (47)..(213): NCBI GI NO: 21954077 NR Description: unknown protein [Arabidopsis thaliana]
  misc_feature (47)..(213): NCBI GI NO: 18422940 NR Description: zinc finger
  misc_feature (169)..(213): NCBI GI NO: 15231414 NR Description: RING zinc finger protein -related
MSNTSGARRAARRQSLDGSADKVVVDLDASSPVAGNHHGLSVFPGARTSPIDVEALDDEVQALSPSQVPPSGVNRRTRGQPVTQFSLDEDAVLEENWRIIRQCATPFYLDEDAAMEENRRTRSQFLTPLYLDEDAALEDNAAMPSHSTWNKRQRVAPLICLSPEREEGSSLQSNNAVQISQEPAKVVVPKEPNFTCPVCLNKLVEPSTTKCGHDVVGRVHQASHPVSEEMPYLPQGPEEEQLPSYLPSELGWLRSASDQSPKSIIT

SEQ ID NO: 7030 - protein, 152 aa, Glycine max
  peptide (1)..(152): Ceres Seq. ID no. 15173131
  misc_feature (1)..(99): NCBI GI NO: 21537318 NR Description: unknown [Arabidopsis thaliana]
  misc_feature (1)..(99): NCBI GI NO: 21954077 NR Description: unknown protein [Arabidopsis thaliana]
  misc_feature (1)..(99): NCBI GI NO: 18422940 NR Description: zinc finger
  misc_feature (55)..(99): NCBI GI NO: 15231414 NR Description: RING zinc finger protein -related
MEENRRTRSQFLTPLYLDEDAALEDNAAMPSHSTWNKRQRVAPLICLSPEREEGSSLQSNNAVQISQEPAKVVVPKEPNFTCPVCLNKLVEPSTTKCGHDVVGRVHQASHPVSEEMPYLPQGPEEEQLPSYLPSELGWLRSASDQSPKSIIT

SEQ ID NO: 7031 - DNA, 980 bp, Glycine max
  misc_feature (1)..(980): Ceres Seq. ID no. 12611293
cccagctcactcactcactcactctcacacacccactttacttcctccactcttcaggtcacatcggcagctgctagccaagtagccaagccaacgaagagatcgagaaagcgagagcgtagcaagaaggtggcatcatggcgacggcggtgcagtggccggtgatggtggtggtggtgatgatgggggcggtgatggcggcgcgcgtgggggcggacatggacgcggaccggagcgagtgcgcggagcagctggtggggttggcgccgtgcctgcagtacgtgcaggggcaggcgcggtcgccggcgccggactgctgcggcgggctgagccaggtgctggacaagagccccaagtgcctgtgcgtgctggtcaaggacaaggacgaccccaacctgggcatcaagatcaacgcctccctcgcgctcgccctcccctccgcctgccgcaacaccaaggccaacgtctcccactgcccagagctgctgcacctccctccgaactccaaggacgccgccatcttcagccccggcggcgacaagggctccgctgcagctctagccaaggacaacacggcgtcgacggccaactcccgcgcgcagcaggcggccagcgccggcaccgcctcctcgacggcgaccgccggcgtcgcactggcggcgttgctcgccggctaccttgcgctgctcctgcccgctgacttcctggccgccgcctcctccttctagtccatctccgtacgtgcgcgtctgtctcctcccccctacggcgctaccgaagatcgatcaggagcaggggagccaggaaccagtgactctgtttgggggaatgaaatgcctcaagtaggatcgatcatgcatgttgtagtatgtgacagagatggtagtggtggtagtggttggtttgttttggtgctgtattgaactcttatgttttcgctgtatggatgacgcaacaattccacacttacggatgcggcc

SEQ ID NO: 7032 - protein, 196 aa, Glycine max
  peptide (1)..(196): Ceres Seq. ID no. 12611294
  misc_feature (35)..(113): Pfam Name: Pfam Description:  Protease inhibitor/seed storage/LTP family
  misc_feature (1)..(169): NCBI GI NO: 15224862 NR Description: unknown protein; protein id: At2g44290.1
  misc_feature (1)..(170): NCBI GI NO: 15224863 NR Description: unknown protein; protein id: At2g44300.1
  misc_feature (11)..(194): NCBI GI NO: 34394084 NR Description: lipid transfer protein-like
  misc_feature (10)..(161): NCBI GI NO: 18405294 NR Description: expressed protein; protein id: At1g55260
  misc_feature (26)..(161): NCBI GI NO: 21537387 NR Description: unknown [Arabidopsis thaliana]
  misc_feature (6)..(153): NCBI GI NO: 15231070 NR Description: putative protein; protein id: At3g58550
  misc_feature (10)..(153): NCBI GI NO: 21555220 NR Description: unknown [Arabidopsis thaliana]
  misc_feature (1)..(139): NCBI GI NO: 25553602 NR Description: OJ1656_E11.34
  misc_feature (9)..(186): NCBI GI NO: 21553541 NR Description: lipid transfer protein, putative
  misc_feature (9)..(186): NCBI GI NO: 15217777 NR Description: lipid transfer protein, putative
MATAVQWPVMVVVVMMGAVMAARVGADMDADRSECAEQLVGLAPCLQYVQGQARSPAPDCCGGLSQVLDKSPKCLCVLVKDKDDPNLGIKINASLALALPSACRNTKANVSHCPELLHLPPNSKDAAIFSPGGDKGSAAALAKDNTASTANSRAQQAASAGTASSTATAGVALAALLAGYLALLLPADFLAAASSF

SEQ ID NO: 7033 - protein, 187 aa, Glycine max
  peptide (1)..(187): Ceres Seq. ID no. 12611295
  misc_feature (26)..(104): Pfam Name: Pfam Description:  Protease inhibitor/seed storage/LTP family
  misc_feature (1)..(160): NCBI GI NO: 15224862 NR Description: unknown protein; protein id: At2g44290.1
  misc_feature (1)..(161): NCBI GI NO: 15224863 NR Description: unknown protein; protein id: At2g44300.1
  misc_feature (2)..(185): NCBI GI NO: 34394084 NR Description: lipid transfer protein-like
  misc_feature (1)..(152): NCBI GI NO: 18405294 NR Description: expressed protein; protein id: At1g55260
  misc_feature (17)..(152): NCBI GI NO: 21537387 NR Description: unknown [Arabidopsis thaliana]
  misc_feature (1)..(144): NCBI GI NO: 15231070 NR Description: putative protein; protein id: At3g58550
  misc_feature (1)..(144): NCBI GI NO: 21555220 NR Description: unknown [Arabidopsis thaliana]
  misc_feature (1)..(130): NCBI GI NO: 25553602 NR Description: OJ1656_E11.34
  misc_feature (1)..(177): NCBI GI NO: 21553541 NR Description: lipid transfer protein, putative
  misc_feature (1)..(177): NCBI GI NO: 15217777 NR Description: lipid transfer protein, putative
MVVVVMMGAVMAARVGADMDADRSECAEQLVGLAPCLQYVQGQARSPAPDCCGGLSQVLDKSPKCLCVLVKDKDDPNLGIKINASLALALPSACRNTKANVSHCPELLHLPPNSKDAAIFSPGGDKGSAAALAKDNTASTANSRAQQAASAGTASSTATAGVALAALLAGYLALLLPADFLAAASSF

SEQ ID NO: 7034 - protein, 182 aa, Glycine max
  peptide (1)..(182): Ceres Seq. ID no. 12611296
  misc_feature (21)..(99): Pfam Name: Pfam Description:  Protease inhibitor/seed storage/LTP family
  misc_feature (1)..(155): NCBI GI NO: 15224862 NR Description: unknown protein; protein id: At2g44290.1
  misc_feature (1)..(156): NCBI GI NO: 15224863 NR Description: unknown protein; protein id: At2g44300.1
  misc_feature (1)..(180): NCBI GI NO: 34394084 NR Description: lipid transfer protein-like
  misc_feature (1)..(147): NCBI GI NO: 18405294 NR Description: expressed protein; protein id: At1g55260
  misc_feature (12)..(147): NCBI GI NO: 21537387 NR Description: unknown [Arabidopsis thaliana]
  misc_feature (1)..(139): NCBI GI NO: 15231070 NR Description: putative protein; protein id: At3g58550
  misc_feature (1)..(139): NCBI GI NO: 21555220 NR Description: unknown [Arabidopsis thaliana]
  misc_feature (1)..(125): NCBI GI NO: 25553602 NR Description: OJ1656_E11.34
  misc_feature (1)..(172): NCBI GI NO: 21553541 NR Description: lipid transfer protein, putative
  misc_feature (1)..(172): NCBI GI NO: 15217777 NR Description: lipid transfer protein, putative
MMGAVMAARVGADMDADRSECAEQLVGLAPCLQYVQGQARSPAPDCCGGLSQVLDKSPKCLCVLVKDKDDPNLGIKINASLALALPSACRNTKANVSHCPELLHLPPNSKDAAIFSPGGDKGSAAALAKDNTASTANSRAQQAASAGTASSTATAGVALAALLAGYLALLLPADFLAAASSF

SEQ ID NO: 7035 - DNA, 795 bp, Glycine max
  misc_feature (1)..(795): Ceres Seq. ID no. 13639196
actcaggacaataagtttaaagccatcaaatccaaaaaaaaatatttgttttaataatctaagcttcatcaatggcgaatcaagcagctatagcatttttctttttcgttttggcggtcttctccaacttggagctctcgtcttctacgcttttccatggcaaggtctcttgccttgactgccaccgcggtttcgacttctcaggcgttaaggttctcctaaagtgcgaaggcgagaagaaacacataaccacgatggcgacttcagacggatctttccggtcagtgcttccgaccaatgacagaaaacactccatgaactgtcttgcaaagctcttgggaggtcctgagcaactttatgctcataaacacaacatggtctctgaactggttaagtcaaaacacgataccaaggttcttactacctcaaacccactttccttctctctctcatgccctaaaccaactggagataatgtcggaaacatgataggagattcgaagactgttaattttcctgggacaggaggttttggattcccacctgctagcttctttcccttcttaccaatcattggcatcccatgattttaattaaatgtgcttgataagacgggggacgtatttattcataaatgttgttgtttatgtgaatttaagtgagcgaacaaaattgtttttgttttgtgagatataattaaggtttgtttatgtgataagaaaatgttggttatcggcttcttggatccgttgctttgtaccatgtttgtgataataataaagattgcattagtcc

SEQ ID NO: 7036 - protein, 171 aa, Glycine max
  peptide (1)..(171): Ceres Seq. ID no. 13639197
  misc_feature (1)..(171): NCBI GI NO: 18420486 NR Description: expressed protein [Arabidopsis thaliana]
  misc_feature (1)..(171): NCBI GI NO: 21594030 NR Description: unknown [Arabidopsis thaliana]
  misc_feature (7)..(171): NCBI GI NO: 30683502 NR Description: expressed protein [Arabidopsis thaliana]
MANQAAIAFFFFVLAVFSNLELSSSTLFHGKVSCLDCHRGFDFSGVKVLLKCEGEKKHITTMATSDGSFRSVLPTNDRKHSMNCLAKLLGGPEQLYAHKHNMVSELVKSKHDTKVLTTSNPLSFSLSCPKPTGDNVGNMIGDSKTVNFPGTGGFGFPPASFFPFLPIIGIP

SEQ ID NO: 7037 - protein, 110 aa, Glycine max
  peptide (1)..(110): Ceres Seq. ID no. 13639198
  misc_feature (1)..(110): NCBI GI NO: 18420486 NR Description: expressed protein [Arabidopsis thaliana]
  misc_feature (1)..(110): NCBI GI NO: 21594030 NR Description: unknown [Arabidopsis thaliana]
  misc_feature (1)..(110): NCBI GI NO: 30683502 NR Description: expressed protein [Arabidopsis thaliana]
MATSDGSFRSVLPTNDRKHSMNCLAKLLGGPEQLYAHKHNMVSELVKSKHDTKVLTTSNPLSFSLSCPKPTGDNVGNMIGDSKTVNFPGTGGFGFPPASFFPFLPIIGIP

SEQ ID NO: 7038 - protein, 90 aa, Glycine max
  peptide (1)..(90): Ceres Seq. ID no. 13639199
  misc_feature (1)..(90): NCBI GI NO: 18420486 NR Description: expressed protein [Arabidopsis thaliana]
  misc_feature (1)..(90): NCBI GI NO: 21594030 NR Description: unknown [Arabidopsis thaliana]
  misc_feature (1)..(90): NCBI GI NO: 30683502 NR Description: expressed protein [Arabidopsis thaliana]
MNCLAKLLGGPEQLYAHKHNMVSELVKSKHDTKVLTTSNPLSFSLSCPKPTGDNVGNMIGDSKTVNFPGTGGFGFPPASFFPFLPIIGIP

SEQ ID NO: 7039 - DNA, 959 bp, Glycine max
  misc_feature (1)..(959): Ceres Seq. ID no. 12610239
atatcattatcaatatcaacatatagagagatgcagatacgtttcaaaagaagaagaggataactagcgaatctttattttttttgttataaaagtcaacagaatctttactgatccctcgtagacttttcttctagggcttatccgaattttatcatcaaattaaaatctaatcaaccactaaccacatcctcccatctccagattcatcgtcgcgggtagacggagaagaagatatggcggttactatgaagcatatgtcgttgatcgtctctttgttcggcgtcttgtccttccttcttggggtcatcgcggagaacaagaagcctgcgtctgggactcctataaacgggaagggagtagttatctgcaaatatccatctgatccaactgtcgccttgggttacctttctgctgcctttctccttgcctccacaatagctggatacaaatccttgttcatgtcttacaagggaaggtctgttcccaactctgtcttgttcaaaagcaccaccttctctgtcttcttcaacattgccttgatcacatctggactggcactgtctctgttgctatggccaaccattacagagcaacttcacttgacacgtaatgtccatcggaacttagagaccagttgccccacggctaagaccggtctgcttggtggaggtgcctttgtttcattagactcgtgccttttctggttggtcgctctgatgctcgctgataacgcacgtgaagaccattttgatgaaactgagaacaggaacgtcaatgggaactcttcctctagggatgttaatctcaagattgatgcttgagagaataatctgcatccgattattagtattgggttttaataaatggttttttacattattctattacttgtttgattaagaaaataactattcgtttcttctggttcttctatgttcttaataatatttgatctt

SEQ ID NO: 7040 - protein, 195 aa, Glycine max
  peptide (1)..(195): Ceres Seq. ID no. 12610240
  misc_feature (1)..(195): NCBI GI NO: 15235839 NR Description: putative protein; protein id: At4g31130
  misc_feature (1)..(190): NCBI GI NO: 8099143 NR Description: hypothetical protein [Oryza sativa]
MAVTMKHMSLIVSLFGVLSFLLGVIAENKKPASGTPINGKGVVICKYPSDPTVALGYLSAAFLLASTIAGYKSLFMSYKGRSVPNSVLFKSTTFSVFFNIALITSGLALSLLLWPTITEQLHLTRNVHRNLETSCPTAKTGLLGGGAFVSLDSCLFWLVALMLADNAREDHFDETENRNVNGNSSSRDVNLKIDA

SEQ ID NO: 7041 - protein, 191 aa, Glycine max
  peptide (1)..(191): Ceres Seq. ID no. 12610241
  misc_feature (1)..(191): NCBI GI NO: 15235839 NR Description: putative protein; protein id: At4g31130
  misc_feature (1)..(186): NCBI GI NO: 8099143 NR Description: hypothetical protein [Oryza sativa]
MKHMSLIVSLFGVLSFLLGVIAENKKPASGTPINGKGVVICKYPSDPTVALGYLSAAFLLASTIAGYKSLFMSYKGRSVPNSVLFKSTTFSVFFNIALITSGLALSLLLWPTITEQLHLTRNVHRNLETSCPTAKTGLLGGGAFVSLDSCLFWLVALMLADNAREDHFDETENRNVNGNSSSRDVNLKIDA

SEQ ID NO: 7042 - protein, 188 aa, Glycine max
  peptide (1)..(188): Ceres Seq. ID no. 12610242
  misc_feature (1)..(188): NCBI GI NO: 15235839 NR Description: putative protein; protein id: At4g31130
  misc_feature (1)..(183): NCBI GI NO: 8099143 NR Description: hypothetical protein [Oryza sativa]
MSLIVSLFGVLSFLLGVIAENKKPASGTPINGKGVVICKYPSDPTVALGYLSAAFLLASTIAGYKSLFMSYKGRSVPNSVLFKSTTFSVFFNIALITSGLALSLLLWPTITEQLHLTRNVHRNLETSCPTAKTGLLGGGAFVSLDSCLFWLVALMLADNAREDHFDETENRNVNGNSSSRDVNLKIDA

SEQ ID NO: 7043 - DNA, 875 bp, Glycine max
  misc_feature (1)..(875): Ceres Seq. ID no. 13582167
agtaatcggaaaattctagagcatcgagagtttcttcaatggcgaatctccccaccgttctcgttaccggcgctagtggcaaaacaggtcagattgtgtacaagaagctgaaggagaggtcagacaagtttgtggcgaaggggttagtgagaactcctcaagggaaagaggagattggaggagaagatgatgtgttcattggtgatataagggatgctgatagcattacccctgcgattcaagggatcgatgcgcttgtgattctcactagcgctgtgcccaagatgaaacctgggtttgatcccactaaaggtggaagacctgagttcattttcgatgatggacaataccctgaacaggttgattggattggccagaagaaccaaatagatgctgccaaggctgctggtgttaagcatattgtcttggttgggtccatgggtggaacaaatcctgatcatcctctcaacaaactgggaaatgggaacatactgatttggaagaggaaagctgaacagtaccttgctgattctggtactccttacacaataatcagagctggaggacttctagacaaagaaggaggtgcacgagagctcctagttggcaaagacgatgagcttcttcaaacagacaccaaaaccgtccccagggctgatgttgctgaagtctgcattcaggcattgctgttcgaggaagctaagaataaagcatttgatctcggttcaaaaccagagggaaccagttctcccaccaatgacttcaaggctctcttctctcaagtcatcgctcgtttttagatcttctatctctattgcaactgaataatttgtgttgtaatgtaccaaaccttttaaaataaaatctccgggttc

SEQ ID NO: 7044 - protein, 253 aa, Glycine max
  peptide (1)..(253): Ceres Seq. ID no. 13582168
  misc_feature (106)..(237): Pfam Name: Pfam Description:  Isoflavone reductase
  misc_feature (1)..(253): NCBI GI NO: 18413869 NR Description: expressed protein [Arabidopsis thaliana]
  misc_feature (1)..(248): NCBI GI NO: 11358410 NR Description: hypothetical protein T7H20
  misc_feature (1)..(253): NCBI GI NO: 34897418 NR Description: unknown protein
  misc_feature (1)..(253): NCBI GI NO: 18404496 NR Description: expressed protein [Arabidopsis thaliana]
  misc_feature (1)..(253): NCBI GI NO: 14719331 NR Description: putative 3-beta hydroxysteroiddehydrogenase/isomerase protein
  misc_feature (1)..(253): NCBI GI NO: 7485430 NR Description: hypothetical protein At2g37660
  misc_feature (92)..(249): NCBI GI NO: 16330694 NR Description: hypothetical protein [Synechocystis sp. PCC 6803]
  misc_feature (92)..(249): NCBI GI NO: 23130188 NR Description: hypothetical protein [Nostoc punctiforme]
  misc_feature (92)..(248): NCBI GI NO: 17230243 NR Description: hypothetical protein [Nostoc sp. PCC 7120]
  misc_feature (106)..(239): NCBI GI NO: 37523053 NR Description: hypothetical protein gll3484
MANLPTVLVTGASGKTGQIVYKKLKERSDKFVAKGLVRTPQGKEEIGGEDDVFIGDIRDADSITPAIQGIDALVILTSAVPKMKPGFDPTKGGRPEFIFDDGQYPEQVDWIGQKNQIDAAKAAGVKHIVLVGSMGGTNPDHPLNKLGNGNILIWKRKAEQYLADSGTPYTIIRAGGLLDKEGGARELLVGKDDELLQTDTKTVPRADVAEVCIQALLFEEAKNKAFDLGSKPEGTSSPTNDFKALFSQVIARF

SEQ ID NO: 7045 - protein, 171 aa, Glycine max
  peptide (1)..(171): Ceres Seq. ID no. 13582169
  misc_feature (24)..(155): Pfam Name: Pfam Description:  Isoflavone reductase
  misc_feature (1)..(171): NCBI GI NO: 18413869 NR Description: expressed protein [Arabidopsis thaliana]
  misc_feature (1)..(166): NCBI GI NO: 11358410 NR Description: hypothetical protein T7H20
  misc_feature (1)..(171): NCBI GI NO: 34897418 NR Description: unknown protein
  misc_feature (1)..(171): NCBI GI NO: 18404496 NR Description: expressed protein [Arabidopsis thaliana]
  misc_feature (1)..(171): NCBI GI NO: 14719331 NR Description: putative 3-beta hydroxysteroiddehydrogenase/isomerase protein
  misc_feature (1)..(171): NCBI GI NO: 7485430 NR Description: hypothetical protein At2g37660
  misc_feature (10)..(167): NCBI GI NO: 16330694 NR Description: hypothetical protein [Synechocystis sp. PCC 6803]
  misc_feature (10)..(167): NCBI GI NO: 23130188 NR Description: hypothetical protein [Nostoc punctiforme]
  misc_feature (10)..(166): NCBI GI NO: 17230243 NR Description: hypothetical protein [Nostoc sp. PCC 7120]
  misc_feature (24)..(157): NCBI GI NO: 37523053 NR Description: hypothetical protein gll3484
MKPGFDPTKGGRPEFIFDDGQYPEQVDWIGQKNQIDAAKAAGVKHIVLVGSMGGTNPDHPLNKLGNGNILIWKRKAEQYLADSGTPYTIIRAGGLLDKEGGARELLVGKDDELLQTDTKTVPRADVAEVCIQALLFEEAKNKAFDLGSKPEGTSSPTNDFKALFSQVIARF

SEQ ID NO: 7046 - DNA, 817 bp, Glycine max
  misc_feature (1)..(817): Ceres Seq. ID no. 12610243
aaaaagcttaaactaaaacccccaagaaacggagatgggtttggtcacagaggaggtgagagctaaggcagagatgtacacgggagatgagatatgccgggagaagacaaaatgcttcctcaaggaaatatctatgcccaatggcttactacctttgaaggacatagaagaggctgggtatgacagagagtcaggtgttgtgtggctgaagcagaaacagagcatcacccacaagttcgaaaatatcgataagctcgtctcctatggaaccgaggtcactgccgtggtcaaaaccgggaagatcaagaagctcactggtgtcaaggccaaggagcttcttatttgggtcagtgtcagtgagatctatacagaggagaaagagaagatcacctttaagtcaccaaccacactgtccaggactttccctgtctcagcttttattgtcccagaggaagtggaaccagccaaggaagagcctgctaaggagaagagcagtgaagccaccgaggaggtcaccgaggaagaacctgccaaggaggctgccaaggttgaacctgccaaagaggctgttgccgtcaaggaggcctaaccaagcttatcactgcttctatagtaaaaagagaccaaaatcttttgaagtgtgcttcaacaatttaaaccgacctttgagagttagtgcttctcactgctcttactctcatctattacctaccactcgttgctgcttatttttacctgtaataagatgtcaacatcatcctgttcttacaagtattaccgtataattatttataaactacactgaagttggttctgt

SEQ ID NO: 7047 - protein, 184 aa, Glycine max
  peptide (1)..(184): Ceres Seq. ID no. 12610244
  misc_feature (3)..(149): Pfam Name: Pfam Description:  Protein of unknown function, DUF538
  misc_feature (1)..(184): NCBI GI NO: 18391006 NR Description: expressed protein; protein id: At1g09310
  misc_feature (1)..(169): NCBI GI NO: 18405887 NR Description: expressed protein; protein id: At1g56580
  misc_feature (6)..(139): NCBI GI NO: 34915410 NR Description: hypothetical protein~similar to Arabidopsisthaliana chromosome1
  misc_feature (6)..(166): NCBI GI NO: 34903866 NR Description: unnamed protein product
  misc_feature (6)..(140): NCBI GI NO: 34915378 NR Description: hypothetical protein~similar to Oryza sativachromosome 7
  misc_feature (6)..(139): NCBI GI NO: 33146557 NR Description: unknown protein
MGLVTEEVRAKAEMYTGDEICREKTKCFLKEISMPNGLLPLKDIEEAGYDRESGVVWLKQKQSITHKFENIDKLVSYGTEVTAVVKTGKIKKLTGVKAKELLIWVSVSEIYTEEKEKITFKSPTTLSRTFPVSAFIVPEEVEPAKEEPAKEKSSEATEEVTEEEPAKEAAKVEPAKEAVAVKEA

SEQ ID NO: 7048 - protein, 173 aa, Glycine max
  peptide (1)..(173): Ceres Seq. ID no. 12610245
MEPRSLPWSKPGRSRSSLVSRPRSFLFGSVSVRSIQRRKRRSPLSHQPHCPGLSLSQLLLSQRKWNQPRKSLLRRRAVKPPRRSPRKNLPRRLPRLNLPKRLLPSRRPNQAYHCFYSKKRPKSFEVCFNNLNRPLRVSASHCSYSHLLPTTRCCLFLPVIRCQHHPVLTSITV

SEQ ID NO: 7049 - protein, 171 aa, Glycine max
  peptide (1)..(171): Ceres Seq. ID no. 12610246
  misc_feature (1)..(136): Pfam Name: Pfam Description:  Protein of unknown function, DUF538
  misc_feature (1)..(171): NCBI GI NO: 18391006 NR Description: expressed protein; protein id: At1g09310
  misc_feature (1)..(156): NCBI GI NO: 18405887 NR Description: expressed protein; protein id: At1g56580
  misc_feature (1)..(126): NCBI GI NO: 34915410 NR Description: hypothetical protein~similar to Arabidopsisthaliana chromosome1
  misc_feature (1)..(153): NCBI GI NO: 34903866 NR Description: unnamed protein product
  misc_feature (1)..(127): NCBI GI NO: 34915378 NR Description: hypothetical protein~similar to Oryza sativachromosome 7
  misc_feature (1)..(126): NCBI GI NO: 33146557 NR Description: unknown protein
MYTGDEICREKTKCFLKEISMPNGLLPLKDIEEAGYDRESGVVWLKQKQSITHKFENIDKLVSYGTEVTAVVKTGKIKKLTGVKAKELLIWVSVSEIYTEEKEKITFKSPTTLSRTFPVSAFIVPEEVEPAKEEPAKEKSSEATEEVTEEEPAKEAAKVEPAKEAVAVKEA

SEQ ID NO: 7050 - DNA, 852 bp, Glycine max
  misc_feature (1)..(852): Ceres Seq. ID no. 12610597
acaccacccggagaactgagctgagatactacttctgttctcttctccccccttttccgagccccccacccgtcatctctccagcctccagtctccgccgacgccatggggcaggtctgggcgtctctgcaagagaagctccaagggcggcactggaaggagaggcaggtgcggaagatcaccgacagggtgttcgaccggctcaccgaggatacccggaagcccgagaaggacgccctcaagttcgaggaggtctacatcgccgtcctctgcgtctacaatgacatcaacaagtacttgccggggccgcactacgaccctccgtccaaggagaggctcaaggaactcatgaaagagtttgacatcgacatgaacggtctcctggatcgcgaggagttcgcggagttcatccggaagctgaccgccgagtcactctgcgcgatcagcctcaagctgatcatcacgctggtcgccgcccctgcgctggcgctggcgaccaagagggcaaccgagggcgtccccggcgtcggcaaggtagtgcacaaggtgcccaatgccatctatgccgccgccatcaccatggctgccgtgctcatccagagatccgccgagggcgtcgagtagaagcggcatcgcgccgtgaactgtagatgcaccaggcaaccagggagggtgtaaatgtgctgtgatttgccgtgtgaagggtgatgccctgtgggacttatagttttttctgtaataccttcctgtctgtgcttcttggtgttgctagcctggtgtgattcaaaaagacagtattcgctgcttgttgacatgataaattcttggactaaataaagccgtggtcctgct

SEQ ID NO: 7051 - protein, 172 aa, Glycine max
  peptide (1)..(172): Ceres Seq. ID no. 12610598
  misc_feature (1)..(172): NCBI GI NO: 38344137 NR Description: OSJNBa0041A02.4
  misc_feature (1)..(164): NCBI GI NO: 18408144 NR Description: expressed protein; protein id: At1g64850
  misc_feature (1)..(165): NCBI GI NO: 38344138 NR Description: OSJNBa0041A02.5
  misc_feature (41)..(163): NCBI GI NO: 18420040 NR Description: Expressed protein; protein id: At4g37445
  misc_feature (41)..(163): NCBI GI NO: 26453144 NR Description: unknown protein [Arabidopsis thaliana]
MGQVWASLQEKLQGRHWKERQVRKITDRVFDRLTEDTRKPEKDALKFEEVYIAVLCVYNDINKYLPGPHYDPPSKERLKELMKEFDIDMNGLLDREEFAEFIRKLTAESLCAISLKLIITLVAAPALALATKRATEGVPGVGKVVHKVPNAIYAAAITMAAVLIQRSAEGVE

SEQ ID NO: 7052 - protein, 93 aa, Glycine max
  peptide (1)..(93): Ceres Seq. ID no. 12610599
TTRRTELRYYFCSLLPPFPSPPPVISPASSLRRRHGAGLGVSAREAPRAALEGEAGAEDHRQGVRPAHRGYPEAREGRPQVRGGLHRRPLRLQ

SEQ ID NO: 7053 - protein, 91 aa, Glycine max
  peptide (1)..(91): Ceres Seq. ID no. 12610600
  misc_feature (1)..(91): NCBI GI NO: 38344137 NR Description: OSJNBa0041A02.4
  misc_feature (1)..(83): NCBI GI NO: 18408144 NR Description: expressed protein; protein id: At1g64850
  misc_feature (1)..(84): NCBI GI NO: 38344138 NR Description: OSJNBa0041A02.5
  misc_feature (1)..(82): NCBI GI NO: 18420040 NR Description: Expressed protein; protein id: At4g37445
  misc_feature (1)..(82): NCBI GI NO: 26453144 NR Description: unknown protein [Arabidopsis thaliana]
MKEFDIDMNGLLDREEFAEFIRKLTAESLCAISLKLIITLVAAPALALATKRATEGVPGVGKVVHKVPNAIYAAAITMAAVLIQRSAEGVE

SEQ ID NO: 7054 - DNA, 945 bp, Glycine max
  misc_feature (1)..(945): Ceres Seq. ID no. 12610607
gctagggttcgaatcagattatctgcaacaacaacaaaaaaaatggcgttggctggtcgtatcagatccgggatctccttcttcaagaccatctccgtctctgattccgtctcctccgctagatctcacctccgtggagcgccgcttatccccgcgttgagagattatgcaacagcttcggctcagaagaccggcaatgttaaggtgcctgtggctttagttggtgaatctggcaactttgcttcgtggctatacattgcagctgtgaaaatgaactctttggagaagatcgagtctgatctttctgagctggttgaggctatgaagacaagccctattttttcgcagtttactaaagatccctctgttcctagagagacaagactcgctgctattgtggatgtttgtgataaagcaaagtttgcggaacccaccaagaacttcctctctttgttagctgagaacgggaagctgaagaatttagacgtgattgtgaagaaattcatgcagctgacaacagcacataggggagacgtcaaggttttggttaccacagtcatgccgcttccccctgctgaggagaaggagttgaaggagacactccaggagataattggagaagggaagaaagtaactgtggaacaaaagattgatccgagtatctatggagggctaatagtagagtttcaacaaaaggtgttggacatgtctatcaggacaagggcacagcagatggagaggctcctccgtgaacctgttgacctcagcaacctttgaagattttccctaaagaaaacgtgcttgtgatgatgctaccaccagttgacaaataaaatatgacactctcctgaggaacaacatacagacacttgtgtcatgttttaaattttatcatttcattttacagttgttgttttccttcgaaataagcttttttgaagacgt

SEQ ID NO: 7055 - protein, 258 aa, Glycine max
  peptide (1)..(258): Ceres Seq. ID no. 12610608
  misc_feature (78)..(249): Pfam Name: OSCP Pfam Description: ATP synthase delta
  misc_feature (17)..(258): NCBI GI NO: 14190495 NR Description: AT5g13450/T22N19_100 [Arabidopsis thaliana]
  misc_feature (17)..(258): NCBI GI NO: 15240628 NR Description: delta subunit of mitochondrial F1-ATPase
  misc_feature (17)..(258): NCBI GI NO: 1655482 NR Description: delta subunit of mitochondrial F1-ATPase
  misc_feature (15)..(254): NCBI GI NO: 114682 NR Description: ATP synthase delta chain, mitochondrial precursor
  misc_feature (15)..(254): NCBI GI NO: 4774163 NR Description: F1-ATP synthase delta subunit [Ipomoea batatas]
  misc_feature (15)..(255): NCBI GI NO: 23507246 NR Description: oligomycin sensitivity conferring protein
  misc_feature (15)..(255): NCBI GI NO: 23507248 NR Description: oligomycin sensitivity conferring protein
  misc_feature (54)..(189): NCBI GI NO: 32400863 NR Description: F1-ATPase [Triticum aestivum]
  misc_feature (67)..(253): NCBI GI NO: 4502303 NR Description: ATP synthase
  misc_feature (67)..(251): NCBI GI NO: 913531 NR Description: H+-ATPase subunit
ARVRIRLSATTTKKMALAGRIRSGISFFKTISVSDSVSSARSHLRGAPLIPALRDYATASAQKTGNVKVPVALVGESGNFASWLYIAAVKMNSLEKIESDLSELVEAMKTSPIFSQFTKDPSVPRETRLAAIVDVCDKAKFAEPTKNFLSLLAENGKLKNLDVIVKKFMQLTTAHRGDVKVLVTTVMPLPPAEEKELKETLQEIIGEGKKVTVEQKIDPSIYGGLIVEFQQKVLDMSIRTRAQQMERLLREPVDLSNL

SEQ ID NO: 7056 - protein, 244 aa, Glycine max
  peptide (1)..(244): Ceres Seq. ID no. 12610609
  misc_feature (64)..(235): Pfam Name: OSCP Pfam Description: ATP synthase delta
  misc_feature (3)..(244): NCBI GI NO: 14190495 NR Description: AT5g13450/T22N19_100 [Arabidopsis thaliana]
  misc_feature (3)..(244): NCBI GI NO: 15240628 NR Description: delta subunit of mitochondrial F1-ATPase
  misc_feature (3)..(244): NCBI GI NO: 1655482 NR Description: delta subunit of mitochondrial F1-ATPase
  misc_feature (1)..(240): NCBI GI NO: 114682 NR Description: ATP synthase delta chain, mitochondrial precursor
  misc_feature (1)..(240): NCBI GI NO: 4774163 NR Description: F1-ATP synthase delta subunit [Ipomoea batatas]
  misc_feature (1)..(241): NCBI GI NO: 23507246 NR Description: oligomycin sensitivity conferring protein
  misc_feature (1)..(241): NCBI GI NO: 23507248 NR Description: oligomycin sensitivity conferring protein
  misc_feature (40)..(175): NCBI GI NO: 32400863 NR Description: F1-ATPase [Triticum aestivum]
  misc_feature (53)..(239): NCBI GI NO: 4502303 NR Description: ATP synthase
  misc_feature (53)..(237): NCBI GI NO: 913531 NR Description: H+-ATPase subunit
MALAGRIRSGISFFKTISVSDSVSSARSHLRGAPLIPALRDYATASAQKTGNVKVPVALVGESGNFASWLYIAAVKMNSLEKIESDLSELVEAMKTSPIFSQFTKDPSVPRETRLAAIVDVCDKAKFAEPTKNFLSLLAENGKLKNLDVIVKKFMQLTTAHRGDVKVLVTTVMPLPPAEEKELKETLQEIIGEGKKVTVEQKIDPSIYGGLIVEFQQKVLDMSIRTRAQQMERLLREPVDLSNL

SEQ ID NO: 7057 - protein, 168 aa, Glycine max
  peptide (1)..(168): Ceres Seq. ID no. 12610610
  misc_feature (1)..(159): Pfam Name: OSCP Pfam Description: ATP synthase delta
  misc_feature (1)..(168): NCBI GI NO: 14190495 NR Description: AT5g13450/T22N19_100 [Arabidopsis thaliana]
  misc_feature (1)..(168): NCBI GI NO: 15240628 NR Description: delta subunit of mitochondrial F1-ATPase
  misc_feature (1)..(168): NCBI GI NO: 1655482 NR Description: delta subunit of mitochondrial F1-ATPase
  misc_feature (1)..(164): NCBI GI NO: 114682 NR Description: ATP synthase delta chain, mitochondrial precursor
  misc_feature (1)..(164): NCBI GI NO: 4774163 NR Description: F1-ATP synthase delta subunit [Ipomoea batatas]
  misc_feature (1)..(165): NCBI GI NO: 23507246 NR Description: oligomycin sensitivity conferring protein
  misc_feature (1)..(165): NCBI GI NO: 23507248 NR Description: oligomycin sensitivity conferring protein
  misc_feature (1)..(99): NCBI GI NO: 32400863 NR Description: F1-ATPase [Triticum aestivum]
  misc_feature (1)..(163): NCBI GI NO: 4502303 NR Description: ATP synthase
  misc_feature (1)..(161): NCBI GI NO: 913531 NR Description: H+-ATPase subunit
MNSLEKIESDLSELVEAMKTSPIFSQFTKDPSVPRETRLAAIVDVCDKAKFAEPTKNFLSLLAENGKLKNLDVIVKKFMQLTTAHRGDVKVLVTTVMPLPPAEEKELKETLQEIIGEGKKVTVEQKIDPSIYGGLIVEFQQKVLDMSIRTRAQQMERLLREPVDLSNL

SEQ ID NO: 7058 - DNA, 950 bp, Glycine max
  misc_feature (1)..(950): Ceres Seq. ID no. 13582073
gaccccccgctccgctcgtctgccgccgcccacacaccaaaccctaaccctaccgccgccgccgccatggccgacccgcggatgttcccatcgggatcaaacggcccggaagaccacgcccccggccgccggaagtacaacccctaccaggacctcaacatgccctacaactacaagaacctctacgacctccccacctcgccggagttcctcttcgaggaggagtccgcggtgcagcgccgatcctggggcgagaacctcacttactacacgggcatcgggtacctctctggcgccgtgggcggcgccgccctcggcctccgcgacgccgccgcgggcgcggagcccggggagaccgccaagatccgcgccaaccgcttgctcaacgcctgcggcagctccggccgccgttacggcaacaggctcggggtcatcgggctgatgtacgccgggatggagagcggcatggtcgcggcacgcgaccaagacgactggatcaacagcgtcgccgcagggctcggcaccggcgcgctcttccgcgccgctaacgggccgcggtctgccgccgtcgcgggcgctgtcggcggggtccttgctgccgccgccttggccgggaagcagcttgcgaagcgatacgtacaggcaatatgaatctcttcctgttctctcagatcaattgatcaaatcaatcagtcgccaagaatggattatttttgcgtttgtcgttctccagtttagctgctccattagagaatgcataatatctatgctgtgttagtcacatgtatacgatcggaatggatgattttggctttgttacaatgtcggatgccagcatgatgttatacatttttcgggtgttgctgagcaataagagtctatttgatattttgcagcgattacagttgtgaaacatgtactgcagtatttagtaagaatgttcttcagtc

SEQ ID NO: 7059 - protein, 216 aa, Glycine max
  peptide (1)..(216): Ceres Seq. ID no. 13582074
  misc_feature (76)..(209): Pfam Name: Pfam Description:  Tim17/Tim22/Tim23 family
  misc_feature (23)..(216): NCBI GI NO: 37536126 NR Description: putaive mitochondrial inner membrane protein
  misc_feature (23)..(216): NCBI GI NO: 34902184 NR Description: Putative mitochondrial inner membrane protein
  misc_feature (33)..(213): NCBI GI NO: 15218593 NR Description: inner mitochondrial membrane protein
  misc_feature (34)..(212): NCBI GI NO: 18394498 NR Description: inner mitochondrial membrane protein -related
  misc_feature (34)..(212): NCBI GI NO: 13641346 NR Description: translocase of inner mitochondrial membrane TIM23
  misc_feature (23)..(213): NCBI GI NO: 15229350 NR Description: inner mitochondrial membrane protein -related
  misc_feature (38)..(123): NCBI GI NO: 38344267 NR Description: OSJNBa0005N02.5
  misc_feature (151)..(216): NCBI GI NO: 12039278 NR Description: putative inner mitochondrial membrane protein
  misc_feature (42)..(84): NCBI GI NO: 12039278 NR Description: putative inner mitochondrial membrane protein
  misc_feature (114)..(212): NCBI GI NO: 34394286 NR Description: hypothetical protein
DPPLRSSAAAHTPNPNPTAAAAMADPRMFPSGSNGPEDHAPGRRKYNPYQDLNMPYNYKNLYDLPTSPEFLFEEESAVQRRSWGENLTYYTGIGYLSGAVGGAALGLRDAAAGAEPGETAKIRANRLLNACGSSGRRYGNRLGVIGLMYAGMESGMVAARDQDDWINSVAAGLGTGALFRAANGPRSAAVAGAVGGVLAAAALAGKQLAKRYVQAI

SEQ ID NO: 7060 - protein, 194 aa, Glycine max
  peptide (1)..(194): Ceres Seq. ID no. 13582075
  misc_feature (54)..(187): Pfam Name: Pfam Description:  Tim17/Tim22/Tim23 family
  misc_feature (1)..(194): NCBI GI NO: 37536126 NR Description: putaive mitochondrial inner membrane protein
  misc_feature (1)..(194): NCBI GI NO: 34902184 NR Description: Putative mitochondrial inner membrane protein
  misc_feature (11)..(191): NCBI GI NO: 15218593 NR Description: inner mitochondrial membrane protein
  misc_feature (12)..(190): NCBI GI NO: 18394498 NR Description: inner mitochondrial membrane protein -related
  misc_feature (12)..(190): NCBI GI NO: 13641346 NR Description: translocase of inner mitochondrial membrane TIM23
  misc_feature (1)..(191): NCBI GI NO: 15229350 NR Description: inner mitochondrial membrane protein -related
  misc_feature (16)..(101): NCBI GI NO: 38344267 NR Description: OSJNBa0005N02.5
  misc_feature (129)..(194): NCBI GI NO: 12039278 NR Description: putative inner mitochondrial membrane protein
  misc_feature (20)..(62): NCBI GI NO: 12039278 NR Description: putative inner mitochondrial membrane protein
  misc_feature (92)..(190): NCBI GI NO: 34394286 NR Description: hypothetical protein
MADPRMFPSGSNGPEDHAPGRRKYNPYQDLNMPYNYKNLYDLPTSPEFLFEEESAVQRRSWGENLTYYTGIGYLSGAVGGAALGLRDAAAGAEPGETAKIRANRLLNACGSSGRRYGNRLGVIGLMYAGMESGMVAARDQDDWINSVAAGLGTGALFRAANGPRSAAVAGAVGGVLAAAALAGKQLAKRYVQAI

SEQ ID NO: 7061 - protein, 189 aa, Glycine max
  peptide (1)..(189): Ceres Seq. ID no. 13582076
  misc_feature (49)..(182): Pfam Name: Pfam Description:  Tim17/Tim22/Tim23 family
  misc_feature (1)..(189): NCBI GI NO: 37536126 NR Description: putaive mitochondrial inner membrane protein
  misc_feature (1)..(189): NCBI GI NO: 34902184 NR Description: Putative mitochondrial inner membrane protein
  misc_feature (6)..(186): NCBI GI NO: 15218593 NR Description: inner mitochondrial membrane protein
  misc_feature (7)..(185): NCBI GI NO: 18394498 NR Description: inner mitochondrial membrane protein -related
  misc_feature (7)..(185): NCBI GI NO: 13641346 NR Description: translocase of inner mitochondrial membrane TIM23
  misc_feature (1)..(186): NCBI GI NO: 15229350 NR Description: inner mitochondrial membrane protein -related
  misc_feature (11)..(96): NCBI GI NO: 38344267 NR Description: OSJNBa0005N02.5
  misc_feature (124)..(189): NCBI GI NO: 12039278 NR Description: putative inner mitochondrial membrane protein
  misc_feature (15)..(57): NCBI GI NO: 12039278 NR Description: putative inner mitochondrial membrane protein
  misc_feature (87)..(185): NCBI GI NO: 34394286 NR Description: hypothetical protein
MFPSGSNGPEDHAPGRRKYNPYQDLNMPYNYKNLYDLPTSPEFLFEEESAVQRRSWGENLTYYTGIGYLSGAVGGAALGLRDAAAGAEPGETAKIRANRLLNACGSSGRRYGNRLGVIGLMYAGMESGMVAARDQDDWINSVAAGLGTGALFRAANGPRSAAVAGAVGGVLAAAALAGKQLAKRYVQAI

SEQ ID NO: 7062 - DNA, 1327 bp, Glycine max
  misc_feature (1)..(1327): Ceres Seq. ID no. 13595164
ctagaacmcccctccyratcgaaaaacttctgttcatccatttgtccaagacattcgagcttgttaagttctagtagttttatttgttgcagagttagtaccagagaaatggagccacaggaaggaaggaaagggataccatctctgctgtcctcgcagggggagtgcattgccaccaacatcacacagctcattggttggacaccactgatagaactgagaaacatcactgagaaagacagcataggtgctcggctgattgggaagattgagccgtaccagcccctttcctctgtgaaggatcggagtgctctcagattgattgaagatgcagaggagaaaggcttgatcacacctggcatcacaacactgctgggggtcacaagtggtaatcttggcatcggcgtggcgttcattgctgctcagaaaggatacaagttcatcgccctcatgcctgctaaactctcgcttgataagcagatactgatgcgataccttggcgtagaagtggtattagttgatgctgtacagcatggattcaaagctttacttgatagggtagaacagatgaagaaggatgtggaagatgtgtatgttctagatcaattcaccaatcctgcaaatcccgatgcccacttcagatggactggacctgagatatggaaagatacagcaggcaaagtggacatatttatagctgcttcaggttcaggaggcaccatcacaggcgtggggaggtatctcaagacgaagaacccatctgtaaaattaatatgcgttgaaccagctgaaagtccagtgatttcaggtggcgagccagccttccacaacatcctaggaatagggcctggttttgtcccagaaatattggatagatcccagatagatgaaattgtaacagtaactactcaagaagctatggacatggctagaagattggcaagggaagaaggattgcttgttggcatatcttcaggggcaaatgcagctgcctgcttaaaggttgcatcaagagaggagaacaggggaaagatgattgtgacaatgttttccagtggtgcagagaggtatctgaactcggagctctttgcgcaggttaaggaagagtgcgtcaacgtcaacatgaccttctgatgtccatatcaaggcaatgacaccgtaggggtgatccagaagtctagtgttatcttacactggcttataagaagcggaggtctcagttactcaaataccagacactgttttgttaggagacaaaacgaaatgcactagcgtkrmmaabtaaatactccctctgttcactccctctgttcacaaaaaaaaaaaa

SEQ ID NO: 7063 - protein, 377 aa, Glycine max
  peptide (1)..(377): Ceres Seq. ID no. 15221496
  misc_feature (61)..(353): Pfam Name: Pfam Description:  Pyridoxal-phosphate dependent enzyme
  misc_feature (36)..(377): NCBI GI NO: 4574137 NR Description: cysteine synthase [Oryza sativa]
  misc_feature (37)..(377): NCBI GI NO: 4574141 NR Description: cysteine synthase [Oryza sativa]
  misc_feature (12)..(373): NCBI GI NO: 303902 NR Description: cysteine synthase [Spinacia oleracea]
  misc_feature (12)..(373): NCBI GI NO: 12644209 NR Description: CYSTEINE SYNTHASE, CHLOROPLAST PRECURSOR
  misc_feature (12)..(373): NCBI GI NO: 421795 NR Description: cysteine synthase (EC 4
  misc_feature (50)..(373): NCBI GI NO: 11131901 NR Description: Cysteine synthase
  misc_feature (57)..(369): NCBI GI NO: 231970 NR Description: Cysteine synthase
  misc_feature (54)..(373): NCBI GI NO: 2245144 NR Description: O-acetylserine(thiol) lyase [Brassica juncea]
  misc_feature (46)..(370): NCBI GI NO: 11131628 NR Description: Cysteine synthase, chloroplast precursor
  misc_feature (57)..(375): NCBI GI NO: 12081917 NR Description: cytosolic cysteine synthase [Solanum tuberosum]
  misc_feature (3)..(3): Xaa is any aa, unknown or other
  misc_feature (6)..(6): Xaa is any aa, unknown or other
LEXPSXSKNFCSSICPRHSSLLSSSSFICCRVSTREMEPQEGRKGIPSLLSSQGECIATNITQLIGWTPLIELRNITEKDSIGARLIGKIEPYQPLSSVKDRSALRLIEDAEEKGLITPGITTLLGVTSGNLGIGVAFIAAQKGYKFIALMPAKLSLDKQILMRYLGVEVVLVDAVQHGFKALLDRVEQMKKDVEDVYVLDQFTNPANPDAHFRWTGPEIWKDTAGKVDIFIAASGSGGTITGVGRYLKTKNPSVKLICVEPAESPVISGGEPAFHNILGIGPGFVPEILDRSQIDEIVTVTTQEAMDMARRLAREEGLLVGISSGANAAACLKVASREENRGKMIVTMFSSGAERYLNSELFAQVKEECVNVNMTF

SEQ ID NO: 7064 - protein, 341 aa, Glycine max
  peptide (1)..(341): Ceres Seq. ID no. 15221497
  misc_feature (25)..(317): Pfam Name: Pfam Description:  Pyridoxal-phosphate dependent enzyme
  misc_feature (1)..(341): NCBI GI NO: 4574137 NR Description: cysteine synthase [Oryza sativa]
  misc_feature (1)..(341): NCBI GI NO: 4574141 NR Description: cysteine synthase [Oryza sativa]
  misc_feature (1)..(337): NCBI GI NO: 303902 NR Description: cysteine synthase [Spinacia oleracea]
  misc_feature (1)..(337): NCBI GI NO: 12644209 NR Description: CYSTEINE SYNTHASE, CHLOROPLAST PRECURSOR
  misc_feature (1)..(337): NCBI GI NO: 421795 NR Description: cysteine synthase (EC 4
  misc_feature (14)..(337): NCBI GI NO: 11131901 NR Description: Cysteine synthase
  misc_feature (21)..(333): NCBI GI NO: 231970 NR Description: Cysteine synthase
  misc_feature (18)..(337): NCBI GI NO: 2245144 NR Description: O-acetylserine(thiol) lyase [Brassica juncea]
  misc_feature (10)..(334): NCBI GI NO: 11131628 NR Description: Cysteine synthase, chloroplast precursor
  misc_feature (21)..(339): NCBI GI NO: 12081917 NR Description: cytosolic cysteine synthase [Solanum tuberosum]
MEPQEGRKGIPSLLSSQGECIATNITQLIGWTPLIELRNITEKDSIGARLIGKIEPYQPLSSVKDRSALRLIEDAEEKGLITPGITTLLGVTSGNLGIGVAFIAAQKGYKFIALMPAKLSLDKQILMRYLGVEVVLVDAVQHGFKALLDRVEQMKKDVEDVYVLDQFTNPANPDAHFRWTGPEIWKDTAGKVDIFIAASGSGGTITGVGRYLKTKNPSVKLICVEPAESPVISGGEPAFHNILGIGPGFVPEILDRSQIDEIVTVTTQEAMDMARRLAREEGLLVGISSGANAAACLKVASREENRGKMIVTMFSSGAERYLNSELFAQVKEECVNVNMTF

SEQ ID NO: 7065 - protein, 227 aa, Glycine max
  peptide (1)..(227): Ceres Seq. ID no. 15221498
  misc_feature (1)..(203): Pfam Name: Pfam Description:  Pyridoxal-phosphate dependent enzyme
  misc_feature (1)..(227): NCBI GI NO: 4574137 NR Description: cysteine synthase [Oryza sativa]
  misc_feature (1)..(227): NCBI GI NO: 4574141 NR Description: cysteine synthase [Oryza sativa]
  misc_feature (1)..(223): NCBI GI NO: 303902 NR Description: cysteine synthase [Spinacia oleracea]
  misc_feature (1)..(223): NCBI GI NO: 12644209 NR Description: CYSTEINE SYNTHASE, CHLOROPLAST PRECURSOR
  misc_feature (1)..(223): NCBI GI NO: 421795 NR Description: cysteine synthase (EC 4
  misc_feature (1)..(223): NCBI GI NO: 11131901 NR Description: Cysteine synthase
  misc_feature (1)..(219): NCBI GI NO: 231970 NR Description: Cysteine synthase
  misc_feature (1)..(223): NCBI GI NO: 2245144 NR Description: O-acetylserine(thiol) lyase [Brassica juncea]
  misc_feature (1)..(220): NCBI GI NO: 11131628 NR Description: Cysteine synthase, chloroplast precursor
  misc_feature (1)..(225): NCBI GI NO: 12081917 NR Description: cytosolic cysteine synthase [Solanum tuberosum]
MPAKLSLDKQILMRYLGVEVVLVDAVQHGFKALLDRVEQMKKDVEDVYVLDQFTNPANPDAHFRWTGPEIWKDTAGKVDIFIAASGSGGTITGVGRYLKTKNPSVKLICVEPAESPVISGGEPAFHNILGIGPGFVPEILDRSQIDEIVTVTTQEAMDMARRLAREEGLLVGISSGANAAACLKVASREENRGKMIVTMFSSGAERYLNSELFAQVKEECVNVNMTF

SEQ ID NO: 7066 - DNA, 774 bp, Glycine max
  misc_feature (1)..(774): Ceres Seq. ID no. 12610615
atagatagatccatagaagaagggcaggggcagaggcgcggagcagaggaaatcaagaaggcggggaagatcgtcggagcggcgatggaggggtgggacaagggcacgaagagcgtggtgggcgagatcccgctgctgtcgacgcgggcgggcccccgggacggcgatgcgtggcggcagcggctcaaggaggagtaccgcgctctcatcgcctacacctccgtcaacaaggccaaggacaacgactggttccgcatcgccgccgccaacccggagggcacccgctgggagggcacctgctggtacgtccacaacctccgccgctacgagttccccctccagttcgacatccccgtcgcctacccccaggtcgcccccgagatcgagctccccaccctcgacggcaagacccacaagatgtaccgcggggggaagatctgcctcaccgtgcacttcaagccgctgtgggccaagaactgcccgcggttcgggctcgcccacgctctctgcctcggactcgcgccgtggctcgccgcggaggtgcccatcctggtcgactcgggcatggtgaagcacaaggacgatgaggctgctcctgcagatgccgctgctgcgtctggctctgccgctgcctcttagctgcaagacagttacagtatgccttttttgttgtcgctgacagtgacagttacagtatgatggttgtcaaggggattggaggattgaaaatccactcggttgtggactaataagagccagcaatacctatactcg

SEQ ID NO: 7067 - protein, 212 aa, Glycine max
  peptide (1)..(212): Ceres Seq. ID no. 12610616
  misc_feature (29)..(212): NCBI GI NO: 37532272 NR Description: unknown protein
  misc_feature (29)..(202): NCBI GI NO: 18396376 NR Description: expressed protein; protein id: At1g27530
  misc_feature (29)..(202): NCBI GI NO: 24899705 NR Description: Similar to CGI-126 protein [Arabidopsis thaliana]
  misc_feature (33)..(194): NCBI GI NO: 6831734 NR Description: Protein CGI-126 (Protein HSPC155)
  misc_feature (33)..(194): NCBI GI NO: 7705481 NR Description: hypothetical protein HSPC155 [Homo sapiens]
  misc_feature (33)..(194): NCBI GI NO: 13384768 NR Description: RIKEN cDNA 1110021H02; EST AA062310 [Mus musculus]
  misc_feature (33)..(194): NCBI GI NO: 31223805 NR Description: ENSANGP00000010523 [Anopheles gambiae]
  misc_feature (33)..(194): NCBI GI NO: 13528771 NR Description: Similar to hypothetical protein [Homo sapiens]
  misc_feature (33)..(194): NCBI GI NO: 19922352 NR Description: CG8386-PA [Drosophila melanogaster]
  misc_feature (33)..(193): NCBI GI NO: 39590862 NR Description: Hypothetical protein CBG10119
IDRSIEEGQGQRRGAEEIKKAGKIVGAAMEGWDKGTKSVVGEIPLLSTRAGPRDGDAWRQRLKEEYRALIAYTSVNKAKDNDWFRIAAANPEGTRWEGTCWYVHNLRRYEFPLQFDIPVAYPQVAPEIELPTLDGKTHKMYRGGKICLTVHFKPLWAKNCPRFGLAHALCLGLAPWLAAEVPILVDSGMVKHKDDEAAPADAAAASGSAAAS

SEQ ID NO: 7068 - protein, 184 aa, Glycine max
  peptide (1)..(184): Ceres Seq. ID no. 12610617
  misc_feature (1)..(184): NCBI GI NO: 37532272 NR Description: unknown protein
  misc_feature (1)..(174): NCBI GI NO: 18396376 NR Description: expressed protein; protein id: At1g27530
  misc_feature (1)..(174): NCBI GI NO: 24899705 NR Description: Similar to CGI-126 protein [Arabidopsis thaliana]
  misc_feature (5)..(166): NCBI GI NO: 6831734 NR Description: Protein CGI-126 (Protein HSPC155)
  misc_feature (5)..(166): NCBI GI NO: 7705481 NR Description: hypothetical protein HSPC155 [Homo sapiens]
  misc_feature (5)..(166): NCBI GI NO: 13384768 NR Description: RIKEN cDNA 1110021H02; EST AA062310 [Mus musculus]
  misc_feature (5)..(166): NCBI GI NO: 31223805 NR Description: ENSANGP00000010523 [Anopheles gambiae]
  misc_feature (5)..(166): NCBI GI NO: 13528771 NR Description: Similar to hypothetical protein [Homo sapiens]
  misc_feature (5)..(166): NCBI GI NO: 19922352 NR Description: CG8386-PA [Drosophila melanogaster]
  misc_feature (5)..(165): NCBI GI NO: 39590862 NR Description: Hypothetical protein CBG10119
MEGWDKGTKSVVGEIPLLSTRAGPRDGDAWRQRLKEEYRALIAYTSVNKAKDNDWFRIAAANPEGTRWEGTCWYVHNLRRYEFPLQFDIPVAYPQVAPEIELPTLDGKTHKMYRGGKICLTVHFKPLWAKNCPRFGLAHALCLGLAPWLAAEVPILVDSGMVKHKDDEAAPADAAAASGSAAAS

SEQ ID NO: 7069 - protein, 134 aa, Glycine max
  peptide (1)..(134): Ceres Seq. ID no. 12610618
  misc_feature (1)..(128): Pfam Name: Pfam Description:  Glycoprotein GG/GX
  misc_feature (1)..(128): NCBI GI NO: 25989119 NR Description: unknown [Streptomyces aureofaciens]
  misc_feature (1)..(134): NCBI GI NO: 29250753 NR Description: GLP_49_63778_65430 [Giardia lamblia ATCC 50803]
  misc_feature (1)..(127): NCBI GI NO: 28574039 NR Description: Salivary gland secretion 1 CG3047-PA
  misc_feature (1)..(122): NCBI GI NO: 29250753 NR Description: GLP_49_63778_65430 [Giardia lamblia ATCC 50803]
  misc_feature (1)..(134): NCBI GI NO: 38175466 NR Description: putative high-affinity potassium transporter
  misc_feature (1)..(128): NCBI GI NO: 1076211 NR Description: hypothetical protein VSP-3 - Chlamydomonasreinhardtii
  misc_feature (1)..(130): NCBI GI NO: 25143299 NR Description: pre-mRNA splicing SR protein related RSR-1 (68
  misc_feature (5)..(134): NCBI GI NO: 1076205 NR Description: hypothetical protein WP6 - Chlamydomonas eugametos
  misc_feature (1)..(131): NCBI GI NO: 111978 NR Description: mucin - rat
  misc_feature (1)..(133): NCBI GI NO: 25143299 NR Description: pre-mRNA splicing SR protein related RSR-1 (68
MRGGSGSRRSTALSSPTPPSTRPRTTTGSASPPPTRRAPAGRAPAGTSTTSAATSSPSSSTSPSPTPRSPPRSSSPPSTARPTRCTAGGRSASPCTSSRCGPRTARGSGSPTLSASDSRRGSPRRCPSWSTRAW

SEQ ID NO: 7070 - DNA, 784 bp, Glycine max
  misc_feature (1)..(784): Ceres Seq. ID no. 12610253
aaaatgtttgttgtgtctcttctcttcccaaactctcttcttctattccaaagacccttttgaagtaatcgatggagtttcagtctctttccggattctaccttcttctttccttaaccattctcttccttgcaccctttcacgctcaagctaaaattaaagtcacttactgcgataagaaggcagactatcctgtgaaggtgtctggagttgaaatatcaccagaccctgtggagagtggcaagcctgctacctttaagatctcggctacttctagtaaagctatttatggtggagaagttgtaattggagtttcatacgttggggtgcctgtccatactgaaagaattgatctctgtcatgaagtatcctgtcctgttgccaatggcaattttctgatttctcacacccaaacattgccttcgattactccaccgggaccctactctctgaagatgacactgaagaatgatcgggacgaggtgttaacttgcattaagtttaattttaaaattgtttttggatcttttgtgtctgatatgtaaagtgtcctttgcatgcctgatctgggggaacttttttgctttgttgtgaagtgttttattgtattttgtactggatatcacctttcaattcgagtcgtatcttgtaaggccaatgttctctagtgtcagagtaatgtcaatgacattagactcatgatgttgtataaggtccatgactggaaatttttctttctgtatgatttgcacagtacaatccatagttctaaattgcggtcgag

SEQ ID NO: 7071 - protein, 157 aa, Glycine max
  peptide (1)..(157): Ceres Seq. ID no. 12610254
  misc_feature (32)..(148): Pfam Name: Pfam Description:  ML domain
  misc_feature (11)..(154): NCBI GI NO: 15229872 NR Description: putative protein; protein id: At3g44100
  misc_feature (3)..(157): NCBI GI NO: 18399355 NR Description: expressed protein; protein id: At3g11780
  misc_feature (3)..(157): NCBI GI NO: 21554315 NR Description: unknown [Arabidopsis thaliana]
  misc_feature (11)..(152): NCBI GI NO: 34899866 NR Description: OJ1714_H10.15
  misc_feature (6)..(157): NCBI GI NO: 15240063 NR Description: putative protein; protein id: At5g06480
  misc_feature (6)..(157): NCBI GI NO: 21593850 NR Description: unknown [Arabidopsis thaliana]
  misc_feature (11)..(122): NCBI GI NO: 18397991 NR Description: Expressed protein; protein id: At2g16005
  misc_feature (11)..(122): NCBI GI NO: 21618166 NR Description: unknown [Arabidopsis thaliana]
  misc_feature (28)..(142): NCBI GI NO: 32406256 NR Description: hypothetical protein [Neurospora crassa]
  misc_feature (21)..(143): NCBI GI NO: 4322563 NR Description: phosphatidylglycerol/phosphatidylinositol transfer
MEFQSLSGFYLLLSLTILFLAPFHAQAKIKVTYCDKKADYPVKVSGVEISPDPVESGKPATFKISATSSKAIYGGEVVIGVSYVGVPVHTERIDLCHEVSCPVANGNFLISHTQTLPSITPPGPYSLKMTLKNDRDEVLTCIKFNFKIVFGSFVSDM

SEQ ID NO: 7072 - DNA, 615 bp, Glycine max
  misc_feature (1)..(615): Ceres Seq. ID no. 13639061
gtctgacagcgctggccgatcaagctcgctcgctcgcaccgacgacgacgactaggaagaagaggaacggccgatggagcacggcgaggggaggcacgaggcggcgctgagggcggtgcagagggcgccggccaagccgtggcgcggcgccggcgccccgccgccgcccagggtgtaccgggtggagccccgggacttccgggagctcgtgcagaggctcaccggcgccggcacggccacgaccggctcgccggccgtgggagcgaggaaggcgccgggtcatgcggccgcggcgcacgggcgcagggaggccgcccccgtggagcagttcgactactcgtcgtggttctccgcgccgctgctcagccccgcgtccatgccggccggcatggacgcccaccatggcgctctgcggtaggagagttgtggtacggtcgccgctcgccgccactcggcacttgtaaaatcgagctacatgccacagttccatcgcttcttccctcctcgttatttcctttcgagggatgatgacacatgacagtgctttcgctcgtgtacgtaattgagtatagttctttttatgaatataataaatgaattattagtttgctctgc

SEQ ID NO: 7073 - protein, 114 aa, Glycine max
  peptide (1)..(114): Ceres Seq. ID no. 13639062
  misc_feature (6)..(111): NCBI GI NO: 12039291 NR Description: hypothetical protein [Oryza sativa]
  misc_feature (8)..(102): NCBI GI NO: 15227762 NR Description: hypothetical protein [Arabidopsis thaliana]
MEHGEGRHEAALRAVQRAPAKPWRGAGAPPPPRVYRVEPRDFRELVQRLTGAGTATTGSPAVGARKAPGHAAAAHGRREAAPVEQFDYSSWFSAPLLSPASMPAGMDAHHGALR

SEQ ID NO: 7074 - protein, 60 aa, Glycine max
  peptide (1)..(60): Ceres Seq. ID no. 13639063
MRPRRTGAGRPPPWSSSTTRRGSPRRCSAPRPCRPAWTPTMALCGRRVVVRSPLAATRHL

SEQ ID NO: 7075 - DNA, 766 bp, Glycine max
  misc_feature (1)..(766): Ceres Seq. ID no. 12610334
gtttttcctatcctctccctcttcttcatctctcgtatacaatcaaaaccaacacatacagagagacacgaaccaaagagtgcaaaatggcagcgacgtctctctccatcgcaaccacattccgctcctcgtcttacctcactcacgcttctccccatggcttcttcccttcccgacccaacacaacattccgcatctgttcaccttcctccacaccgacccaccgtgcaacccacctccgtcccgtctccgccgtcgaagctccggagaagatcgagaagattgggtccgagatctcttctctgactctcgaggaagcccgcgtcctcgtggactaccttcaggacaagttcggtgtgtcgccgctctcgttagctcccgctgcggcggctgtggctgctccgggagacggtggcggtgcggcggctgcggtggaggagcagacggagttcgacgtggtgattaacgaagtgccgagcagtgcgcgtatcgcggtgattaaagcggtgagggctttgactagcttggcgttgaaggaagcgaaggagcttatcgaagggttgccgaagaagtttaaggaaggtgtgacgaaggatgaagctgaagaagctaagaagcagcttgaagaagctggcgctaaggtctcgattgcttaaagaatgtgtgggtctttttttgctgtgttgttagtatagttggcgaatgagaattgttgattaaatttttgaaaaaaaaaaaaaaaaaagcttatcgataccgtcgacct

SEQ ID NO: 7076 - protein, 217 aa, Glycine max
  peptide (1)..(217): Ceres Seq. ID no. 12610335
  misc_feature (149)..(217): Pfam Name: Pfam Description:  Ribosomal protein L7/L12 C-terminal domain
  misc_feature (29)..(217): NCBI GI NO: 15232274 NR Description: 50S ribosomal protein L12-A; protein id:At3g27830
  misc_feature (29)..(217): NCBI GI NO: 15232276 NR Description: 50S ribosomal protein L12-C; protein id:At3g27850
  misc_feature (29)..(217): NCBI GI NO: 541897 NR Description: ribosomal protein L12
  misc_feature (29)..(217): NCBI GI NO: 21592776 NR Description: 50S ribosomal protein L12-C [Arabidopsis thaliana]
  misc_feature (29)..(216): NCBI GI NO: 15232275 NR Description: 50S ribosomal protein L12-B; protein id:At3g27840
  misc_feature (29)..(216): NCBI GI NO: 541896 NR Description: ribosomal protein L12
  misc_feature (29)..(217): NCBI GI NO: 548746 NR Description: 50S RIBOSOMAL PROTEIN L12, CHLOROPLAST PRECURSOR
  misc_feature (29)..(216): NCBI GI NO: 133085 NR Description: 50S RIBOSOMAL PROTEIN L12, CHLOROPLAST PRECURSOR
  misc_feature (29)..(217): NCBI GI NO: 20020 NR Description: ribosomal protein L12-1a [Nicotiana tabacum]
  misc_feature (29)..(217): NCBI GI NO: 133088 NR Description: 50S RIBOSOMAL PROTEIN L12, CHLOROPLAST PRECURSOR
FSYPLPLLHLSYTIKTNTYRETRTKECKMAATSLSIATTFRSSSYLTHASPHGFFPSRPNTTFRICSPSSTPTHRATHLRPVSAVEAPEKIEKIGSEISSLTLEEARVLVDYLQDKFGVSPLSLAPAAAAVAAPGDGGGAAAAVEEQTEFDVVINEVPSSARIAVIKAVRALTSLALKEAKELIEGLPKKFKEGVTKDEAEEAKKQLEEAGAKVSIA

SEQ ID NO: 7077 - protein, 189 aa, Glycine max
  peptide (1)..(189): Ceres Seq. ID no. 12610336
  misc_feature (121)..(189): Pfam Name: Pfam Description:  Ribosomal protein L7/L12 C-terminal domain
  misc_feature (1)..(189): NCBI GI NO: 15232274 NR Description: 50S ribosomal protein L12-A; protein id:At3g27830
  misc_feature (1)..(189): NCBI GI NO: 15232276 NR Description: 50S ribosomal protein L12-C; protein id:At3g27850
  misc_feature (1)..(189): NCBI GI NO: 541897 NR Description: ribosomal protein L12
  misc_feature (1)..(189): NCBI GI NO: 21592776 NR Description: 50S ribosomal protein L12-C [Arabidopsis thaliana]
  misc_feature (1)..(188): NCBI GI NO: 15232275 NR Description: 50S ribosomal protein L12-B; protein id:At3g27840
  misc_feature (1)..(188): NCBI GI NO: 541896 NR Description: ribosomal protein L12
  misc_feature (1)..(189): NCBI GI NO: 548746 NR Description: 50S RIBOSOMAL PROTEIN L12, CHLOROPLAST PRECURSOR
  misc_feature (1)..(188): NCBI GI NO: 133085 NR Description: 50S RIBOSOMAL PROTEIN L12, CHLOROPLAST PRECURSOR
  misc_feature (1)..(189): NCBI GI NO: 20020 NR Description: ribosomal protein L12-1a [Nicotiana tabacum]
  misc_feature (1)..(189): NCBI GI NO: 133088 NR Description: 50S RIBOSOMAL PROTEIN L12, CHLOROPLAST PRECURSOR
MAATSLSIATTFRSSSYLTHASPHGFFPSRPNTTFRICSPSSTPTHRATHLRPVSAVEAPEKIEKIGSEISSLTLEEARVLVDYLQDKFGVSPLSLAPAAAAVAAPGDGGGAAAAVEEQTEFDVVINEVPSSARIAVIKAVRALTSLALKEAKELIEGLPKKFKEGVTKDEAEEAKKQLEEAGAKVSIA

SEQ ID NO: 7078 - protein, 154 aa, Glycine max
  peptide (1)..(154): Ceres Seq. ID no. 12610337
FFLSSPSSSSLVYNQNQHIQRDTNQRVQNGSDVSLHRNHIPLLVLPHSRFSPWLLPFPTQHNIPHLFTFLHTDPPCNPPPSRLRRRSSGEDREDWVRDLFSDSRGSPRPRGLPSGQVRCVAALVSSRCGGCGCSGRRWRCGGCGGGADGVRRGD

SEQ ID NO: 7079 - DNA, 1087 bp, Glycine max
  misc_feature (1)..(1087): Ceres Seq. ID no. 13595050
accagctccatcgcaagggacaatactaccactctagccacttactactggagctagcaggcgccaccccacccaccaaccaacgacaacgagcgcgccgcgagcgcacgccggagcaagcatgtcgatgtcggtgtccatgtccgggaaggcgagcgacccgggttccgcctggttcggcggcggcagcaggagcccgcaaccggggccgacgcacaacgtgcggctcatcgccatggccgttgccgcgttcgtctccgtgctcggcctctccctgctcctgcacctctacatctgccgcgtccgccgcaggaaccgcaggcaggcggaggcagccgcggcggctctggaggccggctcggcggcccccaagccggccaaggttggcctggacccgtccgccatcgcggcgctgccgacagcggcgtacaaggagacgggcgagccgggcagcggcgcaagcgagtgcaccatctgcctcggcgccatgcaggagggcgaggcggtgcgcgtgctgccggcctgcgcccacgtgttccacgtcccctgcgtcgacacgtggctcgcgtccagctcgtcgtgcccggtctgccgcgccctggtggagccgccgccgtcgccggccgcgccagcgtgggtgcaggagaagcagggcctggagaaggagtgtggtgcaagtgggagctcggcgccgccatgtgggctgggggcgtcgctgatgaggatgctgagcagggagaggccgctggcgcggaggccgacgcagggtgaccacgcgcacccgatggaaatgcatgtcgaggacttggaaagccagcagccccagctgcaacactctgtggatagcaattagtctacttttctgttcttcttttttgggttttcgccattcgccgctgctcgattgcaaatcttgcatttgggtggccgattcagaggtgtgaaatacggaaatacacccctgaaagtgtcctatgttttaattaggcactggcgcttgtggatgtgcttggagctcacccatatctctcgtatttgtgcaaacaagggatcatggatatataaatagagctccgttttctcttcc

SEQ ID NO: 7080 - protein, 243 aa, Glycine max
  peptide (1)..(243): Ceres Seq. ID no. 13595051
  misc_feature (116)..(157): Pfam Name: RING finger Pfam Description: Zinc finger, C3HC4 type
  misc_feature (1)..(237): NCBI GI NO: 34909640 NR Description: P0503C12.20
  misc_feature (19)..(230): NCBI GI NO: 15227929 NR Description: RING zinc finger protein -related
  misc_feature (35)..(197): NCBI GI NO: 34903920 NR Description: OSJNBa0038J17.5
  misc_feature (35)..(192): NCBI GI NO: 38569180 NR Description: OSJNBa0086B14.4
  misc_feature (36)..(189): NCBI GI NO: 4928401 NR Description: RING-H2 zinc finger protein ATL5
  misc_feature (36)..(189): NCBI GI NO: 15228830 NR Description: RING-H2 zinc finger protein ATL5
  misc_feature (14)..(163): NCBI GI NO: 34903930 NR Description: OSJNBa0038J17.10
  misc_feature (1)..(188): NCBI GI NO: 34907826 NR Description: P0485B12.26
  misc_feature (41)..(163): NCBI GI NO: 15233714 NR Description: zinc finger
  misc_feature (34)..(210): NCBI GI NO: 21593806 NR Description: putative RING zinc finger protein
MSMSVSMSGKASDPGSAWFGGGSRSPQPGPTHNVRLIAMAVAAFVSVLGLSLLLHLYICRVRRRNRRQAEAAAAALEAGSAAPKPAKVGLDPSAIAALPTAAYKETGEPGSGASECTICLGAMQEGEAVRVLPACAHVFHVPCVDTWLASSSSCPVCRALVEPPPSPAAPAWVQEKQGLEKECGASGSSAPPCGLGASLMRMLSRERPLARRPTQGDHAHPMEMHVEDLESQQPQLQHSVDSN

SEQ ID NO: 7081 - protein, 241 aa, Glycine max
  peptide (1)..(241): Ceres Seq. ID no. 13595052
  misc_feature (114)..(155): Pfam Name: RING finger Pfam Description: Zinc finger, C3HC4 type
  misc_feature (1)..(235): NCBI GI NO: 34909640 NR Description: P0503C12.20
  misc_feature (17)..(228): NCBI GI NO: 15227929 NR Description: RING zinc finger protein -related
  misc_feature (33)..(195): NCBI GI NO: 34903920 NR Description: OSJNBa0038J17.5
  misc_feature (33)..(190): NCBI GI NO: 38569180 NR Description: OSJNBa0086B14.4
  misc_feature (34)..(187): NCBI GI NO: 4928401 NR Description: RING-H2 zinc finger protein ATL5
  misc_feature (34)..(187): NCBI GI NO: 15228830 NR Description: RING-H2 zinc finger protein ATL5
  misc_feature (12)..(161): NCBI GI NO: 34903930 NR Description: OSJNBa0038J17.10
  misc_feature (1)..(186): NCBI GI NO: 34907826 NR Description: P0485B12.26
  misc_feature (39)..(161): NCBI GI NO: 15233714 NR Description: zinc finger
  misc_feature (32)..(208): NCBI GI NO: 21593806 NR Description: putative RING zinc finger protein
MSVSMSGKASDPGSAWFGGGSRSPQPGPTHNVRLIAMAVAAFVSVLGLSLLLHLYICRVRRRNRRQAEAAAAALEAGSAAPKPAKVGLDPSAIAALPTAAYKETGEPGSGASECTICLGAMQEGEAVRVLPACAHVFHVPCVDTWLASSSSCPVCRALVEPPPSPAAPAWVQEKQGLEKECGASGSSAPPCGLGASLMRMLSRERPLARRPTQGDHAHPMEMHVEDLESQQPQLQHSVDSN

SEQ ID NO: 7082 - protein, 238 aa, Glycine max
  peptide (1)..(238): Ceres Seq. ID no. 13595053
  misc_feature (119)..(221): Pfam Name: Pfam Description:  Cupin
  misc_feature (30)..(221): NCBI GI NO: 37530468 NR Description: hypothetical protein
QLHRKGQYYHSSHLLLELAGATPPTNQRQRARRERTPEQACRCRCPCPGRRATRVPPGSAAAAGARNRGRRTTCGSSPWPLPRSSPCSASPCSCTSTSAASAAGTAGRRRQPRRLWRPARRPPSRPRLAWTRPPSRRCRQRRTRRRASRAAAQASAPSASAPCRRARRCACCRPAPTCSTSPASTRGSRPARRARSAAPWWSRRRRRPRQRGCRRSRAWRRSVVQVGARRRHVGWGRR

SEQ ID NO: 7083 - DNA, 782 bp, Glycine max
  misc_feature (1)..(782): Ceres Seq. ID no. 12611019
aacaaacccctcacccctcgcccccgccgcccccgcccccgccgccaaacacccatcgccatgcggccaccgagaggcggcggaggtttccgcggacgcggcggcgaccgaggtggccgcttcggtggaggcggccgcggcggcggcggtaggggccgcttcggtggaggcggcggcgggttccgcgacgagggccctccagccgaggtcgtcgaggtgtcgacgttcctgcacgcctgcgagggggacgcggtaacgaagctgacgaacgagaaagtgccctacttcaacgcgcccatatacctccagaacaagacccagatcggcaaagtcgacgagatcttcggccccatcaacgaatcatatttctcggtcaagatgttcgagggagtcattgcaacatcttacaacgaaggtgacaagttcttcattgaccccatgaagctgctgcccctctcacgcttcctgccgcagccaaagggctcgactccaagaggtggtggtcgcggtggaagaggtggtggtcgcggtggaagaggtggccgtggtggattccgtggaagaggtgcaccaaggggtcgtggacctcccaggggtggagggcgtggtttcagaggacgaggcagattctaggatgtagttttaagtttgctgattgttgaaacatgatgctctacattatctgttcagctggaaacattatgctaagtcagctgcaagcgcactttgtgtggaagttgattcaatatttgtatgaatgaaatgttgtcaagtgttgagtt

SEQ ID NO: 7084 - protein, 210 aa, Glycine max
  peptide (1)..(210): Ceres Seq. ID no. 12611020
  misc_feature (63)..(163): Pfam Name: Pfam Description:  Gar1 protein RNA binding region
  misc_feature (21)..(210): NCBI GI NO: 18396707 NR Description: putative GAR1 protein; protein id: At3g03920
  misc_feature (21)..(210): NCBI GI NO: 21536739 NR Description: putative GAR1 protein [Arabidopsis thaliana]
  misc_feature (21)..(210): NCBI GI NO: 6006850 NR Description: putative GAR1 protein [Arabidopsis thaliana]
  misc_feature (21)..(209): NCBI GI NO: 15238764 NR Description: putative protein; protein id: At5g18180.1
  misc_feature (26)..(208): NCBI GI NO: 13384710 NR Description: nucleolar protein family A, member 1
  misc_feature (25)..(208): NCBI GI NO: 18256903 NR Description: Similar to nucleolar protein family A, member 1
  misc_feature (26)..(208): NCBI GI NO: 26344814 NR Description: unnamed protein product [Mus musculus]
  misc_feature (26)..(208): NCBI GI NO: 9506713 NR Description: nucleolar protein family A, member 1; GAR1 protein
  misc_feature (26)..(208): NCBI GI NO: 28913737 NR Description: Similar to nucleolar protein family A, member 1
  misc_feature (25)..(208): NCBI GI NO: 9506713 NR Description: nucleolar protein family A, member 1; GAR1 protein
NKPLTPRPRRPRPRRQTPIAMRPPRGGGGFRGRGGDRGGRFGGGGRGGGGRGRFGGGGGGFRDEGPPAEVVEVSTFLHACEGDAVTKLTNEKVPYFNAPIYLQNKTQIGKVDEIFGPINESYFSVKMFEGVIATSYNEGDKFFIDPMKLLPLSRFLPQPKGSTPRGGGRGGRGGGRGGRGGRGGFRGRGAPRGRGPPRGGGRGFRGRGRF

SEQ ID NO: 7085 - protein, 190 aa, Glycine max
  peptide (1)..(190): Ceres Seq. ID no. 12611021
  misc_feature (43)..(143): Pfam Name: Pfam Description:  Gar1 protein RNA binding region
  misc_feature (1)..(190): NCBI GI NO: 18396707 NR Description: putative GAR1 protein; protein id: At3g03920
  misc_feature (1)..(190): NCBI GI NO: 21536739 NR Description: putative GAR1 protein [Arabidopsis thaliana]
  misc_feature (1)..(190): NCBI GI NO: 6006850 NR Description: putative GAR1 protein [Arabidopsis thaliana]
  misc_feature (1)..(189): NCBI GI NO: 15238764 NR Description: putative protein; protein id: At5g18180.1
  misc_feature (6)..(188): NCBI GI NO: 13384710 NR Description: nucleolar protein family A, member 1
  misc_feature (5)..(188): NCBI GI NO: 18256903 NR Description: Similar to nucleolar protein family A, member 1
  misc_feature (6)..(188): NCBI GI NO: 26344814 NR Description: unnamed protein product [Mus musculus]
  misc_feature (6)..(188): NCBI GI NO: 9506713 NR Description: nucleolar protein family A, member 1; GAR1 protein
  misc_feature (6)..(188): NCBI GI NO: 28913737 NR Description: Similar to nucleolar protein family A, member 1
  misc_feature (5)..(188): NCBI GI NO: 9506713 NR Description: nucleolar protein family A, member 1; GAR1 protein
MRPPRGGGGFRGRGGDRGGRFGGGGRGGGGRGRFGGGGGGFRDEGPPAEVVEVSTFLHACEGDAVTKLTNEKVPYFNAPIYLQNKTQIGKVDEIFGPINESYFSVKMFEGVIATSYNEGDKFFIDPMKLLPLSRFLPQPKGSTPRGGGRGGRGGGRGGRGGRGGFRGRGAPRGRGPPRGGGRGFRGRGRF

SEQ ID NO: 7086 - DNA, 852 bp, Glycine max
  misc_feature (1)..(852): Ceres Seq. ID no. 12610648
tcccacaacaccccacccgcccctctccccctccccaatctccgacccgaaccccagcggcggagccgacgaagaggaggagaccaaggctcgacggacaaggggaagacctccgctccctcggcgatcgcgacaccaccctcctcatcaagatggtgctgatgcaggcagatccgttcctgagcgagctgaccaacatgtacgagcggagcacggagaagggctccgtgtgggtcaccatgaagcgatcgtcgatgaagtgtcaggctaggttgaagaagatggcgagtaagggggagcctgttgagtaccggtgcctggtccgcgccactgatggcaagaggaacatctccacctcgctgtctgcaaaggagtatctgaaattccaagcttcatatgccctggtccttaaagcccatatgcacgctttgaagaagagggagaggaaggacaggaagaagacggtcgaggcagagaagatacccgagaaggaaccgaagaagcagaagaaatcatcttcgaaaaaatccgcagggtctaagtagtgaggtacttgcagaatttgactgagacctttttcgcccacatgtgcggtcaagacgttgtcacccgttttacccttaattcatgtccgcgagatgaagcctgtgaatacctatatagagacgcctcgtcgcctggcatttttgaagctgcgttttgttctggttgtaagcctccctggatggcatgggcatgctttcttgaactgctagatctgaccaccaaagtcttagttcaggttggaatggttcgccggtttgatggttttatgcctatggtatgaatgaagaatctgtagcttggttgttg

SEQ ID NO: 7087 - protein, 180 aa, Glycine max
  peptide (1)..(180): Ceres Seq. ID no. 12610649
  misc_feature (54)..(143): Pfam Name: Pfam Description:  Signal recognition particle 14kD protein
  misc_feature (51)..(180): NCBI GI NO: 6094345 NR Description: SIGNAL RECOGNITION PARTICLE 14 KD PROTEIN (SRP14)
  misc_feature (51)..(170): NCBI GI NO: 6175053 NR Description: Signal recognition particle 14 kDa protein (SRP14)
  misc_feature (51)..(170): NCBI GI NO: 15224325 NR Description: putative signal recognition particle protein 14kD
  misc_feature (50)..(179): NCBI GI NO: 5107800 NR Description: Signal Recognition Particle Alu Rna BindingHeterodimer
  misc_feature (51)..(153): NCBI GI NO: 6678133 NR Description: signal recognition particle
  misc_feature (51)..(157): NCBI GI NO: 1082198 NR Description: Alu RNA-binding protein - human
  misc_feature (51)..(157): NCBI GI NO: 586035 NR Description: Signal recognition particle 14 kDa protein
  misc_feature (51)..(157): NCBI GI NO: 31543653 NR Description: signal recognition particle 14kDa
  misc_feature (52)..(154): NCBI GI NO: 11513833 NR Description: Chain B
  misc_feature (51)..(153): NCBI GI NO: 2507409 NR Description: SIGNAL RECOGNITION PARTICLE 14 KD PROTEIN (SRP14)
PQHPTRPSPPPQSPTRTPAAEPTKRRRPRLDGQGEDLRSLGDRDTTLLIKMVLMQADPFLSELTNMYERSTEKGSVWVTMKRSSMKCQARLKKMASKGEPVEYRCLVRATDGKRNISTSLSAKEYLKFQASYALVLKAHMHALKKRERKDRKKTVEAEKIPEKEPKKQKKSSSKKSAGSK

SEQ ID NO: 7088 - protein, 130 aa, Glycine max
  peptide (1)..(130): Ceres Seq. ID no. 12610650
  misc_feature (4)..(93): Pfam Name: Pfam Description:  Signal recognition particle 14kD protein
  misc_feature (1)..(130): NCBI GI NO: 6094345 NR Description: SIGNAL RECOGNITION PARTICLE 14 KD PROTEIN (SRP14)
  misc_feature (1)..(120): NCBI GI NO: 6175053 NR Description: Signal recognition particle 14 kDa protein (SRP14)
  misc_feature (1)..(120): NCBI GI NO: 15224325 NR Description: putative signal recognition particle protein 14kD
  misc_feature (1)..(129): NCBI GI NO: 5107800 NR Description: Signal Recognition Particle Alu Rna BindingHeterodimer
  misc_feature (1)..(103): NCBI GI NO: 6678133 NR Description: signal recognition particle
  misc_feature (1)..(107): NCBI GI NO: 1082198 NR Description: Alu RNA-binding protein - human
  misc_feature (1)..(107): NCBI GI NO: 586035 NR Description: Signal recognition particle 14 kDa protein
  misc_feature (1)..(107): NCBI GI NO: 31543653 NR Description: signal recognition particle 14kDa
  misc_feature (2)..(104): NCBI GI NO: 11513833 NR Description: Chain B
  misc_feature (1)..(103): NCBI GI NO: 2507409 NR Description: SIGNAL RECOGNITION PARTICLE 14 KD PROTEIN (SRP14)
MVLMQADPFLSELTNMYERSTEKGSVWVTMKRSSMKCQARLKKMASKGEPVEYRCLVRATDGKRNISTSLSAKEYLKFQASYALVLKAHMHALKKRERKDRKKTVEAEKIPEKEPKKQKKSSSKKSAGSK

SEQ ID NO: 7089 - protein, 127 aa, Glycine max
  peptide (1)..(127): Ceres Seq. ID no. 12610651
  misc_feature (1)..(90): Pfam Name: Pfam Description:  Signal recognition particle 14kD protein
  misc_feature (1)..(127): NCBI GI NO: 6094345 NR Description: SIGNAL RECOGNITION PARTICLE 14 KD PROTEIN (SRP14)
  misc_feature (1)..(117): NCBI GI NO: 6175053 NR Description: Signal recognition particle 14 kDa protein (SRP14)
  misc_feature (1)..(117): NCBI GI NO: 15224325 NR Description: putative signal recognition particle protein 14kD
  misc_feature (1)..(126): NCBI GI NO: 5107800 NR Description: Signal Recognition Particle Alu Rna BindingHeterodimer
  misc_feature (1)..(100): NCBI GI NO: 6678133 NR Description: signal recognition particle
  misc_feature (1)..(104): NCBI GI NO: 1082198 NR Description: Alu RNA-binding protein - human
  misc_feature (1)..(104): NCBI GI NO: 586035 NR Description: Signal recognition particle 14 kDa protein
  misc_feature (1)..(104): NCBI GI NO: 31543653 NR Description: signal recognition particle 14kDa
  misc_feature (1)..(101): NCBI GI NO: 11513833 NR Description: Chain B
  misc_feature (1)..(100): NCBI GI NO: 2507409 NR Description: SIGNAL RECOGNITION PARTICLE 14 KD PROTEIN (SRP14)
MQADPFLSELTNMYERSTEKGSVWVTMKRSSMKCQARLKKMASKGEPVEYRCLVRATDGKRNISTSLSAKEYLKFQASYALVLKAHMHALKKRERKDRKKTVEAEKIPEKEPKKQKKSSSKKSAGSK

SEQ ID NO: 7090 - DNA, 975 bp, Glycine max
  misc_feature (1)..(975): Ceres Seq. ID no. 13595166
agaacatcctaatcgaataattttcccttgttcgagttttctcaggaaagctagtagagagagatactggttttgattcatacgatggctgccacagctattctccgatcgatccgccgacgcgacgtcgtctctgcgcctctttccgtctacaaatctcttgctggtaatgctcaaccttcattgggttcgtacactggtcagaactatgcaagtttgtgtagagctttcggatcgagagccggtgtgaatgaaaatgttgggactggttttggaactagcaacataagcaatgccgttagagaggagagagagcattcaaaagctactgtgaatgctatgggagctcatctgagagctcttggtgtgggaacaccaagacgtgtgttgtctacaatcgccgagggtatcaagatgacagaggaggaccagacttctccaaaaccccaaagctttcgccctctatctcctcacctcacggtttaccagcctcagaagaactcaatgttatccattttcaacagaatctcggggatttacttgaccggagtcttttatggcggctatcttctctacctgaagatgggtatgatctgcctcacttacccggctttctaccaagttcattaccatgtacagcagcaacttccggttatcacctcggttactgcattggccgcgctttaccatactatcaagagtattcactcgctcttgacccattgaagcaacatttcccctaagctcttttcgttgtttggttaagccaccagagtctccagtaagagtttccttgagatgcacaagatttaataaaagagagttagaaacgtttgttaaactctcattgtcttttgagaaagcaagtgtctagcttttgttttgggattttaggctttgaaaacttatgtttgttggctttttctttgttctaagaccttattgatggggttggaatgtaataaaatgtttacc

SEQ ID NO: 7091 - protein, 213 aa, Glycine max
  peptide (1)..(213): Ceres Seq. ID no. 15221501
  misc_feature (1)..(213): NCBI GI NO: 11022654 NR Description: gene_id:MTH16
  misc_feature (1)..(213): NCBI GI NO: 15236709 NR Description: expressed protein [Arabidopsis thaliana]
  misc_feature (1)..(213): NCBI GI NO: 15242460 NR Description: expressed protein [Arabidopsis thaliana]
  misc_feature (1)..(213): NCBI GI NO: 21593777 NR Description: unknown [Arabidopsis thaliana]
  misc_feature (53)..(210): NCBI GI NO: 14861486 NR Description: succinate dehydrogenase subunit 3 [Glycine max]
  misc_feature (120)..(211): NCBI GI NO: 14861484 NR Description: succinate dehydrogenase subunit 3
  misc_feature (125)..(212): NCBI GI NO: 15004510 NR Description: succinate dehydrogenase subunit 3
  misc_feature (133)..(212): NCBI GI NO: 15004512 NR Description: succinate dehydrogenase subunit 3
  misc_feature (133)..(212): NCBI GI NO: 15004516 NR Description: succinate dehydrogenase subunit 3
  misc_feature (133)..(210): NCBI GI NO: 15004514 NR Description: succinate dehydrogenase subunit 3
MAATAILRSIRRRDVVSAPLSVYKSLAGNAQPSLGSYTGQNYASLCRAFGSRAGVNENVGTGFGTSNISNAVREEREHSKATVNAMGAHLRALGVGTPRRVLSTIAEGIKMTEEDQTSPKPQSFRPLSPHLTVYQPQKNSMLSIFNRISGIYLTGVFYGGYLLYLKMGMICLTYPAFYQVHYHVQQQLPVITSVTALAALYHTIKSIHSLLTH

SEQ ID NO: 7092 - protein, 128 aa, Glycine max
  peptide (1)..(128): Ceres Seq. ID no. 15221502
  misc_feature (1)..(128): NCBI GI NO: 11022654 NR Description: gene_id:MTH16
  misc_feature (1)..(128): NCBI GI NO: 15236709 NR Description: expressed protein [Arabidopsis thaliana]
  misc_feature (1)..(128): NCBI GI NO: 15242460 NR Description: expressed protein [Arabidopsis thaliana]
  misc_feature (1)..(128): NCBI GI NO: 21593777 NR Description: unknown [Arabidopsis thaliana]
  misc_feature (1)..(125): NCBI GI NO: 14861486 NR Description: succinate dehydrogenase subunit 3 [Glycine max]
  misc_feature (35)..(126): NCBI GI NO: 14861484 NR Description: succinate dehydrogenase subunit 3
  misc_feature (40)..(127): NCBI GI NO: 15004510 NR Description: succinate dehydrogenase subunit 3
  misc_feature (48)..(127): NCBI GI NO: 15004512 NR Description: succinate dehydrogenase subunit 3
  misc_feature (48)..(127): NCBI GI NO: 15004516 NR Description: succinate dehydrogenase subunit 3
  misc_feature (48)..(125): NCBI GI NO: 15004514 NR Description: succinate dehydrogenase subunit 3
MGAHLRALGVGTPRRVLSTIAEGIKMTEEDQTSPKPQSFRPLSPHLTVYQPQKNSMLSIFNRISGIYLTGVFYGGYLLYLKMGMICLTYPAFYQVHYHVQQQLPVITSVTALAALYHTIKSIHSLLTH

SEQ ID NO: 7093 - DNA, 815 bp, Glycine max
  misc_feature (1)..(815): Ceres Seq. ID no. 13595054
aacacaacttactcatcctcatcaagcagcacagcyccmstmctagtaagtagcmgcacttyatyrtgtttaacartgatctagctaagagacacacacagtgcacgtgaaatggctcggctggtcggtgccgccggcgcgtgcgcgctcctcgtcatcctgctcatggcgtgcgcggcgtccgcagcgcgcagcgagccaggcgccgcgcggcagctgtgggacgacgggaggaaggtggggggacggacggaggtgacggacgtggagggcgacagggaggtgcaggagctggggcgatactccgtcgaagagcacaaccggcgccgggaggagggctgcgagggcggcggcggtgtctgcggccggctggagttcgcccgcgtggtgtcggcgcagcgccaggtggtctccggaatcaagtactacctccgcgtcgcggccgccgaggaaggtggcgcggggagcaacggcgtcaccgacggccgcgtgttcgacgccgtggtggtcgtgaagccctggctccagtcccgcgctctgatcaggttcgcgtcggccgacgccaaatgagcagctgcatgcgcgatccgacgagaaccgctgcgtgtcttctttgcgcgccagagtacgtaatgtaagctcgaataacggagtgtgaggtaccgaggtagggttgagcgccagagtatggagaatgtatgtacgatgcggcggtcgaagttttgtgaggtctcccggataaaaagttttgcaagaagagatgagagtgtcgaaataaatactaactagtatgacaagactgttttttcccctgt

SEQ ID NO: 7094 - protein, 152 aa, Glycine max
  peptide (1)..(152): Ceres Seq. ID no. 15221466
  misc_feature (5)..(149): NCBI GI NO: 34906946 NR Description: cysteine proteinase inhibitor Scb-like protein
  misc_feature (40)..(147): NCBI GI NO: 27728729 NR Description: cystatin [Malus x domestica]
  misc_feature (7)..(147): NCBI GI NO: 7438233 NR Description: cysteine proteinase inhibitor
  misc_feature (43)..(146): NCBI GI NO: 15225164 NR Description: cysteine proteinase inhibitor B
  misc_feature (43)..(146): NCBI GI NO: 21593036 NR Description: putative cysteine proteinase inhibitor B
  misc_feature (44)..(149): NCBI GI NO: 1706277 NR Description: CYSTEINE PROTEINASE INHIBITOR B (CYSTATIN B) (SCB)
  misc_feature (44)..(149): NCBI GI NO: 7438236 NR Description: cysteine proteinase inhibitor - common sunflower
  misc_feature (43)..(146): NCBI GI NO: 7488656 NR Description: cysteine proteinase inhibitor
  misc_feature (42)..(150): NCBI GI NO: 15238128 NR Description: expressed protein [Arabidopsis thaliana]
  misc_feature (42)..(150): NCBI GI NO: 21592712 NR Description: cystatin-like protein [Arabidopsis thaliana]
MARLVGAAGACALLVILLMACAASAARSEPGAARQLWDDGRKVGGRTEVTDVEGDREVQELGRYSVEEHNRRREEGCEGGGGVCGRLEFARVVSAQRQVVSGIKYYLRVAAAEEGGAGSNGVTDGRVFDAVVVVKPWLQSRALIRFASADAK

SEQ ID NO: 7095 - protein, 134 aa, Glycine max
  peptide (1)..(134): Ceres Seq. ID no. 15221467
  misc_feature (1)..(131): NCBI GI NO: 34906946 NR Description: cysteine proteinase inhibitor Scb-like protein
  misc_feature (22)..(129): NCBI GI NO: 27728729 NR Description: cystatin [Malus x domestica]
  misc_feature (1)..(129): NCBI GI NO: 7438233 NR Description: cysteine proteinase inhibitor
  misc_feature (25)..(128): NCBI GI NO: 15225164 NR Description: cysteine proteinase inhibitor B
  misc_feature (25)..(128): NCBI GI NO: 21593036 NR Description: putative cysteine proteinase inhibitor B
  misc_feature (26)..(131): NCBI GI NO: 1706277 NR Description: CYSTEINE PROTEINASE INHIBITOR B (CYSTATIN B) (SCB)
  misc_feature (26)..(131): NCBI GI NO: 7438236 NR Description: cysteine proteinase inhibitor - common sunflower
  misc_feature (25)..(128): NCBI GI NO: 7488656 NR Description: cysteine proteinase inhibitor
  misc_feature (24)..(132): NCBI GI NO: 15238128 NR Description: expressed protein [Arabidopsis thaliana]
  misc_feature (24)..(132): NCBI GI NO: 21592712 NR Description: cystatin-like protein [Arabidopsis thaliana]
MACAASAARSEPGAARQLWDDGRKVGGRTEVTDVEGDREVQELGRYSVEEHNRRREEGCEGGGGVCGRLEFARVVSAQRQVVSGIKYYLRVAAAEEGGAGSNGVTDGRVFDAVVVVKPWLQSRALIRFASADAK

SEQ ID NO: 7096 - DNA, 1358 bp, Glycine max
  misc_feature (1)..(1358): Ceres Seq. ID no. 15177012
accaatcccctccccgacctcgtgggttgcagaacccagccccagccccattcacaccctcccgtcttccttcctcctcccgcaccataccatcaaggtgcttgtctgcttggggccttgagggacataggaagaaagaggggaggacatggatcggtacgaggtggtgagggacatcgggtccggcaacttcggggtggccaagctggtgcgggacgtccggaccaaggagcacttcgccgtcaagttcatcgagcgaggccacaagattgatgaacatgttcaaagggagattatgaaccaccggtcactcaagcatccaaatattattcgattcaaggaggtcgtgctaactcccacacatttggcaatagttatggaatatgcctctggcggcgagctatttcaaaggatttgcaacgcagggagatttagcgaggatgagggaagattcttcttccaacaattgatttctggagtgagctattgtcactctatgcaagtatgtcatagagatttgaaactagaaaacactctcttggatggtagtgtcgcacctcggctcaagatttgtgacttcggttactccaagtcttctgtcttgcactctcaaccgaagtcaactgtcggcacaccggcatacatcgccccagaggtcctctctagaagagaatatgatggaaaggtcgccgatgtttggtcatgcggagtaacgctctatgtgatgcttgtcggggcatatcctttcgaggaccctgatgagccaaggaacttccgcaaaacgatcactaggatactcagcgtacagtactctgttccggactacgttcgagtctcgatggactgcatacatctactgtcccgcattttcgttggaaatcctcagcagcgaataaccatcccggagatcaagaaccatccatggttcctcaagagattgcccgttgagatgaccgatgagtaccaaaggagcatgcagctggcagacatgaacacgccgtcacagagcctggaagaagccatggcgatcatccaggaggcgcagaaacctggcgataacgccctaggggttgccgggcaggttgcctgcctggggagcatggatttggacgacatcgatttcgatatcgacgacattgacgttgagagcagcggggatttcgtgtgcccgttgtgattgctcatgagtggttcaaaagttctcttgatggtttgcctgtggatggatccctgttttgtcatgcttccactagattttgttctgggtcacaaattctctgtagcctacagattggcttgatgtgtaaacagtgtaagataagtttacatgcttatatcgaaatcagtagttttaccct

SEQ ID NO: 7097 - protein, 342 aa, Glycine max
  peptide (1)..(342): Ceres Seq. ID no. 15177013
  misc_feature (4)..(260): Pfam Name: Pfam Description:  Protein kinase domain
  misc_feature (1)..(336): NCBI GI NO: 2055374 NR Description: serine-threonine protein kinase
  misc_feature (1)..(342): NCBI GI NO: 14588571 NR Description: protein kinase HvPKABA1
  misc_feature (11)..(342): NCBI GI NO: 416564 NR Description: Abcisic acid-inducible protein kinase
  misc_feature (1)..(342): NCBI GI NO: 29164823 NR Description: abcisic acid-inducible protein kinanase
  misc_feature (1)..(342): NCBI GI NO: 34906840 NR Description: putative protein kinase HvPKABA1
  misc_feature (11)..(342): NCBI GI NO: 11138330 NR Description: putative serine/threonine kinase GDBrPK
  misc_feature (1)..(342): NCBI GI NO: 481002 NR Description: protein kinase MCPK9 (EC 2
  misc_feature (1)..(339): NCBI GI NO: 18418337 NR Description: protein kinase, putative [Arabidopsis thaliana]
  misc_feature (1)..(342): NCBI GI NO: 15218270 NR Description: serine/threonine protein kinase, putative
  misc_feature (3)..(341): NCBI GI NO: 7446371 NR Description: probable serine/threonine kinase (EC 2
MDRYEVVRDIGSGNFGVAKLVRDVRTKEHFAVKFIERGHKIDEHVQREIMNHRSLKHPNIIRFKEVVLTPTHLAIVMEYASGGELFQRICNAGRFSEDEGRFFFQQLISGVSYCHSMQVCHRDLKLENTLLDGSVAPRLKICDFGYSKSSVLHSQPKSTVGTPAYIAPEVLSRREYDGKVADVWSCGVTLYVMLVGAYPFEDPDEPRNFRKTITRILSVQYSVPDYVRVSMDCIHLLSRIFVGNPQQRITIPEIKNHPWFLKRLPVEMTDEYQRSMQLADMNTPSQSLEEAMAIIQEAQKPGDNALGVAGQVACLGSMDLDDIDFDIDDIDVESSGDFVCPL

SEQ ID NO: 7098 - protein, 293 aa, Glycine max
  peptide (1)..(293): Ceres Seq. ID no. 15177014
  misc_feature (1)..(211): Pfam Name: Pfam Description:  Protein kinase domain
  misc_feature (1)..(287): NCBI GI NO: 2055374 NR Description: serine-threonine protein kinase
  misc_feature (1)..(293): NCBI GI NO: 14588571 NR Description: protein kinase HvPKABA1
  misc_feature (1)..(293): NCBI GI NO: 416564 NR Description: Abcisic acid-inducible protein kinase
  misc_feature (1)..(293): NCBI GI NO: 29164823 NR Description: abcisic acid-inducible protein kinanase
  misc_feature (1)..(293): NCBI GI NO: 34906840 NR Description: putative protein kinase HvPKABA1
  misc_feature (1)..(293): NCBI GI NO: 11138330 NR Description: putative serine/threonine kinase GDBrPK
  misc_feature (1)..(293): NCBI GI NO: 481002 NR Description: protein kinase MCPK9 (EC 2
  misc_feature (1)..(290): NCBI GI NO: 18418337 NR Description: protein kinase, putative [Arabidopsis thaliana]
  misc_feature (1)..(293): NCBI GI NO: 15218270 NR Description: serine/threonine protein kinase, putative
  misc_feature (1)..(292): NCBI GI NO: 7446371 NR Description: probable serine/threonine kinase (EC 2
MNHRSLKHPNIIRFKEVVLTPTHLAIVMEYASGGELFQRICNAGRFSEDEGRFFFQQLISGVSYCHSMQVCHRDLKLENTLLDGSVAPRLKICDFGYSKSSVLHSQPKSTVGTPAYIAPEVLSRREYDGKVADVWSCGVTLYVMLVGAYPFEDPDEPRNFRKTITRILSVQYSVPDYVRVSMDCIHLLSRIFVGNPQQRITIPEIKNHPWFLKRLPVEMTDEYQRSMQLADMNTPSQSLEEAMAIIQEAQKPGDNALGVAGQVACLGSMDLDDIDFDIDDIDVESSGDFVCPL

SEQ ID NO: 7099 - protein, 266 aa, Glycine max
  peptide (1)..(266): Ceres Seq. ID no. 15177015
  misc_feature (1)..(184): Pfam Name: Pfam Description:  Protein kinase domain
  misc_feature (1)..(260): NCBI GI NO: 2055374 NR Description: serine-threonine protein kinase
  misc_feature (1)..(266): NCBI GI NO: 14588571 NR Description: protein kinase HvPKABA1
  misc_feature (1)..(266): NCBI GI NO: 416564 NR Description: Abcisic acid-inducible protein kinase
  misc_feature (1)..(266): NCBI GI NO: 29164823 NR Description: abcisic acid-inducible protein kinanase
  misc_feature (1)..(266): NCBI GI NO: 34906840 NR Description: putative protein kinase HvPKABA1
  misc_feature (1)..(266): NCBI GI NO: 11138330 NR Description: putative serine/threonine kinase GDBrPK
  misc_feature (1)..(266): NCBI GI NO: 481002 NR Description: protein kinase MCPK9 (EC 2
  misc_feature (1)..(263): NCBI GI NO: 18418337 NR Description: protein kinase, putative [Arabidopsis thaliana]
  misc_feature (1)..(266): NCBI GI NO: 15218270 NR Description: serine/threonine protein kinase, putative
  misc_feature (1)..(265): NCBI GI NO: 7446371 NR Description: probable serine/threonine kinase (EC 2
MEYASGGELFQRICNAGRFSEDEGRFFFQQLISGVSYCHSMQVCHRDLKLENTLLDGSVAPRLKICDFGYSKSSVLHSQPKSTVGTPAYIAPEVLSRREYDGKVADVWSCGVTLYVMLVGAYPFEDPDEPRNFRKTITRILSVQYSVPDYVRVSMDCIHLLSRIFVGNPQQRITIPEIKNHPWFLKRLPVEMTDEYQRSMQLADMNTPSQSLEEAMAIIQEAQKPGDNALGVAGQVACLGSMDLDDIDFDIDDIDVESSGDFVCPL

SEQ ID NO: 7100 - DNA, 1232 bp, Glycine max
  misc_feature (1)..(1232): Ceres Seq. ID no. 13595321
gaaaaactccttcgttttcgtcgtctttagtaattttcactaccttcttctttacctcaccttctccatgatcctctccgtcatccgcaaatcatgactctcactcctcctccctcgcagcaaacacctaactcacctcatcgccgagtcctcatcgtcggaaactactgccacgacgttctaatccaaaacggcaccgtcgtggccgaaaccctcggcggcgccgcctccttcatctccaacgtcctagattcctcctccgtctcctgcgacctaatctccaaagtcggccgcgacttcaaatacgacgtcgcccaccctccgatcgtggctccggagaaggagaccacggtcttcaaagcctatttcgatctcgcagccgatcgggtcctgaaacgcgtcgctgcatgcgacccgatcctcccgtcggacatccccgactcgaggttcgacatcgggatggccgtcggcgtcggcggggagattctccccgagacgctcgagaagatggtggagatctgcgacgtggtggctgtggacatacaagctctgattagaggtttcgatcctgtcgacggagccgtgaagcttgttgatttgaaggagagtgggtttcgtcacctcatgggtaagkwkatygggttcttgaaagcyymtaagatcgggttctkgaaagcttcgtcggacgaagctttgttcatggatgttgaagagatgaggcgtttgtgctgtgtggtggtgactagtggtgaaaaagggtgcaggatttatgacaaggatgatgagacggtggttcctccgttcgtggcgaagcaggtggatcctacgggcgctggagatagttttcttggaggtttggtggttggtcttgtggagggtttggatgttcctgatgctgctttgttggggaacctctttggttccgtcactgttgagcacattggtcagcctaagttcgatttgacgatgcttcagagagtaaaggatgaggtacagaggaggaagaagcaatgtaatctctcaagtagccacaacaatgatcatgacgagttccatgcgcgtctaagtccagctcggtttcaggagtctccacttcaaccaaagatattggtcaatggtcacttgtgtgaccggtcatgattggttcctgcaaatacgaatcttttaatcactaacaacgctcttctgaattgtgtaaactttctacgtttatgaattttggaaatttatct

SEQ ID NO: 7101 - protein, 348 aa, Glycine max
  peptide (1)..(348): Ceres Seq. ID no. 15221542
  misc_feature (16)..(293): Pfam Name: Pfam Description:  pfkB family carbohydrate kinase
  misc_feature (1)..(346): NCBI GI NO: 15237741 NR Description: pfkB type carbohydrate kinase protein family
  misc_feature (1)..(294): NCBI GI NO: 8843793 NR Description: gene_id:MZN1
  misc_feature (20)..(345): NCBI GI NO: 29788872 NR Description: unknown protein
  misc_feature (20)..(294): NCBI GI NO: 31126792 NR Description: unknown protein
  misc_feature (14)..(311): NCBI GI NO: 22972361 NR Description: hypothetical protein [Chloroflexus aurantiacus]
  misc_feature (215)..(293): NCBI GI NO: 22962450 NR Description: hypothetical protein [Rhodopseudomonas palustris]
  misc_feature (210)..(289): NCBI GI NO: 23116680 NR Description: hypothetical protein
  misc_feature (184)..(304): NCBI GI NO: 15668582 NR Description: ribokinase (rbsK) [Methanococcus jannaschii]
  misc_feature (181)..(181): Xaa is any aa, unknown or other
  misc_feature (182)..(182): Xaa is any aa, unknown or other
  misc_feature (187)..(187): Xaa is any aa, unknown or other
  misc_feature (188)..(188): Xaa is any aa, unknown or other
  misc_feature (193)..(193): Xaa is any aa, unknown or other
MTLTPPPSQQTPNSPHRRVLIVGNYCHDVLIQNGTVVAETLGGAASFISNVLDSSSVSCDLISKVGRDFKYDVAHPPIVAPEKETTVFKAYFDLAADRVLKRVAACDPILPSDIPDSRFDIGMAVGVGGEILPETLEKMVEICDVVAVDIQALIRGFDPVDGAVKLVDLKESGFRHLMGKXXGFLKXXKIGFXKASSDEALFMDVEEMRRLCCVVVTSGEKGCRIYDKDDETVVPPFVAKQVDPTGAGDSFLGGLVVGLVEGLDVPDAALLGNLFGSVTVEHIGQPKFDLTMLQRVKDEVQRRKKQCNLSSSHNNDHDEFHARLSPARFQESPLQPKILVNGHLCDRS

SEQ ID NO: 7102 - protein, 226 aa, Glycine max
  peptide (1)..(226): Ceres Seq. ID no. 15221543
  misc_feature (1)..(171): Pfam Name: Pfam Description:  pfkB family carbohydrate kinase
  misc_feature (1)..(224): NCBI GI NO: 15237741 NR Description: pfkB type carbohydrate kinase protein family
  misc_feature (1)..(172): NCBI GI NO: 8843793 NR Description: gene_id:MZN1
  misc_feature (1)..(223): NCBI GI NO: 29788872 NR Description: unknown protein
  misc_feature (1)..(172): NCBI GI NO: 31126792 NR Description: unknown protein
  misc_feature (1)..(189): NCBI GI NO: 22972361 NR Description: hypothetical protein [Chloroflexus aurantiacus]
  misc_feature (93)..(171): NCBI GI NO: 22962450 NR Description: hypothetical protein [Rhodopseudomonas palustris]
  misc_feature (88)..(167): NCBI GI NO: 23116680 NR Description: hypothetical protein
  misc_feature (62)..(182): NCBI GI NO: 15668582 NR Description: ribokinase (rbsK) [Methanococcus jannaschii]
  misc_feature (59)..(59): Xaa is any aa, unknown or other
  misc_feature (60)..(60): Xaa is any aa, unknown or other
  misc_feature (65)..(65): Xaa is any aa, unknown or other
  misc_feature (66)..(66): Xaa is any aa, unknown or other
  misc_feature (71)..(71): Xaa is any aa, unknown or other
MAVGVGGEILPETLEKMVEICDVVAVDIQALIRGFDPVDGAVKLVDLKESGFRHLMGKXXGFLKXXKIGFXKASSDEALFMDVEEMRRLCCVVVTSGEKGCRIYDKDDETVVPPFVAKQVDPTGAGDSFLGGLVVGLVEGLDVPDAALLGNLFGSVTVEHIGQPKFDLTMLQRVKDEVQRRKKQCNLSSSHNNDHDEFHARLSPARFQESPLQPKILVNGHLCDRS

SEQ ID NO: 7103 - protein, 210 aa, Glycine max
  peptide (1)..(210): Ceres Seq. ID no. 15221544
  misc_feature (1)..(155): Pfam Name: Pfam Description:  pfkB family carbohydrate kinase
  misc_feature (1)..(208): NCBI GI NO: 15237741 NR Description: pfkB type carbohydrate kinase protein family
  misc_feature (1)..(156): NCBI GI NO: 8843793 NR Description: gene_id:MZN1
  misc_feature (1)..(207): NCBI GI NO: 29788872 NR Description: unknown protein
  misc_feature (1)..(156): NCBI GI NO: 31126792 NR Description: unknown protein
  misc_feature (1)..(173): NCBI GI NO: 22972361 NR Description: hypothetical protein [Chloroflexus aurantiacus]
  misc_feature (77)..(155): NCBI GI NO: 22962450 NR Description: hypothetical protein [Rhodopseudomonas palustris]
  misc_feature (72)..(151): NCBI GI NO: 23116680 NR Description: hypothetical protein
  misc_feature (46)..(166): NCBI GI NO: 15668582 NR Description: ribokinase (rbsK) [Methanococcus jannaschii]
  misc_feature (43)..(43): Xaa is any aa, unknown or other
  misc_feature (44)..(44): Xaa is any aa, unknown or other
  misc_feature (49)..(49): Xaa is any aa, unknown or other
  misc_feature (50)..(50): Xaa is any aa, unknown or other
  misc_feature (55)..(55): Xaa is any aa, unknown or other
MVEICDVVAVDIQALIRGFDPVDGAVKLVDLKESGFRHLMGKXXGFLKXXKIGFXKASSDEALFMDVEEMRRLCCVVVTSGEKGCRIYDKDDETVVPPFVAKQVDPTGAGDSFLGGLVVGLVEGLDVPDAALLGNLFGSVTVEHIGQPKFDLTMLQRVKDEVQRRKKQCNLSSSHNNDHDEFHARLSPARFQESPLQPKILVNGHLCDRS

SEQ ID NO: 7104 - DNA, 1055 bp, Glycine max
  misc_feature (1)..(1055): Ceres Seq. ID no. 14302705
ctgcagcagagccctcgccgccgccgccgcccgcgcggagctagaagcgggagtggagggggcaaaacagtcccaccatggagtacgtcaaccctctcacgggcttccgcgtcgacggccgccgccccaacgagatgcggcagctcaagggcgaggtcggcgtcgtctccagggccgacggctcggcgctcttcgagatgggcaacaccagggtcatcgccgctgtctacgggccccgagagatccaaaacaggagtcagcaacaaaacagtaaagaggctttggtgcgttgtgagtatagaatggcagaatttagcactggggatcgaaggagaaagccaaaaggtgacaggcgatcaacagaaatttctcttgttattcgacaaacaatggaggcaagcatattaacacatttaatgccacactcacagattgacatatttgtccaagttcttcaagctgatggtggaaccaggtctgcatgcatcaatgctgcaactctagcacttgcagatgctgggattccaatgcgagacatagtcacttcttgcagtgctgggtatctgtgttctactcctttgcttgatctgaattatatagaagacagcgctggaggcgcggatgtcactgttggcattcttgcaaagatggacaaagtgactcttctgcagatggacgcgaaactaccaatggatacatttgagactgtgatggaccttgcaactgaagggtgcaaagccatcgcaacctacatccgagaggtgctattggagaacacgaagcagctggagtgtcagcgaggctagttaaacctagcaggtggaggctattgaacgagagcctgtggcacttgaaggcgggtctgttgtgtaacgctgattgatggcttatctgcctagcagagctagcattgagagaaaaaaatgacactgaacctgtcaaagatagctggaccatcattttccctcctaacgtacatgctgtagcgcgcaggagatgacatcttgattatgtaaaactttgatgttgaacttggtatccatgttgtacttttg

SEQ ID NO: 7105 - protein, 242 aa, Glycine max
  peptide (1)..(242): Ceres Seq. ID no. 14302706
  misc_feature (19)..(150): Pfam Name: Pfam Description:  3' exoribonuclease family, domain 1
  misc_feature (1)..(241): NCBI GI NO: 15233167 NR Description: exonuclease RRP41 [Arabidopsis thaliana]
  misc_feature (9)..(236): NCBI GI NO: 9506689 NR Description: exosome complex exonuclease RRP41
  misc_feature (9)..(242): NCBI GI NO: 29611663 NR Description: exosome complex exonuclease RRP41 [Mus musculus]
  misc_feature (9)..(236): NCBI GI NO: 33411774 NR Description: putative exosome complex exonuclease RRP41
  misc_feature (9)..(236): NCBI GI NO: 34866849 NR Description: similar to putative exosome complex exonucleaseRRP41
  misc_feature (9)..(237): NCBI GI NO: 31240059 NR Description: ENSANGP00000017010 [Anopheles gambiae]
  misc_feature (9)..(232): NCBI GI NO: 20093819 NR Description: Predicted exosome subunit, RNase PH
  misc_feature (9)..(232): NCBI GI NO: 14520826 NR Description: ribonuclease PH [Pyrococcus abyssi]
  misc_feature (9)..(232): NCBI GI NO: 18977940 NR Description: ribonuclease ph [Pyrococcus furiosus DSM 3638]
  misc_feature (9)..(232): NCBI GI NO: 40217446 NR Description: ribonuclease PH [uncultured archaeon]
MEYVNPLTGFRVDGRRPNEMRQLKGEVGVVSRADGSALFEMGNTRVIAAVYGPREIQNRSQQQNSKEALVRCEYRMAEFSTGDRRRKPKGDRRSTEISLVIRQTMEASILTHLMPHSQIDIFVQVLQADGGTRSACINAATLALADAGIPMRDIVTSCSAGYLCSTPLLDLNYIEDSAGGADVTVGILAKMDKVTLLQMDAKLPMDTFETVMDLATEGCKAIATYIREVLLENTKQLECQRG

SEQ ID NO: 7106 - protein, 223 aa, Glycine max
  peptide (1)..(223): Ceres Seq. ID no. 14302707
  misc_feature (1)..(131): Pfam Name: Pfam Description:  3' exoribonuclease family, domain 1
  misc_feature (1)..(222): NCBI GI NO: 15233167 NR Description: exonuclease RRP41 [Arabidopsis thaliana]
  misc_feature (1)..(217): NCBI GI NO: 9506689 NR Description: exosome complex exonuclease RRP41
  misc_feature (1)..(223): NCBI GI NO: 29611663 NR Description: exosome complex exonuclease RRP41 [Mus musculus]
  misc_feature (1)..(217): NCBI GI NO: 33411774 NR Description: putative exosome complex exonuclease RRP41
  misc_feature (1)..(217): NCBI GI NO: 34866849 NR Description: similar to putative exosome complex exonucleaseRRP41
  misc_feature (1)..(218): NCBI GI NO: 31240059 NR Description: ENSANGP00000017010 [Anopheles gambiae]
  misc_feature (1)..(213): NCBI GI NO: 20093819 NR Description: Predicted exosome subunit, RNase PH
  misc_feature (1)..(213): NCBI GI NO: 14520826 NR Description: ribonuclease PH [Pyrococcus abyssi]
  misc_feature (1)..(213): NCBI GI NO: 18977940 NR Description: ribonuclease ph [Pyrococcus furiosus DSM 3638]
  misc_feature (1)..(213): NCBI GI NO: 40217446 NR Description: ribonuclease PH [uncultured archaeon]
MRQLKGEVGVVSRADGSALFEMGNTRVIAAVYGPREIQNRSQQQNSKEALVRCEYRMAEFSTGDRRRKPKGDRRSTEISLVIRQTMEASILTHLMPHSQIDIFVQVLQADGGTRSACINAATLALADAGIPMRDIVTSCSAGYLCSTPLLDLNYIEDSAGGADVTVGILAKMDKVTLLQMDAKLPMDTFETVMDLATEGCKAIATYIREVLLENTKQLECQRG

SEQ ID NO: 7107 - protein, 202 aa, Glycine max
  peptide (1)..(202): Ceres Seq. ID no. 14302708
  misc_feature (1)..(110): Pfam Name: Pfam Description:  3' exoribonuclease family, domain 1
  misc_feature (1)..(201): NCBI GI NO: 15233167 NR Description: exonuclease RRP41 [Arabidopsis thaliana]
  misc_feature (1)..(196): NCBI GI NO: 9506689 NR Description: exosome complex exonuclease RRP41
  misc_feature (1)..(202): NCBI GI NO: 29611663 NR Description: exosome complex exonuclease RRP41 [Mus musculus]
  misc_feature (1)..(196): NCBI GI NO: 33411774 NR Description: putative exosome complex exonuclease RRP41
  misc_feature (1)..(196): NCBI GI NO: 34866849 NR Description: similar to putative exosome complex exonucleaseRRP41
  misc_feature (1)..(197): NCBI GI NO: 31240059 NR Description: ENSANGP00000017010 [Anopheles gambiae]
  misc_feature (1)..(192): NCBI GI NO: 20093819 NR Description: Predicted exosome subunit, RNase PH
  misc_feature (1)..(192): NCBI GI NO: 14520826 NR Description: ribonuclease PH [Pyrococcus abyssi]
  misc_feature (1)..(192): NCBI GI NO: 18977940 NR Description: ribonuclease ph [Pyrococcus furiosus DSM 3638]
  misc_feature (1)..(192): NCBI GI NO: 40217446 NR Description: ribonuclease PH [uncultured archaeon]
MGNTRVIAAVYGPREIQNRSQQQNSKEALVRCEYRMAEFSTGDRRRKPKGDRRSTEISLVIRQTMEASILTHLMPHSQIDIFVQVLQADGGTRSACINAATLALADAGIPMRDIVTSCSAGYLCSTPLLDLNYIEDSAGGADVTVGILAKMDKVTLLQMDAKLPMDTFETVMDLATEGCKAIATYIREVLLENTKQLECQRG

SEQ ID NO: 7108 - DNA, 839 bp, Glycine max
  misc_feature (1)..(839): Ceres Seq. ID no. 12610734
agaggaacaaatcgcagttacacactgaaaacgaacacagaatcccccaaaagaagccacctttagggttttcgtctccaaatcaattcgtgattcgctttcgaatcgattcgtcacgaatccaatcctctggtttcctttattttctccagttttcgatttcaatctctttgccgtgagaaacgatgggaagaggcaagttcaaggggaaacctactggccagcgccgattctcaagtgcagctgatattcttgctggaacttctgctgcgcgtcctcggtcattcaagcagaaggaagctgagtacgaagaagatgttgaagaggagtctgaagaggaatctgaagaggaatccgaagatgaatctgacgtgaagaagaaaggacatgaagctcttattgaagttgataaccctaacagagccaaaccaacgactttaaaagctagagaccttgatgctagtaaaaccactgaactctcaaggcgtgaaagggaggagctagagaagcagcgagctcatgagcgatacatgaggttgcaggagcaaggcaaaaccgaacaagcaagaaaggatttggatcgtctggctctgattcgccaacagagagaagaagcggccaagaagcgagaagaggaaaaagcagcgaaagacgccaagaaagtagatgctcgcaaatgagacaagtgttcaccctaaaaaaaataaactacataaaagaagaagaatactcatcgagttttactttgttcttttttcgattggtaaacagatcataaaacattttccgaatacttagtgcccaggggatttctccatcttaatacattggaagttaat

SEQ ID NO: 7109 - protein, 164 aa, Glycine max
  peptide (1)..(164): Ceres Seq. ID no. 12610735
  misc_feature (22)..(164): Pfam Name: Pfam Description:  Caldesmon
  misc_feature (1)..(164): NCBI GI NO: 18422620 NR Description: expressed protein; protein id: At5g46020
  misc_feature (1)..(164): NCBI GI NO: 34909600 NR Description: P0435B05.20
  misc_feature (1)..(164): NCBI GI NO: 12018258 NR Description: kinase substrate HASPP28 [Rattus norvegicus]
  misc_feature (1)..(164): NCBI GI NO: 1136586 NR Description: PDGF associated protein
  misc_feature (1)..(164): NCBI GI NO: 31418215 NR Description: Unknown (protein for MGC:56344) [Danio rerio]
  misc_feature (1)..(164): NCBI GI NO: 7657441 NR Description: PDGFA associated protein 1
  misc_feature (1)..(164): NCBI GI NO: 30584165 NR Description: Homo sapiens PDGFA associated protein 1
  misc_feature (3)..(156): NCBI GI NO: 1518855 NR Description: HASPP28
  misc_feature (1)..(156): NCBI GI NO: 28278503 NR Description: Similar to PDGFA associated protein 1
  misc_feature (53)..(163): NCBI GI NO: 37779032 NR Description: kinase substrate HASPP28 [Pagrus major]
MGRGKFKGKPTGQRRFSSAADILAGTSAARPRSFKQKEAEYEEDVEEESEEESEEESEDESDVKKKGHEALIEVDNPNRAKPTTLKARDLDASKTTELSRREREELEKQRAHERYMRLQEQGKTEQARKDLDRLALIRQQREEAAKKREEEKAAKDAKKVDARK

SEQ ID NO: 7110 - DNA, 496 bp, Glycine max
  misc_feature (1)..(496): Ceres Seq. ID no. 13582034
aagtctaagtgcatactcccaccaaatacagtagcagcaatggcgccagcgcagcaagtgcaagttccggtgcaagtctcgccacccccgattctcagcgtcctcgagaccactctcgtagcgccctcgcccagcgctggcgccgccccgccggagtcctccctcccgctcaccttcttcgacgtcctctggctcacgtccccgcccgtcgagcgtgttttcttctaccgcctcgccgctgacgccgacgtccccgaaatcctctccaacctcaagacctcactggccaaagctctcagcacctaccacccgctcgctggccgcctccgcctcacgcctgggacggctgaccgctacgagatctactaccagccgggcgacggcgtcaccttcaccgtcgccaagtaccgcgacgacattgacttcgacgagctcgtggttgacaagccgagggaggtcagcaagatcgcgccgctcgcaccgcctcttcccaagg

SEQ ID NO: 7111 - protein, 165 aa, Glycine max
  peptide (1)..(165): Ceres Seq. ID no. 13582035
  misc_feature (32)..(164): NCBI GI NO: 38346544 NR Description: OSJNBa0035M09.5
  misc_feature (32)..(164): NCBI GI NO: 34394044 NR Description: anthocyanin 5-aromatic acyltransferase-like
  misc_feature (32)..(164): NCBI GI NO: 34903412 NR Description: anthocyanin 5-aromatic acyltransferase-like protein~contains EST AU063315
  misc_feature (32)..(163): NCBI GI NO: 18421824 NR Description: transferase family [Arabidopsis thaliana]
  misc_feature (32)..(163): NCBI GI NO: 10177550 NR Description: anthocyanin acyltransferase-like protein
  misc_feature (32)..(163): NCBI GI NO: 15450469 NR Description: AT5g39050/MXF12_60 [Arabidopsis thaliana]
  misc_feature (30)..(163): NCBI GI NO: 27372443 NR Description: malonyl CoA: anthocyanin 3-O-glucoside-6''-O-malonyltransferase
  misc_feature (29)..(164): NCBI GI NO: 15219594 NR Description: transferase family [Arabidopsis thaliana]
  misc_feature (30)..(163): NCBI GI NO: 15241632 NR Description: transferase family [Arabidopsis thaliana]
  misc_feature (33)..(164): NCBI GI NO: 15218822 NR Description: transferase family [Arabidopsis thaliana]
KSKCILPPNTVAAMAPAQQVQVPVQVSPPPILSVLETTLVAPSPSAGAAPPESSLPLTFFDVLWLTSPPVERVFFYRLAADADVPEILSNLKTSLAKALSTYHPLAGRLRLTPGTADRYEIYYQPGDGVTFTVAKYRDDIDFDELVVDKPREVSKIAPLAPPLPK

SEQ ID NO: 7112 - protein, 152 aa, Glycine max
  peptide (1)..(152): Ceres Seq. ID no. 13582036
  misc_feature (19)..(151): NCBI GI NO: 38346544 NR Description: OSJNBa0035M09.5
  misc_feature (19)..(151): NCBI GI NO: 34394044 NR Description: anthocyanin 5-aromatic acyltransferase-like
  misc_feature (19)..(151): NCBI GI NO: 34903412 NR Description: anthocyanin 5-aromatic acyltransferase-like protein~contains EST AU063315
  misc_feature (19)..(150): NCBI GI NO: 18421824 NR Description: transferase family [Arabidopsis thaliana]
  misc_feature (19)..(150): NCBI GI NO: 10177550 NR Description: anthocyanin acyltransferase-like protein
  misc_feature (19)..(150): NCBI GI NO: 15450469 NR Description: AT5g39050/MXF12_60 [Arabidopsis thaliana]
  misc_feature (17)..(150): NCBI GI NO: 27372443 NR Description: malonyl CoA: anthocyanin 3-O-glucoside-6''-O-malonyltransferase
  misc_feature (16)..(151): NCBI GI NO: 15219594 NR Description: transferase family [Arabidopsis thaliana]
  misc_feature (17)..(150): NCBI GI NO: 15241632 NR Description: transferase family [Arabidopsis thaliana]
  misc_feature (20)..(151): NCBI GI NO: 15218822 NR Description: transferase family [Arabidopsis thaliana]
MAPAQQVQVPVQVSPPPILSVLETTLVAPSPSAGAAPPESSLPLTFFDVLWLTSPPVERVFFYRLAADADVPEILSNLKTSLAKALSTYHPLAGRLRLTPGTADRYEIYYQPGDGVTFTVAKYRDDIDFDELVVDKPREVSKIAPLAPPLPK

SEQ ID NO: 7113 - DNA, 1191 bp, Glycine max
  misc_feature (1)..(1191): Ceres Seq. ID no. 13595202
actccgcactgttcctcggactctcgtctcgctagttccccaacttccggcgcaagctgaaccctcggacccgaccgcggcagccgccgatccagccccgccgcgatggaattcgccctcgtcgacggcgagaagttctcgccctcctgctccacgctcgtcatgcccgcgctttcgatcggcaacgtggggcagctcgccgtggacctgctgataccgtcggcgaaggcgaggcgcgtggcgtacctcgatgagccctccgtgctgccctgcatcggcaacgacgccttcggaccgggcgctgtcggcgacctcgcgctcgcgctcgaagaatacgagtcaccgtctcacgggctggctttcattcaacaaagatctccagttattacggggatgatggtttcgtttgccaaaaatgttgctaatttcatcagtagcattgagaaggaccatgttgttattctttcaagtttagattctggcaagagaagagtaattgatgcatccagtgatatgctgtattacctttcaagctgcaatgaggatggttctgatccagaatgtgagaaactagggtggaagaaacttgaggaatataatccatctcaacgactgtggaaatgtcttgctagtctaattgagggtggtgttctttcagaagatatggctgatgatcctgaagagatgaccgcaagtgattactatgcgaccttaccatttgcagctctattctttgcctgcaaggccaaaggtttgaaagttagctgtgtattatgttactgttcagaaggggacaatatgccagaatctttccacttagcagaagcagtatgcaaacttcgaggtcaagaccctgaacaattccatggaaatgggtcaaatggatggactattcccttgtcatggaaatcaatttatggaccacctcctgatatgtctattttctagactgactgacctaggaagttgcaatcatggacagcgctgtatctagaatgaggaaggatattagctttaggttgtgtactagaaatccccaggatggtgagtcgccgaccctcttttgaagcaacaacagttttcaacttccgtttagaactggagggatcgtgaacctggaatttatctgccgcggctattcctcatgtctaagtggaatagatttattcgtttttattaaaaaaattcact

SEQ ID NO: 7114 - protein, 280 aa, Glycine max
  peptide (1)..(280): Ceres Seq. ID no. 13595203
  misc_feature (1)..(280): NCBI GI NO: 21594933 NR Description: unknown [Arabidopsis thaliana]
  misc_feature (1)..(280): NCBI GI NO: 18402055 NR Description: expressed protein [Arabidopsis thaliana]
  misc_feature (101)..(280): NCBI GI NO: 30794081 NR Description: unknown protein [Arabidopsis thaliana]
  misc_feature (17)..(163): NCBI GI NO: 37589726 NR Description: Unknown (protein for MGC:73278) [Danio rerio]
  misc_feature (208)..(275): NCBI GI NO: 37589726 NR Description: Unknown (protein for MGC:73278) [Danio rerio]
  misc_feature (17)..(280): NCBI GI NO: 28829982 NR Description: similar to Arabidopsis thaliana (Mouse-ear cress)
  misc_feature (17)..(163): NCBI GI NO: 22726189 NR Description: hepatocellular carcinoma susceptibility protein
  misc_feature (14)..(163): NCBI GI NO: 6841170 NR Description: HSPC260 [Homo sapiens]
  misc_feature (17)..(163): NCBI GI NO: 19527372 NR Description: Clast3 protein [Mus musculus]
  misc_feature (17)..(163): NCBI GI NO: 27680767 NR Description: similar to Clast3 protein
MEFALVDGEKFSPSCSTLVMPALSIGNVGQLAVDLLIPSAKARRVAYLDEPSVLPCIGNDAFGPGAVGDLALALEEYESPSHGLAFIQQRSPVITGMMVSFAKNVANFISSIEKDHVVILSSLDSGKRRVIDASSDMLYYLSSCNEDGSDPECEKLGWKKLEEYNPSQRLWKCLASLIEGGVLSEDMADDPEEMTASDYYATLPFAALFFACKAKGLKVSCVLCYCSEGDNMPESFHLAEAVCKLRGQDPEQFHGNGSNGWTIPLSWKSIYGPPPDMSIF

SEQ ID NO: 7115 - protein, 261 aa, Glycine max
  peptide (1)..(261): Ceres Seq. ID no. 13595204
  misc_feature (1)..(261): NCBI GI NO: 21594933 NR Description: unknown [Arabidopsis thaliana]
  misc_feature (1)..(261): NCBI GI NO: 18402055 NR Description: expressed protein [Arabidopsis thaliana]
  misc_feature (82)..(261): NCBI GI NO: 30794081 NR Description: unknown protein [Arabidopsis thaliana]
  misc_feature (1)..(144): NCBI GI NO: 37589726 NR Description: Unknown (protein for MGC:73278) [Danio rerio]
  misc_feature (189)..(256): NCBI GI NO: 37589726 NR Description: Unknown (protein for MGC:73278) [Danio rerio]
  misc_feature (1)..(261): NCBI GI NO: 28829982 NR Description: similar to Arabidopsis thaliana (Mouse-ear cress)
  misc_feature (1)..(144): NCBI GI NO: 22726189 NR Description: hepatocellular carcinoma susceptibility protein
  misc_feature (1)..(144): NCBI GI NO: 6841170 NR Description: HSPC260 [Homo sapiens]
  misc_feature (1)..(144): NCBI GI NO: 19527372 NR Description: Clast3 protein [Mus musculus]
  misc_feature (1)..(144): NCBI GI NO: 27680767 NR Description: similar to Clast3 protein
MPALSIGNVGQLAVDLLIPSAKARRVAYLDEPSVLPCIGNDAFGPGAVGDLALALEEYESPSHGLAFIQQRSPVITGMMVSFAKNVANFISSIEKDHVVILSSLDSGKRRVIDASSDMLYYLSSCNEDGSDPECEKLGWKKLEEYNPSQRLWKCLASLIEGGVLSEDMADDPEEMTASDYYATLPFAALFFACKAKGLKVSCVLCYCSEGDNMPESFHLAEAVCKLRGQDPEQFHGNGSNGWTIPLSWKSIYGPPPDMSIF

SEQ ID NO: 7116 - protein, 184 aa, Glycine max
  peptide (1)..(184): Ceres Seq. ID no. 13595205
  misc_feature (1)..(184): NCBI GI NO: 21594933 NR Description: unknown [Arabidopsis thaliana]
  misc_feature (1)..(184): NCBI GI NO: 18402055 NR Description: expressed protein [Arabidopsis thaliana]
  misc_feature (5)..(184): NCBI GI NO: 30794081 NR Description: unknown protein [Arabidopsis thaliana]
  misc_feature (1)..(67): NCBI GI NO: 37589726 NR Description: Unknown (protein for MGC:73278) [Danio rerio]
  misc_feature (112)..(179): NCBI GI NO: 37589726 NR Description: Unknown (protein for MGC:73278) [Danio rerio]
  misc_feature (1)..(184): NCBI GI NO: 28829982 NR Description: similar to Arabidopsis thaliana (Mouse-ear cress)
  misc_feature (1)..(67): NCBI GI NO: 22726189 NR Description: hepatocellular carcinoma susceptibility protein
  misc_feature (1)..(67): NCBI GI NO: 6841170 NR Description: HSPC260 [Homo sapiens]
  misc_feature (1)..(67): NCBI GI NO: 19527372 NR Description: Clast3 protein [Mus musculus]
  misc_feature (1)..(67): NCBI GI NO: 27680767 NR Description: similar to Clast3 protein
MMVSFAKNVANFISSIEKDHVVILSSLDSGKRRVIDASSDMLYYLSSCNEDGSDPECEKLGWKKLEEYNPSQRLWKCLASLIEGGVLSEDMADDPEEMTASDYYATLPFAALFFACKAKGLKVSCVLCYCSEGDNMPESFHLAEAVCKLRGQDPEQFHGNGSNGWTIPLSWKSIYGPPPDMSIF

SEQ ID NO: 7117 - DNA, 1565 bp, Glycine max
  misc_feature (1)..(1565): Ceres Seq. ID no. 15175492
gtagcaccgcgattcgccatagccactgcccagcgagcggcccagtggtagctaagctgagcgagtgagtgtgcactgcgtgtgacacgacgaccggttggcccatcactagcgcgctagctagacgtacgcacgcacgtgtctacgctacctatctctctctccgtcgaccgaccatgccggccttcgccgagccagccattgatccgccgctggcggacagctaccgcgcgctgctgcgcagcgaccagctccgccgcggcggcattgcgccggcgccggcgtcggagagcgtggccgtgcttgagcgcgccctgccgatgatcgacttgaagcgcctgacgagcggcgacgcgggggagaggaaggcgtgcgcggacgccatggcgaccgcggcgtcggagtggggcttcttccaggtgatcaaccacgacgtggggcgggagctcctggaggagatgcggcgcgagcaggcgcggctgttccgcctgccgttcgacaccaaggagaaggccgggctcctcaacggctcgtaccggtggggcaacccgacggctacgtcgctccggcacctctcgtggtcggaggccttccacgttccgctcgccagcatctcccgggaggactgcgactacgggaagctcagctccttgaggggcgtgatgcaggaggtggcggacgcgatgtcgcgtgtggcggacacggtggcggcggtgctggcggaggacctcgggcacgatgcggggggcggcgagccggcgttcccggcggggtgcgacgggacgacgtgcttcctgcggctcaacaggtacccggcgtgcccgttcgcgccggacacgttcgggctggtgccgcacacggacagcgacttcctcaccatcctctgccaggaccaggtcgggggcctgcagctcatgaaggactcccgctgggtcgccgtgaaaccccgctccgacgcgctcatcgtcaacatcggcgatctgtttcaggcgtggagcaacaacaggtacaagagcgtggagcacaaagtggtggccaacgccaaggcggagcgcctctccgtcgcctacttcctgtgcccgtcgtacgactcgccggtcggcacatgcggcgagccgtccccgtacaggccgttcaccttcggggagtaccggaggaaggtgcaggacgatgtcaagagaaccggcaaaaagattgggctccccaactttctcaaacagtctcccgttgacgccatgaatcacggcctctgtttttaacacgtactcaaatctcaccgtagaagcgtcgtgcgcccgcagtatggaatcggagataatttcccttttttttagttctttctatttctattctagttttgtttcgccccttttgggcctaggtgataggtactataccacgagataatgatggaggaatcaatggaatatataacatgatgctatggtgatacgtctgcccatctgctcccgtttgtttgttcctcgttccttcttttcgtcttgtcgtgcgtactacgaggaacaaacgtggacggacgagcacctaagcttcaacgttgtttc

SEQ ID NO: 7118 - protein, 360 aa, Glycine max
  peptide (1)..(360): Ceres Seq. ID no. 15175493
  misc_feature (204)..(302): Pfam Name: II Pfam Description: 2OG-Fe
  misc_feature (1)..(351): NCBI GI NO: 32492254 NR Description: OSJNBa0019D11.23
  misc_feature (1)..(349): NCBI GI NO: 29825611 NR Description: gibberellin 2-oxidase 1 [Nicotiana sylvestris]
  misc_feature (174)..(346): NCBI GI NO: 15233553 NR Description: gibberellin 20-oxidase family
  misc_feature (9)..(113): NCBI GI NO: 15233553 NR Description: gibberellin 20-oxidase family
  misc_feature (10)..(345): NCBI GI NO: 34915474 NR Description: gibberellin 20-oxidase-like protein
  misc_feature (47)..(346): NCBI GI NO: 15223684 NR Description: gibberellin 20-oxidase-related
  misc_feature (1)..(326): NCBI GI NO: 15239179 NR Description: oxidoreductase, 2OG-Fe(II) oxygenase family
  misc_feature (47)..(345): NCBI GI NO: 38347595 NR Description: OSJNBa0042I15.8
  misc_feature (1)..(326): NCBI GI NO: 21537324 NR Description: leucoanthocyanidin dioxygenase-like protein
  misc_feature (47)..(338): NCBI GI NO: 15229694 NR Description: oxidoreductase, 2OG-Fe(II) oxygenase family
MPAFAEPAIDPPLADSYRALLRSDQLRRGGIAPAPASESVAVLERALPMIDLKRLTSGDAGERKACADAMATAASEWGFFQVINHDVGRELLEEMRREQARLFRLPFDTKEKAGLLNGSYRWGNPTATSLRHLSWSEAFHVPLASISREDCDYGKLSSLRGVMQEVADAMSRVADTVAAVLAEDLGHDAGGGEPAFPAGCDGTTCFLRLNRYPACPFAPDTFGLVPHTDSDFLTILCQDQVGGLQLMKDSRWVAVKPRSDALIVNIGDLFQAWSNNRYKSVEHKVVANAKAERLSVAYFLCPSYDSPVGTCGEPSPYRPFTFGEYRRKVQDDVKRTGKKIGLPNFLKQSPVDAMNHGLCF

SEQ ID NO: 7119 - protein, 312 aa, Glycine max
  peptide (1)..(312): Ceres Seq. ID no. 15175494
  misc_feature (156)..(254): Pfam Name: II Pfam Description: 2OG-Fe
  misc_feature (1)..(303): NCBI GI NO: 32492254 NR Description: OSJNBa0019D11.23
  misc_feature (1)..(301): NCBI GI NO: 29825611 NR Description: gibberellin 2-oxidase 1 [Nicotiana sylvestris]
  misc_feature (126)..(298): NCBI GI NO: 15233553 NR Description: gibberellin 20-oxidase family
  misc_feature (1)..(65): NCBI GI NO: 15233553 NR Description: gibberellin 20-oxidase family
  misc_feature (1)..(297): NCBI GI NO: 34915474 NR Description: gibberellin 20-oxidase-like protein
  misc_feature (1)..(298): NCBI GI NO: 15223684 NR Description: gibberellin 20-oxidase-related
  misc_feature (1)..(278): NCBI GI NO: 15239179 NR Description: oxidoreductase, 2OG-Fe(II) oxygenase family
  misc_feature (1)..(297): NCBI GI NO: 38347595 NR Description: OSJNBa0042I15.8
  misc_feature (1)..(278): NCBI GI NO: 21537324 NR Description: leucoanthocyanidin dioxygenase-like protein
  misc_feature (1)..(290): NCBI GI NO: 15229694 NR Description: oxidoreductase, 2OG-Fe(II) oxygenase family
MIDLKRLTSGDAGERKACADAMATAASEWGFFQVINHDVGRELLEEMRREQARLFRLPFDTKEKAGLLNGSYRWGNPTATSLRHLSWSEAFHVPLASISREDCDYGKLSSLRGVMQEVADAMSRVADTVAAVLAEDLGHDAGGGEPAFPAGCDGTTCFLRLNRYPACPFAPDTFGLVPHTDSDFLTILCQDQVGGLQLMKDSRWVAVKPRSDALIVNIGDLFQAWSNNRYKSVEHKVVANAKAERLSVAYFLCPSYDSPVGTCGEPSPYRPFTFGEYRRKVQDDVKRTGKKIGLPNFLKQSPVDAMNHGLCF

SEQ ID NO: 7120 - protein, 291 aa, Glycine max
  peptide (1)..(291): Ceres Seq. ID no. 15175495
  misc_feature (135)..(233): Pfam Name: II Pfam Description: 2OG-Fe
  misc_feature (1)..(282): NCBI GI NO: 32492254 NR Description: OSJNBa0019D11.23
  misc_feature (1)..(280): NCBI GI NO: 29825611 NR Description: gibberellin 2-oxidase 1 [Nicotiana sylvestris]
  misc_feature (105)..(277): NCBI GI NO: 15233553 NR Description: gibberellin 20-oxidase family
  misc_feature (1)..(44): NCBI GI NO: 15233553 NR Description: gibberellin 20-oxidase family
  misc_feature (1)..(276): NCBI GI NO: 34915474 NR Description: gibberellin 20-oxidase-like protein
  misc_feature (1)..(277): NCBI GI NO: 15223684 NR Description: gibberellin 20-oxidase-related
  misc_feature (1)..(257): NCBI GI NO: 15239179 NR Description: oxidoreductase, 2OG-Fe(II) oxygenase family
  misc_feature (1)..(276): NCBI GI NO: 38347595 NR Description: OSJNBa0042I15.8
  misc_feature (1)..(257): NCBI GI NO: 21537324 NR Description: leucoanthocyanidin dioxygenase-like protein
  misc_feature (1)..(269): NCBI GI NO: 15229694 NR Description: oxidoreductase, 2OG-Fe(II) oxygenase family
MATAASEWGFFQVINHDVGRELLEEMRREQARLFRLPFDTKEKAGLLNGSYRWGNPTATSLRHLSWSEAFHVPLASISREDCDYGKLSSLRGVMQEVADAMSRVADTVAAVLAEDLGHDAGGGEPAFPAGCDGTTCFLRLNRYPACPFAPDTFGLVPHTDSDFLTILCQDQVGGLQLMKDSRWVAVKPRSDALIVNIGDLFQAWSNNRYKSVEHKVVANAKAERLSVAYFLCPSYDSPVGTCGEPSPYRPFTFGEYRRKVQDDVKRTGKKIGLPNFLKQSPVDAMNHGLCF

SEQ ID NO: 7121 - DNA, 800 bp, Glycine max
  misc_feature (1)..(800): Ceres Seq. ID no. 12610442
atcatatcattgcactaaatctcattcttcatctgcagctatttggattactgatattggtgcattttttttagaaagtgtgtactctttttggtgacattggaagctaactcatagacagaggcaaagatgttgggaattttcaagcagaagttagttaatgcacccaaggagctgaacagtccagcttctttgaattcatgcactaagcctaagctaagtcatgaagtcctgaaggatttcatgtcctgcaattcctccaatgctttctccatgtgctttgggaatgatgctttgctagcctattccccttcaaacaagccctccattcatcataggttgtttagtggtttggataacatatactgtgtcttcctgggtggcctgcacaaccttagcatgctcaacaagcagtatgggctatcaaaaggaacaaatgaggccaggtttatcattgaagcgtatcgaactcttcgcgacaggggtccatatccagttgatcaagtcctcaaagaacttgaaggcagtttcggatttgtgatatatgacaacaaggatggaacagtttttgttgcatctggttctaatggccatattgggctctactggggaattgcagcggatggttcggttacaatttctgaaaatctggagcttataaaagcaagctgtgctaaatcatttgcaccatttcctactggtatgcaaatttgatttctctctacctttgcaaaatcagattttgtaatttaagtttggcaaaattacaattaataaaggattccattgataatgtcgcc

SEQ ID NO: 7122 - protein, 194 aa, Glycine max
  peptide (1)..(194): Ceres Seq. ID no. 12610443
  misc_feature (1)..(191): NCBI GI NO: 18416995 NR Description: putative protein; protein id: At4g27450
  misc_feature (1)..(191): NCBI GI NO: 9857931 NR Description: unknown [Glycine max]
  misc_feature (1)..(191): NCBI GI NO: 7486256 NR Description: hypothetical protein F27G19
  misc_feature (1)..(191): NCBI GI NO: 18400774 NR Description: expressed protein; protein id: At3g15450
  misc_feature (1)..(191): NCBI GI NO: 7489016 NR Description: hypothetical protein - tomato
  misc_feature (1)..(191): NCBI GI NO: 542200 NR Description: hypothetical protein - garden asparagus
  misc_feature (1)..(191): NCBI GI NO: 20340249 NR Description: aluminum-induced protein-like protein
  misc_feature (1)..(191): NCBI GI NO: 15239993 NR Description: aluminum-induced protein-like
  misc_feature (1)..(191): NCBI GI NO: 7488440 NR Description: aluminum-induced protein - rape
  misc_feature (2)..(191): NCBI GI NO: 7489671 NR Description: hypothetical protein wali7 - wheat (fragment)
MLGIFKQKLVNAPKELNSPASLNSCTKPKLSHEVLKDFMSCNSSNAFSMCFGNDALLAYSPSNKPSIHHRLFSGLDNIYCVFLGGLHNLSMLNKQYGLSKGTNEARFIIEAYRTLRDRGPYPVDQVLKELEGSFGFVIYDNKDGTVFVASGSNGHIGLYWGIAADGSVTISENLELIKASCAKSFAPFPTGMQI

SEQ ID NO: 7123 - protein, 156 aa, Glycine max
  peptide (1)..(156): Ceres Seq. ID no. 12610444
  misc_feature (1)..(153): NCBI GI NO: 18416995 NR Description: putative protein; protein id: At4g27450
  misc_feature (1)..(153): NCBI GI NO: 9857931 NR Description: unknown [Glycine max]
  misc_feature (1)..(153): NCBI GI NO: 7486256 NR Description: hypothetical protein F27G19
  misc_feature (1)..(153): NCBI GI NO: 18400774 NR Description: expressed protein; protein id: At3g15450
  misc_feature (1)..(153): NCBI GI NO: 7489016 NR Description: hypothetical protein - tomato
  misc_feature (1)..(153): NCBI GI NO: 542200 NR Description: hypothetical protein - garden asparagus
  misc_feature (1)..(153): NCBI GI NO: 20340249 NR Description: aluminum-induced protein-like protein
  misc_feature (1)..(153): NCBI GI NO: 15239993 NR Description: aluminum-induced protein-like
  misc_feature (1)..(153): NCBI GI NO: 7488440 NR Description: aluminum-induced protein - rape
  misc_feature (1)..(153): NCBI GI NO: 7489671 NR Description: hypothetical protein wali7 - wheat (fragment)
MSCNSSNAFSMCFGNDALLAYSPSNKPSIHHRLFSGLDNIYCVFLGGLHNLSMLNKQYGLSKGTNEARFIIEAYRTLRDRGPYPVDQVLKELEGSFGFVIYDNKDGTVFVASGSNGHIGLYWGIAADGSVTISENLELIKASCAKSFAPFPTGMQI

SEQ ID NO: 7124 - protein, 146 aa, Glycine max
  peptide (1)..(146): Ceres Seq. ID no. 12610445
  misc_feature (1)..(143): NCBI GI NO: 18416995 NR Description: putative protein; protein id: At4g27450
  misc_feature (1)..(143): NCBI GI NO: 9857931 NR Description: unknown [Glycine max]
  misc_feature (1)..(143): NCBI GI NO: 7486256 NR Description: hypothetical protein F27G19
  misc_feature (1)..(143): NCBI GI NO: 18400774 NR Description: expressed protein; protein id: At3g15450
  misc_feature (1)..(143): NCBI GI NO: 7489016 NR Description: hypothetical protein - tomato
  misc_feature (1)..(143): NCBI GI NO: 542200 NR Description: hypothetical protein - garden asparagus
  misc_feature (1)..(143): NCBI GI NO: 20340249 NR Description: aluminum-induced protein-like protein
  misc_feature (1)..(143): NCBI GI NO: 15239993 NR Description: aluminum-induced protein-like
  misc_feature (1)..(143): NCBI GI NO: 7488440 NR Description: aluminum-induced protein - rape
  misc_feature (1)..(143): NCBI GI NO: 7489671 NR Description: hypothetical protein wali7 - wheat (fragment)
MCFGNDALLAYSPSNKPSIHHRLFSGLDNIYCVFLGGLHNLSMLNKQYGLSKGTNEARFIIEAYRTLRDRGPYPVDQVLKELEGSFGFVIYDNKDGTVFVASGSNGHIGLYWGIAADGSVTISENLELIKASCAKSFAPFPTGMQI

SEQ ID NO: 7125 - DNA, 791 bp, Glycine max
  misc_feature (1)..(791): Ceres Seq. ID no. 13595210
attcaccgtttctctctcttccttatcatcaaacttgctctgatctgatcagcgcttttgaaaatgtcggagggatcagaagaaacgaagacaaagatcgattccaccggagagttatcggacgtcgataacgagaactgcagtagcagtggaagtggcggcggcgagacgaagaagacatgcgttgattgcggaacattcaaaactcctctctggcgtggtggccctgccggacctaagtcactgtgcaatgcttgtgggatcaagagcaggaagaagaggcaagcggctctcgggatcaaaccagagaagaagatcagaaaaagcaacagctgtgacagtgatctaagcctcgaagatgatggccgtaacgtcaataacaagatcaagaaaggtgatgatcacaaaacttgcagtagcaagagtggtactagtactagtagcagctgcagcaaaagagtgagtaagtttttggatctgggattggaagtgccggtgatgaagagatcagcggttgagaagaagaggctgtggaagaaacgcggcgacgaagaaagagccgccgtgcttctcatggcgctctcttgcggctctgtttatgcgtaaacgatggagatcaagcttctttgtttggtgtcgttcgagaataattaaagtgaggggttctgattaattatttaattaacttaagacaatagagataactgtgtaatagctagtgatgtcgtggttttttttggcttgttcccactgatgttatgtgttcttttgctaatcaagtttcaattttt

SEQ ID NO: 7126 - protein, 180 aa, Glycine max
  peptide (1)..(180): Ceres Seq. ID no. 13595211
  misc_feature (1)..(180): NCBI GI NO: 15228899 NR Description: GATA zinc finger protein [Arabidopsis thaliana]
  misc_feature (63)..(176): NCBI GI NO: 22328703 NR Description: GATA zinc finger protein -related
  misc_feature (5)..(50): NCBI GI NO: 22328703 NR Description: GATA zinc finger protein -related
  misc_feature (5)..(112): NCBI GI NO: 26453042 NR Description: unknown protein [Arabidopsis thaliana]
  misc_feature (59)..(112): NCBI GI NO: 22328703 NR Description: GATA zinc finger protein -related
  misc_feature (31)..(79): NCBI GI NO: 34897256 NR Description: putative zinc finger protein
  misc_feature (135)..(180): NCBI GI NO: 34897256 NR Description: putative zinc finger protein
  misc_feature (14)..(79): NCBI GI NO: 34906096 NR Description: P0020E09.8
  misc_feature (147)..(180): NCBI GI NO: 34906096 NR Description: P0020E09.8
  misc_feature (63)..(176): NCBI GI NO: 26453042 NR Description: unknown protein [Arabidopsis thaliana]
MSEGSEETKTKIDSTGELSDVDNENCSSSGSGGGETKKTCVDCGTFKTPLWRGGPAGPKSLCNACGIKSRKKRQAALGIKPEKKIRKSNSCDSDLSLEDDGRNVNNKIKKGDDHKTCSSKSGTSTSSSCSKRVSKFLDLGLEVPVMKRSAVEKKRLWKKRGDEERAAVLLMALSCGSVYA

SEQ ID NO: 7127 - DNA, 1186 bp, Glycine max
  misc_feature (1)..(1186): Ceres Seq. ID no. 13582624
acactcatctcgtaaacaagcagcttgctagagcgggacaagcttggccatccttaaccttatttcgacatggcgaggtcgcccatggcgatgctcccgttcctggtgctcggggtagcagcactagtcctgtctgccgcgggaatggtggccgcgcagaagtgcggctgccgggcgaacgagtgctgcagccagtacggctactgcggcactaccgacgcctactgtggacaagggtgtcagtctggcccgtgctcggggagcggcggcggcggcgggaccggcgcctccgtggagagcgtcgtcaccgaggcgttcttcaacgggatcaagtcccgggccggcaacgggtgcgccggcaaaagcttttacacgcgccggtcgttcctggccggcgcccgggcgaaccccaacttcgggaaaggccgcacgggcgacgacggtaagagggagatagccgccttcttcgcccacgtcacacacgagaccggacacatgtgctacatcgaggagatcggcggggcgagccagaactactgcgacaggaagtacacgcagtggccgtgcgcctcggggaaggggtactacgggcgcgggccgcttcagctgacgtggaactacaactacggggcggcggggaagagcgtggggttcgacgggctgaacaacccggagaaggtggcgcaggacccggaggtggcgttcaaggcggcgctgtggttctggatgaacaacgtgaagcaggtcctgccgcgggggttcggcgcgacgaccagggcgatcaacagcggcgagtgcaacggcgggaacgcggccgccatgaacgcccgggcgggctactacagggcctactgcaagcagttcggcgtcgacccggggagcagcctcacttgctaggtgcttcgggcgggcctgatcgagatctgcatgcatagaacacgcatggcttatgtagaataaacgttcggcgtgcgcatacgcgtctaaagccgtccaaacaagaaataaagggcgaggatgtggtctagtacgtaccaagatccttgcagcagtactgttcacgagctctactctttttcctcatcaacaaacaaaaagagttatgttcttgtttattactcatgtttagatacatttgtatctagaaaaatctaatacgaataattcaggacggagttaatatttt

SEQ ID NO: 7128 - protein, 275 aa, Glycine max
  peptide (1)..(275): Ceres Seq. ID no. 13582625
  misc_feature (78)..(275): Pfam Name: Pfam Description:  Chitinase class I
  misc_feature (1)..(275): NCBI GI NO: 4741848 NR Description: chitinase IV precursor [Triticum aestivum]
  misc_feature (1)..(275): NCBI GI NO: 30793457 NR Description: chitinase [Oryza sativa (japonica cultivar-group)]
  misc_feature (6)..(275): NCBI GI NO: 38345417 NR Description: OSJNBb0091E11.8
  misc_feature (6)..(275): NCBI GI NO: 283037 NR Description: chitinase (EC 3.2.1.14) A - maize
  misc_feature (6)..(275): NCBI GI NO: 116329 NR Description: ENDOCHITINASE A PRECURSOR (SEED CHITINASE A)
  misc_feature (12)..(275): NCBI GI NO: 15213852 NR Description: chitinase-B [Sorghum halepense]
  misc_feature (10)..(275): NCBI GI NO: 116333 NR Description: ENDOCHITINASE B PRECURSOR (SEED CHITINASE B)
  misc_feature (12)..(275): NCBI GI NO: 482985 NR Description: chitinase (EC 3
  misc_feature (12)..(275): NCBI GI NO: 15213848 NR Description: chitinase-B [Saccharum officinarum]
  misc_feature (11)..(275): NCBI GI NO: 2570160 NR Description: chitinase [Chenopodium amaranticolor]
MARSPMAMLPFLVLGVAALVLSAAGMVAAQKCGCRANECCSQYGYCGTTDAYCGQGCQSGPCSGSGGGGGTGASVESVVTEAFFNGIKSRAGNGCAGKSFYTRRSFLAGARANPNFGKGRTGDDGKREIAAFFAHVTHETGHMCYIEEIGGASQNYCDRKYTQWPCASGKGYYGRGPLQLTWNYNYGAAGKSVGFDGLNNPEKVAQDPEVAFKAALWFWMNNVKQVLPRGFGATTRAINSGECNGGNAAAMNARAGYYRAYCKQFGVDPGSSLTC

SEQ ID NO: 7129 - protein, 270 aa, Glycine max
  peptide (1)..(270): Ceres Seq. ID no. 13582626
  misc_feature (73)..(270): Pfam Name: Pfam Description:  Chitinase class I
  misc_feature (1)..(270): NCBI GI NO: 4741848 NR Description: chitinase IV precursor [Triticum aestivum]
  misc_feature (1)..(270): NCBI GI NO: 30793457 NR Description: chitinase [Oryza sativa (japonica cultivar-group)]
  misc_feature (1)..(270): NCBI GI NO: 38345417 NR Description: OSJNBb0091E11.8
  misc_feature (1)..(270): NCBI GI NO: 283037 NR Description: chitinase (EC 3.2.1.14) A - maize
  misc_feature (1)..(270): NCBI GI NO: 116329 NR Description: ENDOCHITINASE A PRECURSOR (SEED CHITINASE A)
  misc_feature (7)..(270): NCBI GI NO: 15213852 NR Description: chitinase-B [Sorghum halepense]
  misc_feature (5)..(270): NCBI GI NO: 116333 NR Description: ENDOCHITINASE B PRECURSOR (SEED CHITINASE B)
  misc_feature (7)..(270): NCBI GI NO: 482985 NR Description: chitinase (EC 3
  misc_feature (7)..(270): NCBI GI NO: 15213848 NR Description: chitinase-B [Saccharum officinarum]
  misc_feature (6)..(270): NCBI GI NO: 2570160 NR Description: chitinase [Chenopodium amaranticolor]
MAMLPFLVLGVAALVLSAAGMVAAQKCGCRANECCSQYGYCGTTDAYCGQGCQSGPCSGSGGGGGTGASVESVVTEAFFNGIKSRAGNGCAGKSFYTRRSFLAGARANPNFGKGRTGDDGKREIAAFFAHVTHETGHMCYIEEIGGASQNYCDRKYTQWPCASGKGYYGRGPLQLTWNYNYGAAGKSVGFDGLNNPEKVAQDPEVAFKAALWFWMNNVKQVLPRGFGATTRAINSGECNGGNAAAMNARAGYYRAYCKQFGVDPGSSLTC

SEQ ID NO: 7130 - protein, 268 aa, Glycine max
  peptide (1)..(268): Ceres Seq. ID no. 13582627
  misc_feature (71)..(268): Pfam Name: Pfam Description:  Chitinase class I
  misc_feature (1)..(268): NCBI GI NO: 4741848 NR Description: chitinase IV precursor [Triticum aestivum]
  misc_feature (1)..(268): NCBI GI NO: 30793457 NR Description: chitinase [Oryza sativa (japonica cultivar-group)]
  misc_feature (1)..(268): NCBI GI NO: 38345417 NR Description: OSJNBb0091E11.8
  misc_feature (1)..(268): NCBI GI NO: 283037 NR Description: chitinase (EC 3.2.1.14) A - maize
  misc_feature (1)..(268): NCBI GI NO: 116329 NR Description: ENDOCHITINASE A PRECURSOR (SEED CHITINASE A)
  misc_feature (5)..(268): NCBI GI NO: 15213852 NR Description: chitinase-B [Sorghum halepense]
  misc_feature (3)..(268): NCBI GI NO: 116333 NR Description: ENDOCHITINASE B PRECURSOR (SEED CHITINASE B)
  misc_feature (5)..(268): NCBI GI NO: 482985 NR Description: chitinase (EC 3
  misc_feature (5)..(268): NCBI GI NO: 15213848 NR Description: chitinase-B [Saccharum officinarum]
  misc_feature (4)..(268): NCBI GI NO: 2570160 NR Description: chitinase [Chenopodium amaranticolor]
MLPFLVLGVAALVLSAAGMVAAQKCGCRANECCSQYGYCGTTDAYCGQGCQSGPCSGSGGGGGTGASVESVVTEAFFNGIKSRAGNGCAGKSFYTRRSFLAGARANPNFGKGRTGDDGKREIAAFFAHVTHETGHMCYIEEIGGASQNYCDRKYTQWPCASGKGYYGRGPLQLTWNYNYGAAGKSVGFDGLNNPEKVAQDPEVAFKAALWFWMNNVKQVLPRGFGATTRAINSGECNGGNAAAMNARAGYYRAYCKQFGVDPGSSLTC

SEQ ID NO: 7131 - DNA, 588 bp, Glycine max
  misc_feature (1)..(588): Ceres Seq. ID no. 12610503
gaacagctggtcgaagcgagcgcctggtctatcaatggcggaggagaccgagaccgagaagcagctcttctctccgtcggatgtctcgctccacgcatccacgaaggactgctgggtcgtcatccatggcaaggtgtacgatgtgaccaaattcctcgaggaccaccccggcggagaggatgtcctcctccatgcatctgcctctggggatgccacggaggcttttgaagatgtgggccacagcacatcagccatcagcatgatgagcagctacctgattggaagcatcgaggactttgtgcctcccagtgcaacgaaggacgccacagttggtggcagtgatgtgcttccagattccagaacaatgaagaggaacaaaggctctcctgctccaaacacatttctggacttcgtgctccctttatgcatgcttgtcctggcctttgtagcttggtactacctaaccttcgtggccgagagctagtaaattcggagaagattcatatcattgcacatttttacgtcactagtgttgctgcagcgatacatttaaggagcgtaaacttggtcatagaatcatttgctctc

SEQ ID NO: 7132 - protein, 160 aa, Glycine max
  peptide (1)..(160): Ceres Seq. ID no. 12610504
  misc_feature (22)..(97): Pfam Name: Pfam Description:  Cytochrome b5-like Heme/Steroid binding domain
  misc_feature (12)..(143): NCBI GI NO: 40644254 NR Description: cytochrome b5
  misc_feature (19)..(153): NCBI GI NO: 1076621 NR Description: cytochrome b5 - common tobacco
  misc_feature (19)..(153): NCBI GI NO: 1345882 NR Description: CYTOCHROME B5
  misc_feature (21)..(160): NCBI GI NO: 15239718 NR Description: cytochrome b5 (dbj|BAA74840
  misc_feature (19)..(147): NCBI GI NO: 15225731 NR Description: putative cytochrome b5; protein id: At2g32720.1
  misc_feature (18)..(153): NCBI GI NO: 15238776 NR Description: cytochrome b5 (dbj|BAA74839
  misc_feature (18)..(153): NCBI GI NO: 25044825 NR Description: cytochrome b5 [Ananas comosus]
  misc_feature (21)..(106): NCBI GI NO: 12229735 NR Description: Cytochrome b5
  misc_feature (19)..(153): NCBI GI NO: 37536104 NR Description: putative cytochrome
  misc_feature (18)..(153): NCBI GI NO: 729252 NR Description: Cytochrome B5
NSWSKRAPGLSMAEETETEKQLFSPSDVSLHASTKDCWVVIHGKVYDVTKFLEDHPGGEDVLLHASASGDATEAFEDVGHSTSAISMMSSYLIGSIEDFVPPSATKDATVGGSDVLPDSRTMKRNKGSPAPNTFLDFVLPLCMLVLAFVAWYYLTFVAES

SEQ ID NO: 7133 - protein, 149 aa, Glycine max
  peptide (1)..(149): Ceres Seq. ID no. 12610505
  misc_feature (11)..(86): Pfam Name: Pfam Description:  Cytochrome b5-like Heme/Steroid binding domain
  misc_feature (1)..(132): NCBI GI NO: 40644254 NR Description: cytochrome b5
  misc_feature (8)..(142): NCBI GI NO: 1076621 NR Description: cytochrome b5 - common tobacco
  misc_feature (8)..(142): NCBI GI NO: 1345882 NR Description: CYTOCHROME B5
  misc_feature (10)..(149): NCBI GI NO: 15239718 NR Description: cytochrome b5 (dbj|BAA74840
  misc_feature (8)..(136): NCBI GI NO: 15225731 NR Description: putative cytochrome b5; protein id: At2g32720.1
  misc_feature (7)..(142): NCBI GI NO: 15238776 NR Description: cytochrome b5 (dbj|BAA74839
  misc_feature (7)..(142): NCBI GI NO: 25044825 NR Description: cytochrome b5 [Ananas comosus]
  misc_feature (10)..(95): NCBI GI NO: 12229735 NR Description: Cytochrome b5
  misc_feature (8)..(142): NCBI GI NO: 37536104 NR Description: putative cytochrome
  misc_feature (7)..(142): NCBI GI NO: 729252 NR Description: Cytochrome B5
MAEETETEKQLFSPSDVSLHASTKDCWVVIHGKVYDVTKFLEDHPGGEDVLLHASASGDATEAFEDVGHSTSAISMMSSYLIGSIEDFVPPSATKDATVGGSDVLPDSRTMKRNKGSPAPNTFLDFVLPLCMLVLAFVAWYYLTFVAES

SEQ ID NO: 7134 - DNA, 551 bp, Glycine max
  misc_feature (1)..(551): Ceres Seq. ID no. 12610506
acacccaaagcacaccagcctcctcactcctcacagtcgcagcatcctctcagtcctcaccttcctcccctcgccaccacccccccaaggaaaggaggatgtcttgctgcggcggcaactgcggatgcggcgccggctgcaagtgcggcaacggctgcggcgggtgcaagatgttccccgacgttgaggccaccgccggcgccgccgccatggtcatgcccaccgcctcccacaaggggagctccggcgggttcgagacggccggcggggagaccggcggctgcgactgcaccacctgcaagtgcggcacggcctgcggctgctcctgctgcagctgcaactgagccggcgcccaggaggccggccggcgaggcgagcacgaggatgaggaggacaactggacaagcaaccaccaccaccaccaccaccatcactagccgctgcatgcgcccgcccgcgcgcgcgctgaataaaataaaaccgtcgtgtgttccttaactctgtacctgtacgcccgtgttttccaccagcagtgtccttgctcatcctcc

SEQ ID NO: 7135 - protein, 165 aa, Glycine max
  peptide (1)..(165): Ceres Seq. ID no. 12610507
  misc_feature (36)..(109): Pfam Name: Pfam Description:  Herpesvirus UL87 family
  misc_feature (28)..(136): NCBI GI NO: 7489436 NR Description: pZE40 protein - barley (fragment)
  misc_feature (16)..(149): NCBI GI NO: 32455965 NR Description: proline-rich extensin-like protein
  misc_feature (1)..(118): NCBI GI NO: 40994853 NR Description: tropinin I protein [Lethocerus indicus]
  misc_feature (25)..(165): NCBI GI NO: 805006 NR Description: pprB [Pseudomonas putida]
  misc_feature (3)..(165): NCBI GI NO: 31414574 NR Description: large tegument protein
  misc_feature (22)..(126): NCBI GI NO: 40994853 NR Description: tropinin I protein [Lethocerus indicus]
  misc_feature (4)..(128): NCBI GI NO: 22962211 NR Description: hypothetical protein [Rhodopseudomonas palustris]
  misc_feature (3)..(165): NCBI GI NO: 28493118 NR Description: unknown [Tropheryma whipplei str. Twist]
  misc_feature (1)..(160): NCBI GI NO: 7489917 NR Description: DNA topoisomerase (EC 5
  misc_feature (17)..(159): NCBI GI NO: 23000746 NR Description: hypothetical protein [Magnetococcus sp. MC-1]
TPKAHQPPHSSQSQHPLSPHLPPLATTPPRKGGCLAAAATADAAPAASAATAAAGARCSPTLRPPPAPPPWSCPPPPTRGAPAGSRRPAGRPAAATAPPASAARPAAAPAAAATEPAPRRPAGEASTRMRRTTGQATTTTTTTITSRCMRPPARALNKIKPSCVP

SEQ ID NO: 7136 - protein, 113 aa, Glycine max
  peptide (1)..(113): Ceres Seq. ID no. 12610508
  misc_feature (33)..(101): Pfam Name: Pfam Description:  Metallothionein
  misc_feature (33)..(113): NCBI GI NO: 100596 NR Description: metallothionein-like protein - barley
  misc_feature (33)..(113): NCBI GI NO: 2497904 NR Description: Metallothionein-like protein type 2
  misc_feature (33)..(112): NCBI GI NO: 23954355 NR Description: metallothioneine type2
  misc_feature (33)..(113): NCBI GI NO: 7441819 NR Description: metallothionein-like protein - rice
  misc_feature (33)..(113): NCBI GI NO: 7441818 NR Description: metallothionein-like protein - rice
  misc_feature (33)..(112): NCBI GI NO: 3900980 NR Description: unnamed protein product [Eichhornia crassipes]
  misc_feature (33)..(112): NCBI GI NO: 5777410 NR Description: metallothionein [Eichhornia crassipes]
  misc_feature (33)..(112): NCBI GI NO: 23954357 NR Description: metallothioneine type2
  misc_feature (25)..(112): NCBI GI NO: 32400768 NR Description: metallothionein [Triticum aestivum]
  misc_feature (33)..(112): NCBI GI NO: 8919689 NR Description: putative type II metallothionein
TQSTPASSLLTVAASSQSSPSSPRHHPPKERRMSCCGGNCGCGAGCKCGNGCGGCKMFPDVEATAGAAAMVMPTASHKGSSGGFETAGGETGGCDCTTCKCGTACGCSCCSCN

SEQ ID NO: 7137 - DNA, 645 bp, Glycine max
  misc_feature (1)..(645): Ceres Seq. ID no. 12583682
cacaagcaaagcataaacattactgatagttctcatccacaacacaatgatttccaatcccatgttaatgttactagttgtggtactgctggtggttggttttgcaaagtcagatttaagtaaggacagagaagaatgtgcagacaaactaattgacctagctagctgtgttccttacgttggtggtgaagccaaaacccccaccatagattgctgcactggtctcaaagcggttcttgaccggagcaagaaatgcctctgcatcctcatcaaagatcgcgacgaccccaatcttggcatcaagatcaatgctactctcgctattcagctaccctctgcttgccactcacctgctaatattactcagtgtgtagatcttttgcatttagcacctaactctcctgatgctaaggtgtttgagggattccaaaaatctgccaaaacaaacagctccaccccagtttcagtttccagtggtgctgagaagggatcaagctcaagtgctcaggaaaagagtggtgctgtctccacaattacaaaggcgcaccacctgttttactctatcttaccattaccattattatttcttgtttgaaccaccatcaagcttgcttgcttcatctatttctagctattattgtgtgc

SEQ ID NO: 7138 - protein, 182 aa, Glycine max
  peptide (1)..(182): Ceres Seq. ID no. 12583683
  misc_feature (31)..(108): Pfam Name: Pfam Description:  Protease inhibitor/seed storage/LTP family
  misc_feature (10)..(151): NCBI GI NO: 15224863 NR Description: unknown protein; protein id: At2g44300.1
  misc_feature (6)..(158): NCBI GI NO: 18405294 NR Description: expressed protein; protein id: At1g55260
  misc_feature (15)..(158): NCBI GI NO: 21537387 NR Description: unknown [Arabidopsis thaliana]
  misc_feature (10)..(168): NCBI GI NO: 15224862 NR Description: unknown protein; protein id: At2g44290.1
  misc_feature (8)..(159): NCBI GI NO: 34394084 NR Description: lipid transfer protein-like
  misc_feature (4)..(161): NCBI GI NO: 15231070 NR Description: putative protein; protein id: At3g58550
  misc_feature (6)..(161): NCBI GI NO: 21555220 NR Description: unknown [Arabidopsis thaliana]
  misc_feature (5)..(171): NCBI GI NO: 25553596 NR Description: OJ1656_E11.27
  misc_feature (1)..(181): NCBI GI NO: 15219578 NR Description: hypothetical protein; protein id: At1g73890.1
  misc_feature (29)..(177): NCBI GI NO: 21553541 NR Description: lipid transfer protein, putative
MISNPMLMLLVVVLLVVGFAKSDLSKDREECADKLIDLASCVPYVGGEAKTPTIDCCTGLKAVLDRSKKCLCILIKDRDDPNLGIKINATLAIQLPSACHSPANITQCVDLLHLAPNSPDAKVFEGFQKSAKTNSSTPVSVSSGAEKGSSSSAQEKSGAVSTITKAHHLFYSILPLPLLFLV

SEQ ID NO: 7139 - protein, 177 aa, Glycine max
  peptide (1)..(177): Ceres Seq. ID no. 12583684
  misc_feature (26)..(103): Pfam Name: Pfam Description:  Protease inhibitor/seed storage/LTP family
  misc_feature (5)..(146): NCBI GI NO: 15224863 NR Description: unknown protein; protein id: At2g44300.1
  misc_feature (1)..(153): NCBI GI NO: 18405294 NR Description: expressed protein; protein id: At1g55260
  misc_feature (10)..(153): NCBI GI NO: 21537387 NR Description: unknown [Arabidopsis thaliana]
  misc_feature (5)..(163): NCBI GI NO: 15224862 NR Description: unknown protein; protein id: At2g44290.1
  misc_feature (3)..(154): NCBI GI NO: 34394084 NR Description: lipid transfer protein-like
  misc_feature (1)..(156): NCBI GI NO: 15231070 NR Description: putative protein; protein id: At3g58550
  misc_feature (1)..(156): NCBI GI NO: 21555220 NR Description: unknown [Arabidopsis thaliana]
  misc_feature (1)..(166): NCBI GI NO: 25553596 NR Description: OJ1656_E11.27
  misc_feature (1)..(176): NCBI GI NO: 15219578 NR Description: hypothetical protein; protein id: At1g73890.1
  misc_feature (24)..(172): NCBI GI NO: 21553541 NR Description: lipid transfer protein, putative
MLMLLVVVLLVVGFAKSDLSKDREECADKLIDLASCVPYVGGEAKTPTIDCCTGLKAVLDRSKKCLCILIKDRDDPNLGIKINATLAIQLPSACHSPANITQCVDLLHLAPNSPDAKVFEGFQKSAKTNSSTPVSVSSGAEKGSSSSAQEKSGAVSTITKAHHLFYSILPLPLLFLV

SEQ ID NO: 7140 - protein, 175 aa, Glycine max
  peptide (1)..(175): Ceres Seq. ID no. 12583685
  misc_feature (24)..(101): Pfam Name: Pfam Description:  Protease inhibitor/seed storage/LTP family
  misc_feature (3)..(144): NCBI GI NO: 15224863 NR Description: unknown protein; protein id: At2g44300.1
  misc_feature (1)..(151): NCBI GI NO: 18405294 NR Description: expressed protein; protein id: At1g55260
  misc_feature (8)..(151): NCBI GI NO: 21537387 NR Description: unknown [Arabidopsis thaliana]
  misc_feature (3)..(161): NCBI GI NO: 15224862 NR Description: unknown protein; protein id: At2g44290.1
  misc_feature (1)..(152): NCBI GI NO: 34394084 NR Description: lipid transfer protein-like
  misc_feature (1)..(154): NCBI GI NO: 15231070 NR Description: putative protein; protein id: At3g58550
  misc_feature (1)..(154): NCBI GI NO: 21555220 NR Description: unknown [Arabidopsis thaliana]
  misc_feature (1)..(164): NCBI GI NO: 25553596 NR Description: OJ1656_E11.27
  misc_feature (1)..(174): NCBI GI NO: 15219578 NR Description: hypothetical protein; protein id: At1g73890.1
  misc_feature (22)..(170): NCBI GI NO: 21553541 NR Description: lipid transfer protein, putative
MLLVVVLLVVGFAKSDLSKDREECADKLIDLASCVPYVGGEAKTPTIDCCTGLKAVLDRSKKCLCILIKDRDDPNLGIKINATLAIQLPSACHSPANITQCVDLLHLAPNSPDAKVFEGFQKSAKTNSSTPVSVSSGAEKGSSSSAQEKSGAVSTITKAHHLFYSILPLPLLFLV

SEQ ID NO: 7141 - DNA, 894 bp, Glycine max
  misc_feature (1)..(894): Ceres Seq. ID no. 13639712
atcaattttcagtgcgttaaagatattgaaacagagacgattcttgtttgtcaattatctctgtgtttctgtgattcttctgttccattcgattcaaccctgaagccaaagaacaacaaggataagccttttaactagttttgtgcgttggatcatctgtttaagctcggcttaatcttaccttcaacacttcacaaggctgctcttgcgttagactgtgtttgaagaagaaccaaagatgtcatcggatgagaagaaccttatagagatcttggaggaaggccacaaagtcgatatagtcaagtacatcgattacgtcagtgcccctcaagccggcgccatagccacattctctggcactacgagagacatgttcgaaggcaaagcagtcttggagctaaggtacgaagcgtacgtaccaatggccacgcgaaccctcacctccatctgcacatccgctagatcaaactgggacatccacaagatcgctgtcgctcaccgtctagggccagttcccgttggagaaaccagcgtgttcattgcggtttcatctgttcaccgtggggatggtttagacgcttgtaagttcttgatcgatgagctaaaggcaacggttccgatttggaagaaggaggtgtacactaatggagagatctggaaggagaatagtgagtttctggagaagagagacggtctagtgaagaaagaacataaaagaagttgctgtggaagtaaagttagagtacaagaagatgaagaagagcataaagataacagttcttgattacttatagcaaagagcaatgtttttttttttttttctactctcgataagcaaattgtcttaaaacacacattgttgaatctaaagacttcaaattccaattcagttgc

SEQ ID NO: 7142 - protein, 181 aa, Glycine max
  peptide (1)..(181): Ceres Seq. ID no. 13639713
  misc_feature (10)..(126): Pfam Name: Pfam Description:  MoaE protein
  misc_feature (1)..(178): NCBI GI NO: 15224353 NR Description: molybdopterin synthase large subunit -related
  misc_feature (28)..(144): NCBI GI NO: 29243132 NR Description: putative molybdopterin synthase large subunit
  misc_feature (1)..(145): NCBI GI NO: 4758732 NR Description: molybdenum cofactor synthesis 2 large subunitMOSC2B
  misc_feature (6)..(145): NCBI GI NO: 12832907 NR Description: unnamed protein product [Mus musculus]
  misc_feature (6)..(145): NCBI GI NO: 19353410 NR Description: Mocs2 protein [Mus musculus]
  misc_feature (6)..(145): NCBI GI NO: 27687539 NR Description: similar to Molybdenum cofactor synthesis protein 2large subunit
  misc_feature (18)..(172): NCBI GI NO: 21356259 NR Description: CG10238-PA [Drosophila melanogaster]
  misc_feature (1)..(145): NCBI GI NO: 28830195 NR Description: hypothetical protein [Dictyostelium discoideum]
  misc_feature (6)..(131): NCBI GI NO: 7305279 NR Description: molybdenum cofactor synthesis 2 [Mus musculus]
  misc_feature (5)..(175): NCBI GI NO: 32420325 NR Description: hypothetical protein [Neurospora crassa]
MSSDEKNLIEILEEGHKVDIVKYIDYVSAPQAGAIATFSGTTRDMFEGKAVLELRYEAYVPMATRTLTSICTSARSNWDIHKIAVAHRLGPVPVGETSVFIAVSSVHRGDGLDACKFLIDELKATVPIWKKEVYTNGEIWKENSEFLEKRDGLVKKEHKRSCCGSKVRVQEDEEEHKDNSS

SEQ ID NO: 7143 - protein, 137 aa, Glycine max
  peptide (1)..(137): Ceres Seq. ID no. 13639714
  misc_feature (1)..(82): Pfam Name: Pfam Description:  MoaE protein
  misc_feature (1)..(134): NCBI GI NO: 15224353 NR Description: molybdopterin synthase large subunit -related
  misc_feature (1)..(100): NCBI GI NO: 29243132 NR Description: putative molybdopterin synthase large subunit
  misc_feature (1)..(101): NCBI GI NO: 4758732 NR Description: molybdenum cofactor synthesis 2 large subunitMOSC2B
  misc_feature (1)..(101): NCBI GI NO: 12832907 NR Description: unnamed protein product [Mus musculus]
  misc_feature (1)..(101): NCBI GI NO: 19353410 NR Description: Mocs2 protein [Mus musculus]
  misc_feature (1)..(101): NCBI GI NO: 27687539 NR Description: similar to Molybdenum cofactor synthesis protein 2large subunit
  misc_feature (1)..(128): NCBI GI NO: 21356259 NR Description: CG10238-PA [Drosophila melanogaster]
  misc_feature (1)..(101): NCBI GI NO: 28830195 NR Description: hypothetical protein [Dictyostelium discoideum]
  misc_feature (1)..(87): NCBI GI NO: 7305279 NR Description: molybdenum cofactor synthesis 2 [Mus musculus]
  misc_feature (1)..(131): NCBI GI NO: 32420325 NR Description: hypothetical protein [Neurospora crassa]
MFEGKAVLELRYEAYVPMATRTLTSICTSARSNWDIHKIAVAHRLGPVPVGETSVFIAVSSVHRGDGLDACKFLIDELKATVPIWKKEVYTNGEIWKENSEFLEKRDGLVKKEHKRSCCGSKVRVQEDEEEHKDNSS

SEQ ID NO: 7144 - protein, 120 aa, Glycine max
  peptide (1)..(120): Ceres Seq. ID no. 13639715
  misc_feature (1)..(65): Pfam Name: Pfam Description:  MoaE protein
  misc_feature (1)..(117): NCBI GI NO: 15224353 NR Description: molybdopterin synthase large subunit -related
  misc_feature (1)..(83): NCBI GI NO: 29243132 NR Description: putative molybdopterin synthase large subunit
  misc_feature (1)..(84): NCBI GI NO: 4758732 NR Description: molybdenum cofactor synthesis 2 large subunitMOSC2B
  misc_feature (1)..(84): NCBI GI NO: 12832907 NR Description: unnamed protein product [Mus musculus]
  misc_feature (1)..(84): NCBI GI NO: 19353410 NR Description: Mocs2 protein [Mus musculus]
  misc_feature (1)..(84): NCBI GI NO: 27687539 NR Description: similar to Molybdenum cofactor synthesis protein 2large subunit
  misc_feature (1)..(111): NCBI GI NO: 21356259 NR Description: CG10238-PA [Drosophila melanogaster]
  misc_feature (1)..(84): NCBI GI NO: 28830195 NR Description: hypothetical protein [Dictyostelium discoideum]
  misc_feature (1)..(70): NCBI GI NO: 7305279 NR Description: molybdenum cofactor synthesis 2 [Mus musculus]
  misc_feature (1)..(114): NCBI GI NO: 32420325 NR Description: hypothetical protein [Neurospora crassa]
MATRTLTSICTSARSNWDIHKIAVAHRLGPVPVGETSVFIAVSSVHRGDGLDACKFLIDELKATVPIWKKEVYTNGEIWKENSEFLEKRDGLVKKEHKRSCCGSKVRVQEDEEEHKDNSS

SEQ ID NO: 7145 - DNA, 737 bp, Glycine max
  misc_feature (1)..(737): Ceres Seq. ID no. 15178344
acattagctccatagttcaatagagagagtaaagagcagacataggaagagataaaatggccatggcaacaaaatcagtttcttacttcaccctcattttcatcctcgttttggtttttttttttgaagcgccggaaatagaagcgcaggatagcgagtgccttaaagaatacggcgggaatgtgggtttcggcttctgtgcgcctcagacatttccgacgatttgttatataagatgccgtgaggacaaggacgcgaaaggtggaagatgcattacgggagatgccggtgcttttgattttaaatgcttatgtgactactgcagtgacaaacctaatgaccagattctacatggtgtcatctgagtcctacatgtgtgatggtttgtgtaataataagtgttctaagtgataatgtaatagtaaggaatatgtgaaataaaaagctgaaagtatctgaggttcacatggtttgattttagatatgggctttgtggtagagaggcgaagagagtaattattaactttcatacacagaccacccgttctgatatttcttatcagaatgatttatttgggttacaacttgcaactaagctaaataatcgctacacgatttagctgcagttcaaagtttcagtcttgtgttaaaattgcgtgtgtctgtttgtgtgtgtgtcatcgtcgacatgttcatgtgtggtattaaaacgagttcacttcttcagtttgcaaact

SEQ ID NO: 7146 - protein, 102 aa, Glycine max
  peptide (1)..(102): Ceres Seq. ID no. 15178345
  misc_feature (1)..(102): NCBI GI NO: 1708577 NR Description: TRYPSIN INHIBITOR 2 PRECURSOR (MTI-2)
  misc_feature (3)..(93): NCBI GI NO: 15224297 NR Description: trypsin inhibitor -related [Arabidopsis thaliana]
  misc_feature (3)..(98): NCBI GI NO: 18406270 NR Description: expressed protein [Arabidopsis thaliana]
  misc_feature (3)..(98): NCBI GI NO: 15220249 NR Description: trypsin inhibitor 2 -related
  misc_feature (3)..(93): NCBI GI NO: 15224295 NR Description: trypsin inhibitor -related [Arabidopsis thaliana]
  misc_feature (26)..(93): NCBI GI NO: 28373448 NR Description: Chain A
  misc_feature (32)..(96): NCBI GI NO: 260921 NR Description: mustard trypsin inhibitor 2
  misc_feature (32)..(93): NCBI GI NO: 547742 NR Description: TRYPSIN INHIBITOR (RTI)
  misc_feature (6)..(91): NCBI GI NO: 3287863 NR Description: Putative trypsin inhibitor At2g43550 precursor
  misc_feature (6)..(91): NCBI GI NO: 18406274 NR Description: trypsin inhibitor -related [Arabidopsis thaliana]
MAMATKSVSYFTLIFILVLVFFFEAPEIEAQDSECLKEYGGNVGFGFCAPQTFPTICYIRCREDKDAKGGRCITGDAGAFDFKCLCDYCSDKPNDQILHGVI

SEQ ID NO: 7147 - protein, 100 aa, Glycine max
  peptide (1)..(100): Ceres Seq. ID no. 15178346
  misc_feature (1)..(100): NCBI GI NO: 1708577 NR Description: TRYPSIN INHIBITOR 2 PRECURSOR (MTI-2)
  misc_feature (1)..(91): NCBI GI NO: 15224297 NR Description: trypsin inhibitor -related [Arabidopsis thaliana]
  misc_feature (1)..(96): NCBI GI NO: 18406270 NR Description: expressed protein [Arabidopsis thaliana]
  misc_feature (1)..(96): NCBI GI NO: 15220249 NR Description: trypsin inhibitor 2 -related
  misc_feature (1)..(91): NCBI GI NO: 15224295 NR Description: trypsin inhibitor -related [Arabidopsis thaliana]
  misc_feature (24)..(91): NCBI GI NO: 28373448 NR Description: Chain A
  misc_feature (30)..(94): NCBI GI NO: 260921 NR Description: mustard trypsin inhibitor 2
  misc_feature (30)..(91): NCBI GI NO: 547742 NR Description: TRYPSIN INHIBITOR (RTI)
  misc_feature (4)..(89): NCBI GI NO: 3287863 NR Description: Putative trypsin inhibitor At2g43550 precursor
  misc_feature (4)..(89): NCBI GI NO: 18406274 NR Description: trypsin inhibitor -related [Arabidopsis thaliana]
MATKSVSYFTLIFILVLVFFFEAPEIEAQDSECLKEYGGNVGFGFCAPQTFPTICYIRCREDKDAKGGRCITGDAGAFDFKCLCDYCSDKPNDQILHGVI

SEQ ID NO: 7148 - DNA, 1347 bp, Glycine max
  misc_feature (1)..(1347): Ceres Seq. ID no. 13639090
agaacatcctaatcgaaaaaaatcagatctcgatcccaactttccccgaccttcgctgccctagttctcgattccctctttccccgatcttccccgccctagtttccgatccctagtttcctcgatctcgattctcggagttttcgcgcacctcgtcgaacatggcagcgatcatggcggcgcgcgggcaggggcaggtgcaagatttcgacttcttcgtggtggtggacttcgaggcgacgtgcgtgaaagacgcgcggatctttccgcaggaaatcattgagttccccgccgtgctcgtcgacggcgccaccggccgcatcgagtccgcgtttcgcaggtacgttcgtccaaaacatcaccctgtgctgacccaattttgcagggaactcaccggcatccggcaggaggacgtcgacggcggcgtggatctcggcgaggcgctctggatgcacgactcttggctgaaggcggcgacggcggggggagggagcttggccgtcgtgatctggggagattgggattgccgcaccatgctcgagtccgagtgccgcttcaaggggatagagaagccctcctacttcgatcgctggatcaacctgagggtccccttccaggctgcgctcggcggcggagggcgggtcaccctccaggaggcggtcagggcagcgggactggactgggagggccgcctgcactgcggactggacgacgcgcgcaacacggcgcggcttcttgttgagctgatgcggcgcggggtcaagatgaccatcaccggttcgctggcgccgccgccgccgatccagcagaaggagcagcccccgcagcttctcacaagctcttgcggtggctcatctgtgctggcgccgctgccgatgatccagcagaagcagcagtcgccgcagcttcgcacaagaccttgcggtggctcatcggcactggcgccgccgctgatccagcagaagcagcagccgccgcagccacacatgataagcccctgcggcggctcctctgcgacgtgcttctgctactgcagggtaccgaccagaggaggcgtggtgtccgtgccagggccgatgcagggcaagtgcttcttcgggtgtggcaactggacgccggccatgggacccgtgtgcccctacttcgtatggaccaactgaatgaaccacccatggcagggcaccagaatcagtgtagctcagctgttagtgtaaatcgtgctagccatcagaatcagagcttagctcggctgattctagccagtctaggtgtgaattggtctctggaatcgaatgtatttggtgtctgaattagtattatcaatagaaattctttttagttatgtcc

SEQ ID NO: 7149 - protein, 332 aa, Glycine max
  peptide (1)..(332): Ceres Seq. ID no. 15220453
  misc_feature (14)..(212): NCBI GI NO: 18087835 NR Description: hypothetical protein MGC16943 [Homo sapiens]
  misc_feature (14)..(208): NCBI GI NO: 13386250 NR Description: RIKEN cDNA 4933424N09 [Mus musculus]
  misc_feature (14)..(233): NCBI GI NO: 26325030 NR Description: unnamed protein product [Mus musculus]
  misc_feature (3)..(199): NCBI GI NO: 2852640 NR Description: unknown [Homo sapiens]
  misc_feature (3)..(199): NCBI GI NO: 37547043 NR Description: similar to prion protein interacting 1 like (30
  misc_feature (1)..(210): NCBI GI NO: 28573607 NR Description: CG6393-PA [Drosophila melanogaster]
  misc_feature (3)..(199): NCBI GI NO: 28174986 NR Description: Prnpip1 protein [Mus musculus]
  misc_feature (3)..(199): NCBI GI NO: 33859765 NR Description: prion protein interacting protein 1 [Mus musculus]
  misc_feature (13)..(210): NCBI GI NO: 24657520 NR Description: CG6393-PB [Drosophila melanogaster]
  misc_feature (14)..(207): NCBI GI NO: 17541516 NR Description: Exonuclease family member [Caenorhabditis elegans]
MAAIMAARGQGQVQDFDFFVVVDFEATCVKDARIFPQEIIEFPAVLVDGATGRIESAFRRYVRPKHHPVLTQFCRELTGIRQEDVDGGVDLGEALWMHDSWLKAATAGGGSLAVVIWGDWDCRTMLESECRFKGIEKPSYFDRWINLRVPFQAALGGGGRVTLQEAVRAAGLDWEGRLHCGLDDARNTARLLVELMRRGVKMTITGSLAPPPPIQQKEQPPQLLTSSCGGSSVLAPLPMIQQKQQSPQLRTRPCGGSSALAPPLIQQKQQPPQPHMISPCGGSSATCFCYCRVPTRGGVVSVPGPMQGKCFFGCGNWTPAMGPVCPYFVWTN

SEQ ID NO: 7150 - protein, 328 aa, Glycine max
  peptide (1)..(328): Ceres Seq. ID no. 15220454
  misc_feature (10)..(208): NCBI GI NO: 18087835 NR Description: hypothetical protein MGC16943 [Homo sapiens]
  misc_feature (10)..(204): NCBI GI NO: 13386250 NR Description: RIKEN cDNA 4933424N09 [Mus musculus]
  misc_feature (10)..(229): NCBI GI NO: 26325030 NR Description: unnamed protein product [Mus musculus]
  misc_feature (1)..(195): NCBI GI NO: 2852640 NR Description: unknown [Homo sapiens]
  misc_feature (1)..(195): NCBI GI NO: 37547043 NR Description: similar to prion protein interacting 1 like (30
  misc_feature (1)..(206): NCBI GI NO: 28573607 NR Description: CG6393-PA [Drosophila melanogaster]
  misc_feature (1)..(195): NCBI GI NO: 28174986 NR Description: Prnpip1 protein [Mus musculus]
  misc_feature (1)..(195): NCBI GI NO: 33859765 NR Description: prion protein interacting protein 1 [Mus musculus]
  misc_feature (9)..(206): NCBI GI NO: 24657520 NR Description: CG6393-PB [Drosophila melanogaster]
  misc_feature (10)..(203): NCBI GI NO: 17541516 NR Description: Exonuclease family member [Caenorhabditis elegans]
MAARGQGQVQDFDFFVVVDFEATCVKDARIFPQEIIEFPAVLVDGATGRIESAFRRYVRPKHHPVLTQFCRELTGIRQEDVDGGVDLGEALWMHDSWLKAATAGGGSLAVVIWGDWDCRTMLESECRFKGIEKPSYFDRWINLRVPFQAALGGGGRVTLQEAVRAAGLDWEGRLHCGLDDARNTARLLVELMRRGVKMTITGSLAPPPPIQQKEQPPQLLTSSCGGSSVLAPLPMIQQKQQSPQLRTRPCGGSSALAPPLIQQKQQPPQPHMISPCGGSSATCFCYCRVPTRGGVVSVPGPMQGKCFFGCGNWTPAMGPVCPYFVWTN

SEQ ID NO: 7151 - protein, 236 aa, Glycine max
  peptide (1)..(236): Ceres Seq. ID no. 15220455
  misc_feature (1)..(116): NCBI GI NO: 18087835 NR Description: hypothetical protein MGC16943 [Homo sapiens]
  misc_feature (1)..(112): NCBI GI NO: 13386250 NR Description: RIKEN cDNA 4933424N09 [Mus musculus]
  misc_feature (1)..(137): NCBI GI NO: 26325030 NR Description: unnamed protein product [Mus musculus]
  misc_feature (1)..(103): NCBI GI NO: 2852640 NR Description: unknown [Homo sapiens]
  misc_feature (1)..(103): NCBI GI NO: 37547043 NR Description: similar to prion protein interacting 1 like (30
  misc_feature (1)..(114): NCBI GI NO: 28573607 NR Description: CG6393-PA [Drosophila melanogaster]
  misc_feature (1)..(103): NCBI GI NO: 28174986 NR Description: Prnpip1 protein [Mus musculus]
  misc_feature (1)..(103): NCBI GI NO: 33859765 NR Description: prion protein interacting protein 1 [Mus musculus]
  misc_feature (1)..(114): NCBI GI NO: 24657520 NR Description: CG6393-PB [Drosophila melanogaster]
  misc_feature (1)..(111): NCBI GI NO: 17541516 NR Description: Exonuclease family member [Caenorhabditis elegans]
MHDSWLKAATAGGGSLAVVIWGDWDCRTMLESECRFKGIEKPSYFDRWINLRVPFQAALGGGGRVTLQEAVRAAGLDWEGRLHCGLDDARNTARLLVELMRRGVKMTITGSLAPPPPIQQKEQPPQLLTSSCGGSSVLAPLPMIQQKQQSPQLRTRPCGGSSALAPPLIQQKQQPPQPHMISPCGGSSATCFCYCRVPTRGGVVSVPGPMQGKCFFGCGNWTPAMGPVCPYFVWTN

SEQ ID NO: 7152 - DNA, 588 bp, Glycine max
  misc_feature (1)..(588): Ceres Seq. ID no. 13595222
atgagatgatgagtttgtcattttgttgaatcttatttgatccatcgatctctctcgattccgatcgcgaaaacacgatttgtttattcagcgacgaagacgatgatgaagatgcaaatcggtgtgctggcgtttctggtggctctctctgcgattgaatccggaatcgcttctcccaacaccgtccctgctttcctctggtctccgcatctccaggctggtaatggtgggatggatgaggctgtgaattatcaggtcatgtctgcaaaggatctagttgactctgtcttcacccaaggaggatggtcaaacattctgtgctctgagaagaaggttgagcaccctgttgttgatgttgcacttgtgttcatcggcagagagttactgtcttctgatgtttcttccaaaaggaactcggaaccttcccttgttaacacattgaatggtctctttacagcttccaacttctcattggcattcccatacatttctgcgccagaggaagaaaggatggagagtttattgctttcagggcttaaacaagcttgccctctgtttaaacacaataaagttggaacgggagggggg

SEQ ID NO: 7153 - protein, 162 aa, Glycine max
  peptide (1)..(162): Ceres Seq. ID no. 13595223
  misc_feature (1)..(158): NCBI GI NO: 24417230 NR Description: unknown [Arabidopsis thaliana]
  misc_feature (1)..(158): NCBI GI NO: 30682651 NR Description: expressed protein [Arabidopsis thaliana]
  misc_feature (53)..(116): NCBI GI NO: 25405838 NR Description: hypothetical protein T5A14.4
  misc_feature (117)..(158): NCBI GI NO: 21618303 NR Description: unknown [Arabidopsis thaliana]
MMKMQIGVLAFLVALSAIESGIASPNTVPAFLWSPHLQAGNGGMDEAVNYQVMSAKDLVDSVFTQGGWSNILCSEKKVEHPVVDVALVFIGRELLSSDVSSKRNSEPSLVNTLNGLFTASNFSLAFPYISAPEEERMESLLLSGLKQACPLFKHNKVGTGGG

SEQ ID NO: 7154 - protein, 161 aa, Glycine max
  peptide (1)..(161): Ceres Seq. ID no. 13595224
  misc_feature (1)..(157): NCBI GI NO: 24417230 NR Description: unknown [Arabidopsis thaliana]
  misc_feature (1)..(157): NCBI GI NO: 30682651 NR Description: expressed protein [Arabidopsis thaliana]
  misc_feature (52)..(115): NCBI GI NO: 25405838 NR Description: hypothetical protein T5A14.4
  misc_feature (116)..(157): NCBI GI NO: 21618303 NR Description: unknown [Arabidopsis thaliana]
MKMQIGVLAFLVALSAIESGIASPNTVPAFLWSPHLQAGNGGMDEAVNYQVMSAKDLVDSVFTQGGWSNILCSEKKVEHPVVDVALVFIGRELLSSDVSSKRNSEPSLVNTLNGLFTASNFSLAFPYISAPEEERMESLLLSGLKQACPLFKHNKVGTGGG

SEQ ID NO: 7155 - protein, 159 aa, Glycine max
  peptide (1)..(159): Ceres Seq. ID no. 13595225
  misc_feature (1)..(155): NCBI GI NO: 24417230 NR Description: unknown [Arabidopsis thaliana]
  misc_feature (1)..(155): NCBI GI NO: 30682651 NR Description: expressed protein [Arabidopsis thaliana]
  misc_feature (50)..(113): NCBI GI NO: 25405838 NR Description: hypothetical protein T5A14.4
  misc_feature (114)..(155): NCBI GI NO: 21618303 NR Description: unknown [Arabidopsis thaliana]
MQIGVLAFLVALSAIESGIASPNTVPAFLWSPHLQAGNGGMDEAVNYQVMSAKDLVDSVFTQGGWSNILCSEKKVEHPVVDVALVFIGRELLSSDVSSKRNSEPSLVNTLNGLFTASNFSLAFPYISAPEEERMESLLLSGLKQACPLFKHNKVGTGGG

SEQ ID NO: 7156 - DNA, 1210 bp, Glycine max
  misc_feature (1)..(1210): Ceres Seq. ID no. 13595240
acatcgccacaaagcctgcgcctccatccacctccctcccacacgctccccaccccccgcgccgccgctcgtcggagccccgcctcgccgtgtcaagcccgctaccaatcgagccctgaatggctgccggcaggggcattaaccagcttctgaggaaaactcttcagagccagtcttctggctcatctctgctttcttcatttcggggaaagcatgaagagtcctctgctggactgagagcattggctcttcttggagttggtgcttctggtcttttaagttttggtacgatagcatctgcagatgaagctgagcacggtttggcggctgcagagtacccctggccgcatgctggcatccttagctcatatgatcatgcatcaatccgccgtggacatcaagtttaccagcaagtgtgtgcatcttgtcactccatgtcattgatttcataccgtgatttggttggggtggcctatactgaggaggaaactaaggcaatggctgctgaaattgaagtggttgatggtcctaatgatgagggtgaaatgttcacacgtcctggcaagctgagtgatcgcttcccgcagccttatccaaatgaacaagcagcccgatttgcaaatggtggggcatatcccccagatctcagccttatcacgaaggcaaggcacgatggccagaactacgtgtttgctcttcttactggttaccatgacccacctgctggtgttcagattcgtgagggtctgcattacaatccctacttccctggtggtgccatagccatgcctaagatgcttatggatggagctattgagtatgaagatggtactcctgcaactgaagctcagatgggcaaggatgttgtgtcattcttgtcgtgggctgctgagcctgaaatggaagagaggaaactgatgggtgtcaaatggatcttcctactgtcacttgctcttctccaagccgcatactaccgtcgcatgaggtggtccgtcctcaagtcccgcaagctggtcctggacgtcgtcaactgatgaccattgtttcttctttttattgcaacgttgaggctttaagcagaagcgatcgaaataatgacttccgttgtatatttttgctactggggttgtctcccatcataccttgggtacaatctcttttgttttcttcctctgctgcaaaagcatttctccaaggagcagttattttc

SEQ ID NO: 7157 - protein, 304 aa, Glycine max
  peptide (1)..(304): Ceres Seq. ID no. 13595241
  misc_feature (70)..(294): Pfam Name: Pfam Description:  Cytochrome C1 family
  misc_feature (1)..(304): NCBI GI NO: 34907202 NR Description: putative cytochrome c1 precursor
  misc_feature (1)..(304): NCBI GI NO: 21593678 NR Description: cytochrome c, putative [Arabidopsis thaliana]
  misc_feature (1)..(304): NCBI GI NO: 15232125 NR Description: cytochrome c -related [Arabidopsis thaliana]
  misc_feature (1)..(304): NCBI GI NO: 15809956 NR Description: AT3g27240/K17E12_6 [Arabidopsis thaliana]
  misc_feature (1)..(304): NCBI GI NO: 15237497 NR Description: cytochrome c1 precursor [Arabidopsis thaliana]
  misc_feature (1)..(304): NCBI GI NO: 15215624 NR Description: AT5g40810/MHK7_4 [Arabidopsis thaliana]
  misc_feature (5)..(304): NCBI GI NO: 82263 NR Description: ubiquinol-cytochrome-c reductase (EC 1
  misc_feature (5)..(304): NCBI GI NO: 7547401 NR Description: cytochrome c1 precursor [Solanum tuberosum]
  misc_feature (5)..(304): NCBI GI NO: 117765 NR Description: Cytochrome c1
  misc_feature (45)..(304): NCBI GI NO: 82264 NR Description: ubiquinol-cytochrome-c reductase (EC 1
MAAGRGINQLLRKTLQSQSSGSSLLSSFRGKHEESSAGLRALALLGVGASGLLSFGTIASADEAEHGLAAAEYPWPHAGILSSYDHASIRRGHQVYQQVCASCHSMSLISYRDLVGVAYTEEETKAMAAEIEVVDGPNDEGEMFTRPGKLSDRFPQPYPNEQAARFANGGAYPPDLSLITKARHDGQNYVFALLTGYHDPPAGVQIREGLHYNPYFPGGAIAMPKMLMDGAIEYEDGTPATEAQMGKDVVSFLSWAAEPEMEERKLMGVKWIFLLSLALLQAAYYRRMRWSVLKSRKLVLDVVN

SEQ ID NO: 7158 - protein, 199 aa, Glycine max
  peptide (1)..(199): Ceres Seq. ID no. 13595242
  misc_feature (1)..(189): Pfam Name: Pfam Description:  Cytochrome C1 family
  misc_feature (1)..(199): NCBI GI NO: 34907202 NR Description: putative cytochrome c1 precursor
  misc_feature (1)..(199): NCBI GI NO: 21593678 NR Description: cytochrome c, putative [Arabidopsis thaliana]
  misc_feature (1)..(199): NCBI GI NO: 15232125 NR Description: cytochrome c -related [Arabidopsis thaliana]
  misc_feature (1)..(199): NCBI GI NO: 15809956 NR Description: AT3g27240/K17E12_6 [Arabidopsis thaliana]
  misc_feature (1)..(199): NCBI GI NO: 15237497 NR Description: cytochrome c1 precursor [Arabidopsis thaliana]
  misc_feature (1)..(199): NCBI GI NO: 15215624 NR Description: AT5g40810/MHK7_4 [Arabidopsis thaliana]
  misc_feature (1)..(199): NCBI GI NO: 82263 NR Description: ubiquinol-cytochrome-c reductase (EC 1
  misc_feature (1)..(199): NCBI GI NO: 7547401 NR Description: cytochrome c1 precursor [Solanum tuberosum]
  misc_feature (1)..(199): NCBI GI NO: 117765 NR Description: Cytochrome c1
  misc_feature (1)..(199): NCBI GI NO: 82264 NR Description: ubiquinol-cytochrome-c reductase (EC 1
MSLISYRDLVGVAYTEEETKAMAAEIEVVDGPNDEGEMFTRPGKLSDRFPQPYPNEQAARFANGGAYPPDLSLITKARHDGQNYVFALLTGYHDPPAGVQIREGLHYNPYFPGGAIAMPKMLMDGAIEYEDGTPATEAQMGKDVVSFLSWAAEPEMEERKLMGVKWIFLLSLALLQAAYYRRMRWSVLKSRKLVLDVVN

SEQ ID NO: 7159 - protein, 178 aa, Glycine max
  peptide (1)..(178): Ceres Seq. ID no. 13595243
  misc_feature (1)..(168): Pfam Name: Pfam Description:  Cytochrome C1 family
  misc_feature (1)..(178): NCBI GI NO: 34907202 NR Description: putative cytochrome c1 precursor
  misc_feature (1)..(178): NCBI GI NO: 21593678 NR Description: cytochrome c, putative [Arabidopsis thaliana]
  misc_feature (1)..(178): NCBI GI NO: 15232125 NR Description: cytochrome c -related [Arabidopsis thaliana]
  misc_feature (1)..(178): NCBI GI NO: 15809956 NR Description: AT3g27240/K17E12_6 [Arabidopsis thaliana]
  misc_feature (1)..(178): NCBI GI NO: 15237497 NR Description: cytochrome c1 precursor [Arabidopsis thaliana]
  misc_feature (1)..(178): NCBI GI NO: 15215624 NR Description: AT5g40810/MHK7_4 [Arabidopsis thaliana]
  misc_feature (1)..(178): NCBI GI NO: 82263 NR Description: ubiquinol-cytochrome-c reductase (EC 1
  misc_feature (1)..(178): NCBI GI NO: 7547401 NR Description: cytochrome c1 precursor [Solanum tuberosum]
  misc_feature (1)..(178): NCBI GI NO: 117765 NR Description: Cytochrome c1
  misc_feature (1)..(178): NCBI GI NO: 82264 NR Description: ubiquinol-cytochrome-c reductase (EC 1
MAAEIEVVDGPNDEGEMFTRPGKLSDRFPQPYPNEQAARFANGGAYPPDLSLITKARHDGQNYVFALLTGYHDPPAGVQIREGLHYNPYFPGGAIAMPKMLMDGAIEYEDGTPATEAQMGKDVVSFLSWAAEPEMEERKLMGVKWIFLLSLALLQAAYYRRMRWSVLKSRKLVLDVVN

SEQ ID NO: 7160 - DNA, 1256 bp, Glycine max
  misc_feature (1)..(1256): Ceres Seq. ID no. 12781936
acggcagagttttcccctttcccccctccccactcgccaaaaatcctcgatccaaatccccactccggcgacgcgacgcggccatgcgcagctgccgataggcgacgactgcagcgaccacgcgtgagcggccatggacgagggctacgccagcctccccaccagccacctcctcggctccgtccccgctgtggctgtggctcccgatgagaggaagcccggtgctcccgccgaagttggaaatgccgctgccacctcgcgcctgcagcagtttccgcctgctcctgctgcgaacggaggagggtaccagcctccagggagccctctaggtggagatgtagaaacacagacaaactggaaaggatacttcaatgttgcctcttatactccatatttcaatgttgatactgatgtcgttgttgacagacttatcagttcagtttatccaatggagggatttttcaggaagatagatgttaatcctgacatgtatgggcccttatggatcaccactacactgatatttatgctggctgcattcggaaactttgccacttatctaatgcaaaggaaaagtgatctgaatatatggaactttgatgttagctatttcagtttggcggcatcagtcatgtacggttatgctatcgtggtacctgctgcattctttttcctgtttcagtactttggatcacgcccaagccttatccggttttggtgtatgtggggctattctctgtttatcttcgtaccagcatctatactgctacttattcccgtggaatttcttcgctgggtcatcatagctggtgccggtggtgcatcatcttggttcatctttttaaacttgaaggaatgcaccgaaggagctgatatgatggctttgatcgcaagtgcatcagtgctgcagtttgctctggcactgttcatcaaagttttcttttttgcctgagatctattctgtgttgcttcaggtgagctggatgttttctttgtgtccccgtcgttctgttctgccattcatctttctgaggaccaggcagtggactagtttcaccctacatacatattgaccctagatttgatagaccttgggagtgtctgttttcaagatttttgactctgtgtagttaagggaatttcactgtgtgcgttccagtgcgaagttactaagtttgccatctaaatttgcacctggtgaactttctgccaccgtgctgtacaacaacggtggttagcaagaatgtgaagctctc

SEQ ID NO: 7161 - protein, 272 aa, Glycine max
  peptide (1)..(272): Ceres Seq. ID no. 12781937
  misc_feature (88)..(244): Pfam Name: Pfam Description:  Yip1 domain
  misc_feature (1)..(271): NCBI GI NO: 30688039 NR Description: expressed protein [Arabidopsis thaliana]
  misc_feature (5)..(271): NCBI GI NO: 30690667 NR Description: expressed protein [Arabidopsis thaliana]
  misc_feature (5)..(271): NCBI GI NO: 38564308 NR Description: At5g27490 [Arabidopsis thaliana]
  misc_feature (5)..(271): NCBI GI NO: 6729038 NR Description: unknown protein [Arabidopsis thaliana]
  misc_feature (5)..(271): NCBI GI NO: 30679454 NR Description: expressed protein [Arabidopsis thaliana]
  misc_feature (4)..(271): NCBI GI NO: 34912560 NR Description: P0410E03.18
  misc_feature (41)..(271): NCBI GI NO: 18859855 NR Description: CG4645-PA [Drosophila melanogaster]
  misc_feature (54)..(272): NCBI GI NO: 40740298 NR Description: hypothetical protein AN4017.2
  misc_feature (60)..(271): NCBI GI NO: 17536971 NR Description: Putative membrane protein
  misc_feature (33)..(271): NCBI GI NO: 13128976 NR Description: hypothetical protein MGC3262 [Homo sapiens]
MDEGYASLPTSHLLGSVPAVAVAPDERKPGAPAEVGNAAATSRLQQFPPAPAANGGGYQPPGSPLGGDVETQTNWKGYFNVASYTPYFNVDTDVVVDRLISSVYPMEGFFRKIDVNPDMYGPLWITTTLIFMLAAFGNFATYLMQRKSDLNIWNFDVSYFSLAASVMYGYAIVVPAAFFFLFQYFGSRPSLIRFWCMWGYSLFIFVPASILLLIPVEFLRWVIIAGAGGASSWFIFLNLKECTEGADMMALIASASVLQFALALFIKVFFFA

SEQ ID NO: 7162 - protein, 167 aa, Glycine max
  peptide (1)..(167): Ceres Seq. ID no. 12781938
  misc_feature (1)..(139): Pfam Name: Pfam Description:  Yip1 domain
  misc_feature (1)..(166): NCBI GI NO: 30688039 NR Description: expressed protein [Arabidopsis thaliana]
  misc_feature (1)..(166): NCBI GI NO: 30690667 NR Description: expressed protein [Arabidopsis thaliana]
  misc_feature (1)..(166): NCBI GI NO: 38564308 NR Description: At5g27490 [Arabidopsis thaliana]
  misc_feature (1)..(166): NCBI GI NO: 6729038 NR Description: unknown protein [Arabidopsis thaliana]
  misc_feature (1)..(166): NCBI GI NO: 30679454 NR Description: expressed protein [Arabidopsis thaliana]
  misc_feature (1)..(166): NCBI GI NO: 34912560 NR Description: P0410E03.18
  misc_feature (1)..(166): NCBI GI NO: 18859855 NR Description: CG4645-PA [Drosophila melanogaster]
  misc_feature (1)..(167): NCBI GI NO: 40740298 NR Description: hypothetical protein AN4017.2
  misc_feature (1)..(166): NCBI GI NO: 17536971 NR Description: Putative membrane protein
  misc_feature (1)..(166): NCBI GI NO: 13128976 NR Description: hypothetical protein MGC3262 [Homo sapiens]
MEGFFRKIDVNPDMYGPLWITTTLIFMLAAFGNFATYLMQRKSDLNIWNFDVSYFSLAASVMYGYAIVVPAAFFFLFQYFGSRPSLIRFWCMWGYSLFIFVPASILLLIPVEFLRWVIIAGAGGASSWFIFLNLKECTEGADMMALIASASVLQFALALFIKVFFFA

SEQ ID NO: 7163 - protein, 154 aa, Glycine max
  peptide (1)..(154): Ceres Seq. ID no. 12781939
  misc_feature (1)..(126): Pfam Name: Pfam Description:  Yip1 domain
  misc_feature (1)..(153): NCBI GI NO: 30688039 NR Description: expressed protein [Arabidopsis thaliana]
  misc_feature (1)..(153): NCBI GI NO: 30690667 NR Description: expressed protein [Arabidopsis thaliana]
  misc_feature (1)..(153): NCBI GI NO: 38564308 NR Description: At5g27490 [Arabidopsis thaliana]
  misc_feature (1)..(153): NCBI GI NO: 6729038 NR Description: unknown protein [Arabidopsis thaliana]
  misc_feature (1)..(153): NCBI GI NO: 30679454 NR Description: expressed protein [Arabidopsis thaliana]
  misc_feature (1)..(153): NCBI GI NO: 34912560 NR Description: P0410E03.18
  misc_feature (1)..(153): NCBI GI NO: 18859855 NR Description: CG4645-PA [Drosophila melanogaster]
  misc_feature (1)..(154): NCBI GI NO: 40740298 NR Description: hypothetical protein AN4017.2
  misc_feature (1)..(153): NCBI GI NO: 17536971 NR Description: Putative membrane protein
  misc_feature (1)..(153): NCBI GI NO: 13128976 NR Description: hypothetical protein MGC3262 [Homo sapiens]
MYGPLWITTTLIFMLAAFGNFATYLMQRKSDLNIWNFDVSYFSLAASVMYGYAIVVPAAFFFLFQYFGSRPSLIRFWCMWGYSLFIFVPASILLLIPVEFLRWVIIAGAGGASSWFIFLNLKECTEGADMMALIASASVLQFALALFIKVFFFA

SEQ ID NO: 7164 - DNA, 999 bp, Glycine max
  misc_feature (1)..(999): Ceres Seq. ID no. 12781940
catccatccaccattcatccatcagccacttcacaccagcaagtggcagtagtgcgatccacacaagtttaggcatggcgactccgagagcactcgccctctgcgtcctgctggcgatggccgtcgccaacaccgaggcggcgtcagtcgtcgtcggcctggccaagtgcgccgactgcaccaggaagaacatgcagaccgaggaagccttcaaggctgtgcaggtggcgatcaagtgcaagaacagcgccggcgagtacgagagcaaggcggtgggcggcctcgacggcaccggcgccttcagcgtgcccctggctgccaacctccacggcgccgactgcgtcgctcagctccacagcgccgtctccaacgcgccctgccccggccaggagccgtccaagatcgtgccggtgtccgagggcaccacgtacggcgtcgtcgctggcgagaacgccgccacgccgtctgccgcatcgccggagtgtgcgtccatgaccctatgcgggccgatcaagaagcacatcatcgagcacttccaccacaagaagcctgtgccgccgaagccggagcccaagccccagccccacccggactacggccccgtgcccaagcccgagcccaagccgcagccccacccggactaccacccagtccctcccacccccacctacggcggaggcggcggtggtggataccacggacaccactgagtccagtctaccattgtactcctgcccagcgggttggttgtcagtgagtgatcgacgttgctatttatgatcggtttgcatgggtgggtgcattgtttggtcttctgccattcgctgccccattttagtatctgcactgcagtctgagagttcataataacagctctacgcgtgtgtatcaggcaagtgtgtgggtgtggttggtgtgtttgcttctgtaatttcggtgagttctcttgtagtacaaaggtttttatgaatcaagtaatttaaatcaagtcgattttgt

SEQ ID NO: 7165 - protein, 235 aa, Glycine max
  peptide (1)..(235): Ceres Seq. ID no. 12781941
  misc_feature (28)..(224): NCBI GI NO: 6689616 NR Description: proline-rich protein [Zea mays]
  misc_feature (28)..(221): NCBI GI NO: 37531088 NR Description: putative proline-rich protein
  misc_feature (28)..(221): NCBI GI NO: 37531094 NR Description: putative proline-rich protein
  misc_feature (28)..(221): NCBI GI NO: 37531092 NR Description: putative proline-rich protein
  misc_feature (28)..(221): NCBI GI NO: 18676394 NR Description: proline-rich protein [Oryza sativa]
  misc_feature (32)..(228): NCBI GI NO: 37531064 NR Description: putative proline-rich protein
  misc_feature (31)..(221): NCBI GI NO: 7489265 NR Description: proline-rich protein GPP1 - potato
  misc_feature (171)..(219): NCBI GI NO: 37531092 NR Description: putative proline-rich protein
  misc_feature (171)..(219): NCBI GI NO: 37531094 NR Description: putative proline-rich protein
  misc_feature (173)..(224): NCBI GI NO: 6689616 NR Description: proline-rich protein [Zea mays]
SIHHSSISHFTPASGSSAIHTSLGMATPRALALCVLLAMAVANTEAASVVVGLAKCADCTRKNMQTEEAFKAVQVAIKCKNSAGEYESKAVGGLDGTGAFSVPLAANLHGADCVAQLHSAVSNAPCPGQEPSKIVPVSEGTTYGVVAGENAATPSAASPECASMTLCGPIKKHIIEHFHHKKPVPPKPEPKPQPHPDYGPVPKPEPKPQPHPDYHPVPPTPTYGGGGGGGYHGHH

SEQ ID NO: 7166 - protein, 211 aa, Glycine max
  peptide (1)..(211): Ceres Seq. ID no. 12781942
  misc_feature (4)..(200): NCBI GI NO: 6689616 NR Description: proline-rich protein [Zea mays]
  misc_feature (4)..(197): NCBI GI NO: 37531088 NR Description: putative proline-rich protein
  misc_feature (4)..(197): NCBI GI NO: 37531094 NR Description: putative proline-rich protein
  misc_feature (4)..(197): NCBI GI NO: 37531092 NR Description: putative proline-rich protein
  misc_feature (4)..(197): NCBI GI NO: 18676394 NR Description: proline-rich protein [Oryza sativa]
  misc_feature (8)..(204): NCBI GI NO: 37531064 NR Description: putative proline-rich protein
  misc_feature (7)..(197): NCBI GI NO: 7489265 NR Description: proline-rich protein GPP1 - potato
  misc_feature (147)..(195): NCBI GI NO: 37531092 NR Description: putative proline-rich protein
  misc_feature (147)..(195): NCBI GI NO: 37531094 NR Description: putative proline-rich protein
  misc_feature (149)..(200): NCBI GI NO: 6689616 NR Description: proline-rich protein [Zea mays]
MATPRALALCVLLAMAVANTEAASVVVGLAKCADCTRKNMQTEEAFKAVQVAIKCKNSAGEYESKAVGGLDGTGAFSVPLAANLHGADCVAQLHSAVSNAPCPGQEPSKIVPVSEGTTYGVVAGENAATPSAASPECASMTLCGPIKKHIIEHFHHKKPVPPKPEPKPQPHPDYGPVPKPEPKPQPHPDYHPVPPTPTYGGGGGGGYHGHH

SEQ ID NO: 7167 - protein, 197 aa, Glycine max
  peptide (1)..(197): Ceres Seq. ID no. 12781943
  misc_feature (1)..(186): NCBI GI NO: 6689616 NR Description: proline-rich protein [Zea mays]
  misc_feature (1)..(183): NCBI GI NO: 37531088 NR Description: putative proline-rich protein
  misc_feature (1)..(183): NCBI GI NO: 37531094 NR Description: putative proline-rich protein
  misc_feature (1)..(183): NCBI GI NO: 37531092 NR Description: putative proline-rich protein
  misc_feature (1)..(183): NCBI GI NO: 18676394 NR Description: proline-rich protein [Oryza sativa]
  misc_feature (1)..(190): NCBI GI NO: 37531064 NR Description: putative proline-rich protein
  misc_feature (1)..(183): NCBI GI NO: 7489265 NR Description: proline-rich protein GPP1 - potato
  misc_feature (133)..(181): NCBI GI NO: 37531092 NR Description: putative proline-rich protein
  misc_feature (133)..(181): NCBI GI NO: 37531094 NR Description: putative proline-rich protein
  misc_feature (135)..(186): NCBI GI NO: 6689616 NR Description: proline-rich protein [Zea mays]
MAVANTEAASVVVGLAKCADCTRKNMQTEEAFKAVQVAIKCKNSAGEYESKAVGGLDGTGAFSVPLAANLHGADCVAQLHSAVSNAPCPGQEPSKIVPVSEGTTYGVVAGENAATPSAASPECASMTLCGPIKKHIIEHFHHKKPVPPKPEPKPQPHPDYGPVPKPEPKPQPHPDYHPVPPTPTYGGGGGGGYHGHH

SEQ ID NO: 7168 - DNA, 724 bp, Glycine max
  misc_feature (1)..(724): Ceres Seq. ID no. 13594970
gcttttgttgttcggttagcaccagcgaaacgcagagcgagaggccgaggaagcgatagctctagcgataaggcactgacggatcaatggctgccacggcgtactccgtggccctcctcggtggggcgcgcctccccgccgccaccggcaacctcgccccccgctcctccgcactcctcccgcggcgcaacctccacccgctccgcctccaagatgcgcccaggccgtccctgctccgcgtgaaggccgcctccgacgacacgtcggctagcggcgacgagatcatcgaggacctgaaagggaagtgggaggcgattgaggacaagcccaccttcctcctctacagcggcggcgccgtcgtggctctctggctcaccaccgtcgtcgtcggcgccatcaactccgtgccgttgctccccaagctcctggagctggttgggctcggctacaccgggtggttcgtgtaccgctacctcctcttcaaggaaagcaggaaagagttggccaccgacatcgagagcttgaagaagaagatcgccggaacagaataaactcaagttctctggaacgttttttatggctcttttgtctgtccatgtaatggaagaacacctacttgcttagagtaccatccactgcatttgtgtgttacatacatatctgtatgaacaaagaaatatgctttggttggtgtgcggtgacaatagtgaaattgtatcagttc

SEQ ID NO: 7169 - protein, 154 aa, Glycine max
  peptide (1)..(154): Ceres Seq. ID no. 13594971
  misc_feature (1)..(154): NCBI GI NO: 18411555 NR Description: expressed protein [Arabidopsis thaliana]
  misc_feature (1)..(154): NCBI GI NO: 687677 NR Description: unknown
  misc_feature (1)..(154): NCBI GI NO: 38175474 NR Description: unknown protein
  misc_feature (56)..(154): NCBI GI NO: 7485852 NR Description: hypothetical protein F20D10
  misc_feature (56)..(154): NCBI GI NO: 18420175 NR Description: expressed protein [Arabidopsis thaliana]
  misc_feature (55)..(153): NCBI GI NO: 34393236 NR Description: unknown protein
  misc_feature (65)..(153): NCBI GI NO: 18407178 NR Description: expressed protein [Arabidopsis thaliana]
  misc_feature (65)..(153): NCBI GI NO: 21555057 NR Description: unknown [Arabidopsis thaliana]
  misc_feature (35)..(151): NCBI GI NO: 18403896 NR Description: expressed protein [Arabidopsis thaliana]
  misc_feature (16)..(150): NCBI GI NO: 37536446 NR Description: hypothetical protein
MAATAYSVALLGGARLPAATGNLAPRSSALLPRRNLHPLRLQDAPRPSLLRVKAASDDTSASGDEIIEDLKGKWEAIEDKPTFLLYSGGAVVALWLTTVVVGAINSVPLLPKLLELVGLGYTGWFVYRYLLFKESRKELATDIESLKKKIAGTE

SEQ ID NO: 7170 - protein, 80 aa, Glycine max
  peptide (1)..(80): Ceres Seq. ID no. 13594972
  misc_feature (7)..(80): NCBI GI NO: 11359723 NR Description: proteophosphoglycan, membrane-associated
  misc_feature (7)..(80): NCBI GI NO: 5420387 NR Description: proteophosphoglycan [Leishmania major]
  misc_feature (7)..(80): NCBI GI NO: 11359723 NR Description: proteophosphoglycan, membrane-associated
  misc_feature (7)..(80): NCBI GI NO: 11359723 NR Description: proteophosphoglycan, membrane-associated
AFVVRLAPAKRRARGRGSDSSSDKALTDQWLPRRTPWPSSVGRASPPPPATSPPAPPHSSRGATSTRSASKMRPGRPCSA

SEQ ID NO: 7171 - DNA, 786 bp, Glycine max
  misc_feature (1)..(786): Ceres Seq. ID no. 13595226
ggccaaggccgtttgcaccttatttcgccttacacctcaccatcgacttacatacttctgttggccggagccacacgagctagcaccaccgacaaacaataccttgctgttctgagctcgccgtcccgatggcaagcaccaacatggcgtcggccacctccagattcatgctggcggcgggcatccccagcggctccaacggcggcgtgggcagccgcgtcagcttcgtcccgtccaaccggctcggctggaagctcgtggcccgcgccgaggaggagccgactgccgccgcaccggcggaaccagcaccggccgcggaggagaaaccggaagccgccgtggccaccaaagagcccgccaaagccaagccgccgccaaggggacccaagaggggaaccaaggtgaagattctgaggagggagtcctactggtacaacgggaccggatccgtcgtcacggttgatcaggatcccaacacccgttacccggtggtggtgcgtttcgccaaggtgaactacgccggcgtgtcgaccaacaactacgccctggacgagatcaaggaggttgctgcttaagcgaacgaggctagctgccatgtgctccatccaatgtttgtatcagtagctcgtcgagtgacgatgtgaatgttagcctctcacaaaccttatgtgtaatacctctgcgattatatgtatttgcctgcttcctcatggacctaataatctccttctgttgcttaaaatgattgtattcttgctcacttttgtacaaaagatcggttgttcg

SEQ ID NO: 7172 - protein, 148 aa, Glycine max
  peptide (1)..(148): Ceres Seq. ID no. 15221513
  misc_feature (86)..(147): Pfam Name: Pfam Description:  Photosystem I reaction centre subunit IV / PsaE
  misc_feature (1)..(148): NCBI GI NO: 131176 NR Description: Photosystem I reaction center subunit IV
  misc_feature (1)..(146): NCBI GI NO: 34394725 NR Description: putative Photosystem I reaction center subunit IV
  misc_feature (6)..(148): NCBI GI NO: 24030202 NR Description: putative photosystem I subunit PSI-E protein
  misc_feature (6)..(148): NCBI GI NO: 30688100 NR Description: photosystem I subunit PSI-E - like protein
  misc_feature (6)..(146): NCBI GI NO: 15225331 NR Description: photosystem I reaction center subunit IV -related
  misc_feature (6)..(146): NCBI GI NO: 21555308 NR Description: Photosystem I reaction center subunit IV B
  misc_feature (1)..(146): NCBI GI NO: 2499966 NR Description: Photosystem I reaction center subunit IV A
  misc_feature (31)..(148): NCBI GI NO: 22091414 NR Description: putative photosystem I subunit PSI-E
  misc_feature (1)..(146): NCBI GI NO: 2499967 NR Description: Photosystem I reaction center subunit IV B
  misc_feature (1)..(146): NCBI GI NO: 26986114 NR Description: putative photosystem I reaction centre subunit IV
MASTNMASATSRFMLAAGIPSGSNGGVGSRVSFVPSNRLGWKLVARAEEEPTAAAPAEPAPAAEEKPEAAVATKEPAKAKPPPRGPKRGTKVKILRRESYWYNGTGSVVTVDQDPNTRYPVVVRFAKVNYAGVSTNNYALDEIKEVAA

SEQ ID NO: 7173 - protein, 143 aa, Glycine max
  peptide (1)..(143): Ceres Seq. ID no. 15221514
  misc_feature (81)..(142): Pfam Name: Pfam Description:  Photosystem I reaction centre subunit IV / PsaE
  misc_feature (1)..(143): NCBI GI NO: 131176 NR Description: Photosystem I reaction center subunit IV
  misc_feature (1)..(141): NCBI GI NO: 34394725 NR Description: putative Photosystem I reaction center subunit IV
  misc_feature (1)..(143): NCBI GI NO: 24030202 NR Description: putative photosystem I subunit PSI-E protein
  misc_feature (1)..(143): NCBI GI NO: 30688100 NR Description: photosystem I subunit PSI-E - like protein
  misc_feature (1)..(141): NCBI GI NO: 15225331 NR Description: photosystem I reaction center subunit IV -related
  misc_feature (1)..(141): NCBI GI NO: 21555308 NR Description: Photosystem I reaction center subunit IV B
  misc_feature (1)..(141): NCBI GI NO: 2499966 NR Description: Photosystem I reaction center subunit IV A
  misc_feature (26)..(143): NCBI GI NO: 22091414 NR Description: putative photosystem I subunit PSI-E
  misc_feature (1)..(141): NCBI GI NO: 2499967 NR Description: Photosystem I reaction center subunit IV B
  misc_feature (1)..(141): NCBI GI NO: 26986114 NR Description: putative photosystem I reaction centre subunit IV
MASATSRFMLAAGIPSGSNGGVGSRVSFVPSNRLGWKLVARAEEEPTAAAPAEPAPAAEEKPEAAVATKEPAKAKPPPRGPKRGTKVKILRRESYWYNGTGSVVTVDQDPNTRYPVVVRFAKVNYAGVSTNNYALDEIKEVAA

SEQ ID NO: 7174 - protein, 135 aa, Glycine max
  peptide (1)..(135): Ceres Seq. ID no. 15221515
  misc_feature (73)..(134): Pfam Name: Pfam Description:  Photosystem I reaction centre subunit IV / PsaE
  misc_feature (1)..(135): NCBI GI NO: 131176 NR Description: Photosystem I reaction center subunit IV
  misc_feature (1)..(133): NCBI GI NO: 34394725 NR Description: putative Photosystem I reaction center subunit IV
  misc_feature (1)..(135): NCBI GI NO: 24030202 NR Description: putative photosystem I subunit PSI-E protein
  misc_feature (1)..(135): NCBI GI NO: 30688100 NR Description: photosystem I subunit PSI-E - like protein
  misc_feature (1)..(133): NCBI GI NO: 15225331 NR Description: photosystem I reaction center subunit IV -related
  misc_feature (1)..(133): NCBI GI NO: 21555308 NR Description: Photosystem I reaction center subunit IV B
  misc_feature (1)..(133): NCBI GI NO: 2499966 NR Description: Photosystem I reaction center subunit IV A
  misc_feature (18)..(135): NCBI GI NO: 22091414 NR Description: putative photosystem I subunit PSI-E
  misc_feature (1)..(133): NCBI GI NO: 2499967 NR Description: Photosystem I reaction center subunit IV B
  misc_feature (1)..(133): NCBI GI NO: 26986114 NR Description: putative photosystem I reaction centre subunit IV
MLAAGIPSGSNGGVGSRVSFVPSNRLGWKLVARAEEEPTAAAPAEPAPAAEEKPEAAVATKEPAKAKPPPRGPKRGTKVKILRRESYWYNGTGSVVTVDQDPNTRYPVVVRFAKVNYAGVSTNNYALDEIKEVAA

SEQ ID NO: 7175 - DNA, 704 bp, Glycine max
  misc_feature (1)..(704): Ceres Seq. ID no. 12610189
aataaacacaagagatcgaccgacaccgagacagatcgtgttggtttcattttgcgaggtagatagagaaagggatgcagggcgggaagagctcgagcgcggtgggcgcggccaaggaggcggtggcgaacgtgggcacgtcggcgtgggcgagcaaggagaagaccatggccgtggtgcaggagacggtgaacaaggccaaggcgcacgacccggcggccaaggccgaggcggaggccaggaagcaggagcggatccacgaggcggaggccgccaagcgggacgccatgcgccacaacgccgccgccaaggagcacgccaccgccgcgtcctaccaccccaccaccggcgccggagtggacgcccgcgacgtcgaggtggagggcgcggccgccccgcgcgcggggagcagcgacgacggctacctgccggtgtcgggggcggggcactgggtcggcgagggcggcggtcaccagctgcccgcgcgcggcacgcccggcggccactctgcgtgatgacgaattgacgagactccatccgatgtgatttgcgtgtgaactggctggtttggcaaatagctggtataccttgtgtgcttgttcgagtgtgacccctcctgtagttttgagctctcaagagctgtgcttatttacgttgtgatctgtgaaatgagttttatataatggagatgagggtgtgatttc

SEQ ID NO: 7176 - protein, 174 aa, Glycine max
  peptide (1)..(174): Ceres Seq. ID no. 12610190
  misc_feature (38)..(141): Pfam Name: Pfam Description:  Protein of unknown function, DUF584
  misc_feature (34)..(162): NCBI GI NO: 9453857 NR Description: EBNA-1 [Cynomolgus Epstein-Barr Virus TsB-B6]
  misc_feature (34)..(169): NCBI GI NO: 775215 NR Description: EBNA1 [Herpesvirus papio]
  misc_feature (34)..(162): NCBI GI NO: 9453859 NR Description: EBNA-1 [Cynomolgus Epstein-Barr Virus Si-IIA]
  misc_feature (25)..(131): NCBI GI NO: 15221662 NR Description: hypothetical protein; protein id: At1g31290.1
  misc_feature (20)..(156): NCBI GI NO: 21757162 NR Description: unnamed protein product [Homo sapiens]
  misc_feature (34)..(161): NCBI GI NO: 9625624 NR Description: nuclear antigen EBNA1 [Human herpesvirus 4]
  misc_feature (32)..(164): NCBI GI NO: 15224564 NR Description: unknown protein; protein id: At2g05580.1
  misc_feature (17)..(156): NCBI GI NO: 15224564 NR Description: unknown protein; protein id: At2g05580.1
  misc_feature (34)..(144): NCBI GI NO: 18025496 NR Description: EBNA-1 [cercopithicine herpesvirus 15]
  misc_feature (34)..(154): NCBI GI NO: 421936 NR Description: glycine-rich protein - common tobacco
INTRDRPTPRQIVLVSFCEVDRERDAGREELERGGRGQGGGGERGHVGVGEQGEDHGRGAGDGEQGQGARPGGQGRGGGQEAGADPRGGGRQAGRHAPQRRRQGARHRRVLPPHHRRRSGRPRRRGGGRGRPARGEQRRRLPAGVGGGALGRRGRRSPAARARHARRPLCVMTN

SEQ ID NO: 7177 - protein, 146 aa, Glycine max
  peptide (1)..(146): Ceres Seq. ID no. 12610191
  misc_feature (12)..(80): Pfam Name: LEA Pfam Description: Late embryogenesis abundant
  misc_feature (1)..(116): NCBI GI NO: 38637202 NR Description: putative seed maturation protein
  misc_feature (1)..(143): NCBI GI NO: 417494 NR Description: 18 KD SEED MATURATION PROTEIN
  misc_feature (1)..(143): NCBI GI NO: 1079652 NR Description: late embryogenesis abundant protein [Glycine soja]
  misc_feature (1)..(143): NCBI GI NO: 11612179 NR Description: seed maturation protein LEA 4 [Glycine tabacina]
  misc_feature (1)..(143): NCBI GI NO: 11612189 NR Description: seed maturation protein LEA 4 [Glycine tomentella]
  misc_feature (1)..(143): NCBI GI NO: 11612193 NR Description: seed maturation protein LEA 4 [Glycine tomentella]
  misc_feature (1)..(143): NCBI GI NO: 10334846 NR Description: seed maturation protein [Glycine tomentella]
  misc_feature (1)..(143): NCBI GI NO: 10334838 NR Description: seed maturation protein [Glycine tabacina]
  misc_feature (1)..(143): NCBI GI NO: 15667233 NR Description: seed maturation protein LEA 4 [Glycine canescens]
  misc_feature (1)..(143): NCBI GI NO: 10334835 NR Description: seed maturation protein [Glycine tomentella]
MQGGKSSSAVGAAKEAVANVGTSAWASKEKTMAVVQETVNKAKAHDPAAKAEAEARKQERIHEAEAAKRDAMRHNAAAKEHATAASYHPTTGAGVDARDVEVEGAAAPRAGSSDDGYLPVSGAGHWVGEGGGHQLPARGTPGGHSA

SEQ ID NO: 7178 - protein, 115 aa, Glycine max
  peptide (1)..(115): Ceres Seq. ID no. 12610192
  misc_feature (1)..(85): NCBI GI NO: 38637202 NR Description: putative seed maturation protein
  misc_feature (1)..(112): NCBI GI NO: 417494 NR Description: 18 KD SEED MATURATION PROTEIN
  misc_feature (1)..(112): NCBI GI NO: 1079652 NR Description: late embryogenesis abundant protein [Glycine soja]
  misc_feature (1)..(112): NCBI GI NO: 11612179 NR Description: seed maturation protein LEA 4 [Glycine tabacina]
  misc_feature (1)..(112): NCBI GI NO: 11612189 NR Description: seed maturation protein LEA 4 [Glycine tomentella]
  misc_feature (1)..(112): NCBI GI NO: 11612193 NR Description: seed maturation protein LEA 4 [Glycine tomentella]
  misc_feature (1)..(112): NCBI GI NO: 10334846 NR Description: seed maturation protein [Glycine tomentella]
  misc_feature (1)..(112): NCBI GI NO: 10334838 NR Description: seed maturation protein [Glycine tabacina]
  misc_feature (1)..(112): NCBI GI NO: 15667233 NR Description: seed maturation protein LEA 4 [Glycine canescens]
  misc_feature (1)..(112): NCBI GI NO: 10334835 NR Description: seed maturation protein [Glycine tomentella]
MAVVQETVNKAKAHDPAAKAEAEARKQERIHEAEAAKRDAMRHNAAAKEHATAASYHPTTGAGVDARDVEVEGAAAPRAGSSDDGYLPVSGAGHWVGEGGGHQLPARGTPGGHSA

SEQ ID NO: 7179 - DNA, 815 bp, Glycine max
  misc_feature (1)..(815): Ceres Seq. ID no. 12781963
accaacggcggagatgggtggtggtgccgcgaggagggttctcgaggcgtggaagctcggagtggtcaagtacggcgacgccctcaggctccaggagaggctcgtcgccgaccggagagccggccgggtcccggacctcgtgctctcgctgcagcatccgcctacctacaccctcggcaagcggcgcaccgaccacaacctgctcgtgccggagtcaagcctcgcgggcctcggcgccgagctctaccgcacggagcggggcggcgacgtcaccttccacggcccgcgccaggccgtgctctaccccatcctctcgctccgggacattgggctaggcgcgcggaggtatgtcgaggggctcgagtccgccatgatcgaggttgcctctctgtacggcgtcaaggcgcggccggggggcgcctgcgagaccggcgtgtgggtcggggacaggaagattggggccatcggggtcaggatctcgtcagggtttacctgccatggcctggccttcaacatcgaccctgatttgggctacttcaagcacatcgtgccctgcggcattgctgacaaggaggtcacatcgctgcggcgggaggccgcggtggaactccctcctgacgaggtgatccatggtcagctcttgcagagcttggcgacaaccttccgtttcagtgatgttaaagtcaaggatgattccgagtgtgcagacatgattagctcagctgcaactgagcaacactgatatgtattttgctctttgtacttttgtatactgggattttgcctcgacacctagttataaacttttgggtttc

SEQ ID NO: 7180 - protein, 246 aa, Glycine max
  peptide (1)..(246): Ceres Seq. ID no. 12781964
  misc_feature (12)..(231): NCBI GI NO: 3122357 NR Description: Probable lipoate-protein ligase
  misc_feature (12)..(231): NCBI GI NO: 15219770 NR Description: lipoyltransferase; protein id: At1g04640
  misc_feature (12)..(221): NCBI GI NO: 22971103 NR Description: hypothetical protein [Chloroflexus aurantiacus]
  misc_feature (11)..(208): NCBI GI NO: 29346499 NR Description: lipoate-protein ligase B
  misc_feature (14)..(221): NCBI GI NO: 6685619 NR Description: Lipoate-protein ligase B
  misc_feature (20)..(195): NCBI GI NO: 37523983 NR Description: lipoate-protein ligase B [Gloeobacter violaceus]
  misc_feature (11)..(237): NCBI GI NO: 32565879 NR Description: LiPoate Ligase (27.4 kD) (lpl-1)
  misc_feature (19)..(221): NCBI GI NO: 39586445 NR Description: Hypothetical protein CBG21764
  misc_feature (11)..(221): NCBI GI NO: 21355483 NR Description: CG9804-PA [Drosophila melanogaster]
  misc_feature (19)..(221): NCBI GI NO: 22298375 NR Description: lipoate-protein ligase
PTAEMGGGAARRVLEAWKLGVVKYGDALRLQERLVADRRAGRVPDLVLSLQHPPTYTLGKRRTDHNLLVPESSLAGLGAELYRTERGGDVTFHGPRQAVLYPILSLRDIGLGARRYVEGLESAMIEVASLYGVKARPGGACETGVWVGDRKIGAIGVRISSGFTCHGLAFNIDPDLGYFKHIVPCGIADKEVTSLRREAAVELPPDEVIHGQLLQSLATTFRFSDVKVKDDSECADMISSAATEQH

SEQ ID NO: 7181 - protein, 242 aa, Glycine max
  peptide (1)..(242): Ceres Seq. ID no. 12781965
  misc_feature (8)..(227): NCBI GI NO: 3122357 NR Description: Probable lipoate-protein ligase
  misc_feature (8)..(227): NCBI GI NO: 15219770 NR Description: lipoyltransferase; protein id: At1g04640
  misc_feature (8)..(217): NCBI GI NO: 22971103 NR Description: hypothetical protein [Chloroflexus aurantiacus]
  misc_feature (7)..(204): NCBI GI NO: 29346499 NR Description: lipoate-protein ligase B
  misc_feature (10)..(217): NCBI GI NO: 6685619 NR Description: Lipoate-protein ligase B
  misc_feature (16)..(191): NCBI GI NO: 37523983 NR Description: lipoate-protein ligase B [Gloeobacter violaceus]
  misc_feature (7)..(233): NCBI GI NO: 32565879 NR Description: LiPoate Ligase (27.4 kD) (lpl-1)
  misc_feature (15)..(217): NCBI GI NO: 39586445 NR Description: Hypothetical protein CBG21764
  misc_feature (7)..(217): NCBI GI NO: 21355483 NR Description: CG9804-PA [Drosophila melanogaster]
  misc_feature (15)..(217): NCBI GI NO: 22298375 NR Description: lipoate-protein ligase
MGGGAARRVLEAWKLGVVKYGDALRLQERLVADRRAGRVPDLVLSLQHPPTYTLGKRRTDHNLLVPESSLAGLGAELYRTERGGDVTFHGPRQAVLYPILSLRDIGLGARRYVEGLESAMIEVASLYGVKARPGGACETGVWVGDRKIGAIGVRISSGFTCHGLAFNIDPDLGYFKHIVPCGIADKEVTSLRREAAVELPPDEVIHGQLLQSLATTFRFSDVKVKDDSECADMISSAATEQH

SEQ ID NO: 7182 - protein, 174 aa, Glycine max
  peptide (1)..(174): Ceres Seq. ID no. 12781966
TNGGDGWWCREEGSRGVEARSGQVRRRPQAPGEARRRPESRPGPGPRALAAASAYLHPRQAAHRPQPARAGVKPRGPRRRALPHGAGRRRHLPRPAPGRALPHPLAPGHWARRAEVCRGARVRHDRGCLSVRRQGAAGGRLRDRRVGRGQEDWGHRGQDLVRVYLPWPGLQHRP

SEQ ID NO: 7183 - DNA, 1043 bp, Glycine max
  misc_feature (1)..(1043): Ceres Seq. ID no. 14304176
attgtctcataaaaaaacaatcttctctttaaaacgatggagtgtagaccgttggatctgacgataatatccgcagaggacctcaaagacatccagctgatcggcaagcaagacctatacgccgtcgtttccctcaacaacgacgcaaggaccaagcagaagacaaaggtggacaaagactgcgggacgaaacctaagtggaagcatcagatgaagctcaccgtcgacgacacagcagcgcgtgagaaccatctcacacttgtcatccagatcgtcgctgatcgtcccatcgccggtgataaaccagtcggagaggttagcgttccgttgaaggagcttttggatcagaacaacaaggagggtgacgtggaggaggagaaaacggttacgtatgctgtgaagctgcctaacggtaagaccaaaggatctctcaagttctcgttcaagtttggtgagaagtacactttcgggtcttcgagtgatcctcacgcgcctggctcatcgagtgttgaccacaagtctacggatcagcccgtcgcagcttacccgcccggacaaggcgccccggctgcatacccggctcctccaggacatgatgataaacatggcggtgtttacggttacccacaggccggtggatatccgccacctggtggtcccggtggttatcctccagctgggcctggtgggtatccgcctcccggtgcatacccgcaacaaggtggatatccacctcaacaaggaggctacccgggttatccaccacagggtccaggctatgggtatccgccacagggtccaggttatgggtatccgccacagggtccgtatggttacccgcaacagcaagcttatggtggtcaaccgcagaaaccgaagaagcatggaggagctggaatgggtctagggcttggacttggagctgggctattgggtgggttgcttgttggtgaagcaattgatgacatggcagatatgggtgatatgggtgatttctgattgtgcttatctttatggtattagctttcaatttcttgttgttc

SEQ ID NO: 7184 - protein, 320 aa, Glycine max
  peptide (1)..(320): Ceres Seq. ID no. 14304177
  misc_feature (6)..(95): Pfam Name: Pfam Description:  C2 domain
  misc_feature (1)..(319): NCBI GI NO: 11358845 NR Description: shock protein SRC2 homolog
  misc_feature (1)..(319): NCBI GI NO: 18390977 NR Description: C2 domain-containing protein
  misc_feature (1)..(244): NCBI GI NO: 7488714 NR Description: shock protein SRC2 - soybean
  misc_feature (1)..(297): NCBI GI NO: 34907166 NR Description: P0423A12.20
  misc_feature (6)..(287): NCBI GI NO: 15228227 NR Description: shock protein SRC2 family [Arabidopsis thaliana]
  misc_feature (11)..(273): NCBI GI NO: 6469591 NR Description: unknown [Eufolliculina uhligi]
  misc_feature (181)..(318): NCBI GI NO: 7488714 NR Description: shock protein SRC2 - soybean
  misc_feature (150)..(318): NCBI GI NO: 34907166 NR Description: P0423A12.20
  misc_feature (170)..(301): NCBI GI NO: 3288572 NR Description: annexin max4 [Oryzias latipes]
  misc_feature (6)..(251): NCBI GI NO: 22328677 NR Description: C2 domain-containing protein
MECRPLDLTIISAEDLKDIQLIGKQDLYAVVSLNNDARTKQKTKVDKDCGTKPKWKHQMKLTVDDTAARENHLTLVIQIVADRPIAGDKPVGEVSVPLKELLDQNNKEGDVEEEKTVTYAVKLPNGKTKGSLKFSFKFGEKYTFGSSSDPHAPGSSSVDHKSTDQPVAAYPPGQGAPAAYPAPPGHDDKHGGVYGYPQAGGYPPPGGPGGYPPAGPGGYPPPGAYPQQGGYPPQQGGYPGYPPQGPGYGYPPQGPGYGYPPQGPYGYPQQQAYGGQPQKPKKHGGAGMGLGLGLGAGLLGGLLVGEAIDDMADMGDMGDF

SEQ ID NO: 7185 - protein, 262 aa, Glycine max
  peptide (1)..(262): Ceres Seq. ID no. 14304178
  misc_feature (81)..(219): Pfam Name: Pfam Description:  High molecular weight glutenin subunit
  misc_feature (1)..(261): NCBI GI NO: 11358845 NR Description: shock protein SRC2 homolog
  misc_feature (1)..(261): NCBI GI NO: 18390977 NR Description: C2 domain-containing protein
  misc_feature (1)..(186): NCBI GI NO: 7488714 NR Description: shock protein SRC2 - soybean
  misc_feature (1)..(239): NCBI GI NO: 34907166 NR Description: P0423A12.20
  misc_feature (1)..(229): NCBI GI NO: 15228227 NR Description: shock protein SRC2 family [Arabidopsis thaliana]
  misc_feature (1)..(215): NCBI GI NO: 6469591 NR Description: unknown [Eufolliculina uhligi]
  misc_feature (123)..(260): NCBI GI NO: 7488714 NR Description: shock protein SRC2 - soybean
  misc_feature (92)..(260): NCBI GI NO: 34907166 NR Description: P0423A12.20
  misc_feature (112)..(243): NCBI GI NO: 3288572 NR Description: annexin max4 [Oryzias latipes]
  misc_feature (1)..(193): NCBI GI NO: 22328677 NR Description: C2 domain-containing protein
MKLTVDDTAARENHLTLVIQIVADRPIAGDKPVGEVSVPLKELLDQNNKEGDVEEEKTVTYAVKLPNGKTKGSLKFSFKFGEKYTFGSSSDPHAPGSSSVDHKSTDQPVAAYPPGQGAPAAYPAPPGHDDKHGGVYGYPQAGGYPPPGGPGGYPPAGPGGYPPPGAYPQQGGYPPQQGGYPGYPPQGPGYGYPPQGPGYGYPPQGPYGYPQQQAYGGQPQKPKKHGGAGMGLGLGLGAGLLGGLLVGEAIDDMADMGDMGDF

SEQ ID NO: 7186 - DNA, 1150 bp, Glycine max
  misc_feature (1)..(1150): Ceres Seq. ID no. 14304202
acccaccaccgcgcctcagctcacgcatctctctcggctccggcaagcaagcaccagcgctctcctctcccctcgcttcctcgctgcaatgtcgaccgacgtggccgccgatgtcccggcccctgaggtggaggtggccgccgaccccgtcgtggagaccacggccgaggccgccgccggcgacgcgaagccggccaaggagaccaaggccaaggcggccaaggccaagaagccctccgccccgaggaagccccgcgccacccccgcccacccgacctacgccgagatggtgtcggaggccatcaccgccctgaaggagcggacggggtcgagccagtacgccatcgccaagttcgtcgaggacaagcacaaggcgcacctcccggccaacttccgcaagattctgtcggtgcagctcaagaagctggtcgcctccggcaagctgaccaaggtcaaggcctcgtacaagctgtcggccgccgcggccaagcccaagccggcggcgaagaagaagcccgcggcgaagaagaaggcgccagccaagaagaccgccaccaagaccaaggccaaggcgcccgccaagaaggccgccgcgaagcccaaggccaaggcgcccgccaagcccaaggccgccgcgaagcccaaggccgccgcgaagcccaaggccaaggccgccgcgaagcccaaggctgccgccaagcccaagggccgccccgccaaggctgccaagacctcggccaaggacgcgccagggaagaaggcccctgccgccgcggcgcccaagaaggccgccgccaggaagccgcccaccaagagatccacgccggtgaagaaggccgcgcccgccaagaaggctgcgccggcgaagaaggccccggccgccaagaaggccaagaagtagatccttggagggagatcctagggcttggcgatagttttccagtagcagtttttcctgttctgtgctgttagtcgagatgtccgggctgtgtcgggggtgctaggctgtaaatttgaaatctgggttggggtgcactggtgatcctgtgcacccctttgtgtgtgttgtgagaaacggtggcgacgatcgcgttgtagcaagcttatgtatttgtgtaactgaattgggtaattgaatcttcattttagc

SEQ ID NO: 7187 - protein, 299 aa, Glycine max
  peptide (1)..(299): Ceres Seq. ID no. 14304203
  misc_feature (89)..(159): Pfam Name: Pfam Description:  linker histone H1 and H5 family
  misc_feature (30)..(299): NCBI GI NO: 5230785 NR Description: histone H1 WH1B.1 [Triticum aestivum]
  misc_feature (30)..(291): NCBI GI NO: 7439656 NR Description: histone H1 (clone TH315) - wheat
  misc_feature (30)..(299): NCBI GI NO: 7439660 NR Description: histone H1 (clone TH32) - wheat
  misc_feature (46)..(299): NCBI GI NO: 11558848 NR Description: histone H1 [Triticum aestivum]
  misc_feature (34)..(299): NCBI GI NO: 14916992 NR Description: HISTONE H1
  misc_feature (42)..(299): NCBI GI NO: 5230783 NR Description: histone H1 WH1A.2 [Triticum aestivum]
  misc_feature (46)..(299): NCBI GI NO: 5230781 NR Description: histone H1 WH1A.1 [Triticum aestivum]
  misc_feature (30)..(273): NCBI GI NO: 11558848 NR Description: histone H1 [Triticum aestivum]
  misc_feature (30)..(297): NCBI GI NO: 34897182 NR Description: histone-like protein
  misc_feature (30)..(273): NCBI GI NO: 5230783 NR Description: histone H1 WH1A.2 [Triticum aestivum]
PTTAPQLTHLSRLRQASTSALLSPRFLAAMSTDVAADVPAPEVEVAADPVVETTAEAAAGDAKPAKETKAKAAKAKKPSAPRKPRATPAHPTYAEMVSEAITALKERTGSSQYAIAKFVEDKHKAHLPANFRKILSVQLKKLVASGKLTKVKASYKLSAAAAKPKPAAKKKPAAKKKAPAKKTATKTKAKAPAKKAAAKPKAKAPAKPKAAAKPKAAAKPKAKAAAKPKAAAKPKGRPAKAAKTSAKDAPGKKAPAAAAPKKAAARKPPTKRSTPVKKAAPAKKAAPAKKAPAAKKAKK

SEQ ID NO: 7188 - protein, 270 aa, Glycine max
  peptide (1)..(270): Ceres Seq. ID no. 14304204
  misc_feature (60)..(130): Pfam Name: Pfam Description:  linker histone H1 and H5 family
  misc_feature (1)..(270): NCBI GI NO: 5230785 NR Description: histone H1 WH1B.1 [Triticum aestivum]
  misc_feature (1)..(262): NCBI GI NO: 7439656 NR Description: histone H1 (clone TH315) - wheat
  misc_feature (1)..(270): NCBI GI NO: 7439660 NR Description: histone H1 (clone TH32) - wheat
  misc_feature (17)..(270): NCBI GI NO: 11558848 NR Description: histone H1 [Triticum aestivum]
  misc_feature (5)..(270): NCBI GI NO: 14916992 NR Description: HISTONE H1
  misc_feature (13)..(270): NCBI GI NO: 5230783 NR Description: histone H1 WH1A.2 [Triticum aestivum]
  misc_feature (17)..(270): NCBI GI NO: 5230781 NR Description: histone H1 WH1A.1 [Triticum aestivum]
  misc_feature (1)..(244): NCBI GI NO: 11558848 NR Description: histone H1 [Triticum aestivum]
  misc_feature (1)..(268): NCBI GI NO: 34897182 NR Description: histone-like protein
  misc_feature (1)..(244): NCBI GI NO: 5230783 NR Description: histone H1 WH1A.2 [Triticum aestivum]
MSTDVAADVPAPEVEVAADPVVETTAEAAAGDAKPAKETKAKAAKAKKPSAPRKPRATPAHPTYAEMVSEAITALKERTGSSQYAIAKFVEDKHKAHLPANFRKILSVQLKKLVASGKLTKVKASYKLSAAAAKPKPAAKKKPAAKKKAPAKKTATKTKAKAPAKKAAAKPKAKAPAKPKAAAKPKAAAKPKAKAAAKPKAAAKPKGRPAKAAKTSAKDAPGKKAPAAAAPKKAAARKPPTKRSTPVKKAAPAKKAAPAKKAPAAKKAKK

SEQ ID NO: 7189 - protein, 204 aa, Glycine max
  peptide (1)..(204): Ceres Seq. ID no. 14304205
  misc_feature (1)..(64): Pfam Name: Pfam Description:  linker histone H1 and H5 family
  misc_feature (1)..(204): NCBI GI NO: 5230785 NR Description: histone H1 WH1B.1 [Triticum aestivum]
  misc_feature (1)..(196): NCBI GI NO: 7439656 NR Description: histone H1 (clone TH315) - wheat
  misc_feature (1)..(204): NCBI GI NO: 7439660 NR Description: histone H1 (clone TH32) - wheat
  misc_feature (1)..(204): NCBI GI NO: 11558848 NR Description: histone H1 [Triticum aestivum]
  misc_feature (1)..(204): NCBI GI NO: 14916992 NR Description: HISTONE H1
  misc_feature (1)..(204): NCBI GI NO: 5230783 NR Description: histone H1 WH1A.2 [Triticum aestivum]
  misc_feature (1)..(204): NCBI GI NO: 5230781 NR Description: histone H1 WH1A.1 [Triticum aestivum]
  misc_feature (1)..(178): NCBI GI NO: 11558848 NR Description: histone H1 [Triticum aestivum]
  misc_feature (1)..(202): NCBI GI NO: 34897182 NR Description: histone-like protein
  misc_feature (1)..(178): NCBI GI NO: 5230783 NR Description: histone H1 WH1A.2 [Triticum aestivum]
MVSEAITALKERTGSSQYAIAKFVEDKHKAHLPANFRKILSVQLKKLVASGKLTKVKASYKLSAAAAKPKPAAKKKPAAKKKAPAKKTATKTKAKAPAKKAAAKPKAKAPAKPKAAAKPKAAAKPKAKAAAKPKAAAKPKGRPAKAAKTSAKDAPGKKAPAAAAPKKAAARKPPTKRSTPVKKAAPAKKAAPAKKAPAAKKAKK

SEQ ID NO: 7190 - DNA, 1103 bp, Glycine max
  misc_feature (1)..(1103): Ceres Seq. ID no. 14304224
aaactgtaagcattaattttcgaaatgggaaaaaacgaaaaataacttttccaaattcatgacaaccgaatcacacaaaaactattttatatgctgtttttctgtttgaaggatcacacaaactagtaaccagaaaaatggcagaaacaaagttgagctccttcaaagacaaaagatggtcactccatggcatgacagctctagtgacaggaggcacacgaggcatagggtacgcaatagctgaagagttagcagaatttggggcagctgtgcatatttgtgcacgtaaacaacaagatattgataaatgtttagaagaatggaataagaaaggacttcccataacagggtcggcatgtgatgtactatctcgtgaccaacgtgaaaatttaatgaaaaatgttgcttcaatctttaacgggaagctcaacattctgataaacaatgctggaacaactacacctaagaatctcatagattatactgcagaagatgtaacgacaataatggaaactaattttgggtctagttaccacttatgtcaactagcacatccacttctaaaagcatctggatatgggagcatagtgtttatatcctccattgcaggtctgaaagctttgccttacagttctgtgtatgcatcctctaaaggagctatgaatcaattcactaagaacatagcattggaatgggcaaaggataatattcgcgcaaatgctgtggcaccggggactgttaagactgtacttctggattctatcatgaaagctgctgctgaagctgataaagccgttgagtatatagtgtctcaaacaccagttggtagacttggagatcccgaggacatatcaccactggttgttttcctttgccttccagctgcttcatacatcactggccagattattactgcggatgggggttacataatttaaagtgtaatgccaaaaataattataaaataaaataaatgcccaaaacataaatctcaagatcaactaggtttttaagaaggtccgaaactaatgattatctgtagttgttttaagtacaatatttcaagtgttataatgtttccaatgtgtgaagttctttttatc

SEQ ID NO: 7191 - protein, 266 aa, Glycine max
  peptide (1)..(266): Ceres Seq. ID no. 14304225
  misc_feature (11)..(266): NCBI GI NO: 1717755 NR Description: TROPINONE REDUCTASE HOMOLOG (P29X)
  misc_feature (8)..(266): NCBI GI NO: 18138053 NR Description: tropinone reductase I [Calystegia sepium]
  misc_feature (11)..(266): NCBI GI NO: 15239327 NR Description: short-chain dehydrogenase/reductase family protein
  misc_feature (11)..(266): NCBI GI NO: 21536785 NR Description: short chain alcohol dehydrogenase-like
  misc_feature (12)..(264): NCBI GI NO: 13311189 NR Description: tropinone reductase I [Solanum tuberosum]
  misc_feature (1)..(264): NCBI GI NO: 1717752 NR Description: Tropinone reductase-I
  misc_feature (12)..(264): NCBI GI NO: 7619804 NR Description: putative tropinone reductase [Solanum tuberosum]
  misc_feature (13)..(264): NCBI GI NO: 1651197 NR Description: tropinone reductase-I [Hyoscyamus niger]
  misc_feature (2)..(266): NCBI GI NO: 15227060 NR Description: short-chain dehydrogenase/reductase family protein
  misc_feature (2)..(266): NCBI GI NO: 28393476 NR Description: putative tropinone reductase
MAETKLSSFKDKRWSLHGMTALVTGGTRGIGYAIAEELAEFGAAVHICARKQQDIDKCLEEWNKKGLPITGSACDVLSRDQRENLMKNVASIFNGKLNILINNAGTTTPKNLIDYTAEDVTTIMETNFGSSYHLCQLAHPLLKASGYGSIVFISSIAGLKALPYSSVYASSKGAMNQFTKNIALEWAKDNIRANAVAPGTVKTVLLDSIMKAAAEADKAVEYIVSQTPVGRLGDPEDISPLVVFLCLPAASYITGQIITADGGYII

SEQ ID NO: 7192 - protein, 248 aa, Glycine max
  peptide (1)..(248): Ceres Seq. ID no. 14304226
  misc_feature (1)..(248): NCBI GI NO: 1717755 NR Description: TROPINONE REDUCTASE HOMOLOG (P29X)
  misc_feature (1)..(248): NCBI GI NO: 18138053 NR Description: tropinone reductase I [Calystegia sepium]
  misc_feature (1)..(248): NCBI GI NO: 15239327 NR Description: short-chain dehydrogenase/reductase family protein
  misc_feature (1)..(248): NCBI GI NO: 21536785 NR Description: short chain alcohol dehydrogenase-like
  misc_feature (1)..(246): NCBI GI NO: 13311189 NR Description: tropinone reductase I [Solanum tuberosum]
  misc_feature (1)..(246): NCBI GI NO: 1717752 NR Description: Tropinone reductase-I
  misc_feature (1)..(246): NCBI GI NO: 7619804 NR Description: putative tropinone reductase [Solanum tuberosum]
  misc_feature (1)..(246): NCBI GI NO: 1651197 NR Description: tropinone reductase-I [Hyoscyamus niger]
  misc_feature (1)..(248): NCBI GI NO: 15227060 NR Description: short-chain dehydrogenase/reductase family protein
  misc_feature (1)..(248): NCBI GI NO: 28393476 NR Description: putative tropinone reductase
MTALVTGGTRGIGYAIAEELAEFGAAVHICARKQQDIDKCLEEWNKKGLPITGSACDVLSRDQRENLMKNVASIFNGKLNILINNAGTTTPKNLIDYTAEDVTTIMETNFGSSYHLCQLAHPLLKASGYGSIVFISSIAGLKALPYSSVYASSKGAMNQFTKNIALEWAKDNIRANAVAPGTVKTVLLDSIMKAAAEADKAVEYIVSQTPVGRLGDPEDISPLVVFLCLPAASYITGQIITADGGYII

SEQ ID NO: 7193 - protein, 181 aa, Glycine max
  peptide (1)..(181): Ceres Seq. ID no. 14304227
  misc_feature (1)..(181): NCBI GI NO: 1717755 NR Description: TROPINONE REDUCTASE HOMOLOG (P29X)
  misc_feature (1)..(181): NCBI GI NO: 18138053 NR Description: tropinone reductase I [Calystegia sepium]
  misc_feature (1)..(181): NCBI GI NO: 15239327 NR Description: short-chain dehydrogenase/reductase family protein
  misc_feature (1)..(181): NCBI GI NO: 21536785 NR Description: short chain alcohol dehydrogenase-like
  misc_feature (1)..(179): NCBI GI NO: 13311189 NR Description: tropinone reductase I [Solanum tuberosum]
  misc_feature (1)..(179): NCBI GI NO: 1717752 NR Description: Tropinone reductase-I
  misc_feature (1)..(179): NCBI GI NO: 7619804 NR Description: putative tropinone reductase [Solanum tuberosum]
  misc_feature (1)..(179): NCBI GI NO: 1651197 NR Description: tropinone reductase-I [Hyoscyamus niger]
  misc_feature (1)..(181): NCBI GI NO: 15227060 NR Description: short-chain dehydrogenase/reductase family protein
  misc_feature (1)..(181): NCBI GI NO: 28393476 NR Description: putative tropinone reductase
MKNVASIFNGKLNILINNAGTTTPKNLIDYTAEDVTTIMETNFGSSYHLCQLAHPLLKASGYGSIVFISSIAGLKALPYSSVYASSKGAMNQFTKNIALEWAKDNIRANAVAPGTVKTVLLDSIMKAAAEADKAVEYIVSQTPVGRLGDPEDISPLVVFLCLPAASYITGQIITADGGYII

SEQ ID NO: 7194 - DNA, 949 bp, Glycine max
  misc_feature (1)..(949): Ceres Seq. ID no. 15168856
gtcttgttttgcccgtgacgcacactgttcttgctttccccagatttcaatttccctttagcacctcaaatttcttcccttttcctttctgggtctccatctactgttttttttttgggtcaaatacgaagatgggtgttcatccttagccattgagaatctaatctaagatttggagagaaagatgaaggatttcccagggacaccgggcactgtccttggtttggctctaaggatatcacagttcgtttttgctgctggatcaattgcttccatggctaccactcccagtttctttaactttacagctttttgttacttgatagcttcaatgggtttacaagtcatttggagttttgtgcttgctttattggatgcatatgccttggtgaaaaaaaaggtcctccacaacgccgtactggttagcctctttgtagttggagattgggtaacagcaacactatctctagccgcagcgtcttcctcggctggcatcacggttttgtacttcaatgatctgggacactgccattttggagaggaatgccaaaagtacctgatttcagtagcattagcgttcttgagctggttcccgatttcaatatcatccctaattatgctctggctattagctgcagggtagcagtctctacattccgcccgagttctctcatctatcacatgttcatcttattggaaaagttcttagaaagtgtcaataggaaaggaagtagagtagaggtttacacatttaaatcgattccttcatttctaccagaaatgggacagtagcagattgtaaaaagtaaaaatatatacatgattttgccttgcaaagaaattaggctaccgaactgttatcctgatttcctgatcctgtgactagaaggtcaaaactttatgtttacagggaattgggttgctaatgcatgtttgcttgtttacaatt

SEQ ID NO: 7195 - protein, 152 aa, Glycine max
  peptide (1)..(152): Ceres Seq. ID no. 15168857
  misc_feature (6)..(135): Pfam Name: DUF588 Pfam Description: Domain of unknown function
  misc_feature (1)..(151): NCBI GI NO: 30686969 NR Description: expressed protein [Arabidopsis thaliana]
  misc_feature (1)..(151): NCBI GI NO: 18409932 NR Description: expressed protein [Arabidopsis thaliana]
  misc_feature (1)..(149): NCBI GI NO: 15241672 NR Description: hypothetical protein [Arabidopsis thaliana]
  misc_feature (1)..(151): NCBI GI NO: 18401722 NR Description: expressed protein [Arabidopsis thaliana]
  misc_feature (1)..(150): NCBI GI NO: 25408537 NR Description: hypothetical protein At2g37200
  misc_feature (1)..(150): NCBI GI NO: 30687069 NR Description: expressed protein [Arabidopsis thaliana]
  misc_feature (1)..(88): NCBI GI NO: 7939530 NR Description: gb|AAD20689
  misc_feature (38)..(151): NCBI GI NO: 11357817 NR Description: hypothetical protein F5K20
  misc_feature (8)..(138): NCBI GI NO: 26006486 NR Description: Unknown protein
  misc_feature (1)..(149): NCBI GI NO: 22330130 NR Description: hypothetical protein [Arabidopsis thaliana]
MKDFPGTPGTVLGLALRISQFVFAAGSIASMATTPSFFNFTAFCYLIASMGLQVIWSFVLALLDAYALVKKKVLHNAVLVSLFVVGDWVTATLSLAAASSSAGITVLYFNDLGHCHFGEECQKYLISVALAFLSWFPISISSLIMLWLLAAG

SEQ ID NO: 7196 - protein, 122 aa, Glycine max
  peptide (1)..(122): Ceres Seq. ID no. 15168858
  misc_feature (1)..(105): Pfam Name: DUF588 Pfam Description: Domain of unknown function
  misc_feature (1)..(121): NCBI GI NO: 30686969 NR Description: expressed protein [Arabidopsis thaliana]
  misc_feature (1)..(121): NCBI GI NO: 18409932 NR Description: expressed protein [Arabidopsis thaliana]
  misc_feature (1)..(119): NCBI GI NO: 15241672 NR Description: hypothetical protein [Arabidopsis thaliana]
  misc_feature (1)..(121): NCBI GI NO: 18401722 NR Description: expressed protein [Arabidopsis thaliana]
  misc_feature (1)..(120): NCBI GI NO: 25408537 NR Description: hypothetical protein At2g37200
  misc_feature (1)..(120): NCBI GI NO: 30687069 NR Description: expressed protein [Arabidopsis thaliana]
  misc_feature (1)..(58): NCBI GI NO: 7939530 NR Description: gb|AAD20689
  misc_feature (8)..(121): NCBI GI NO: 11357817 NR Description: hypothetical protein F5K20
  misc_feature (1)..(108): NCBI GI NO: 26006486 NR Description: Unknown protein
  misc_feature (1)..(119): NCBI GI NO: 22330130 NR Description: hypothetical protein [Arabidopsis thaliana]
MATTPSFFNFTAFCYLIASMGLQVIWSFVLALLDAYALVKKKVLHNAVLVSLFVVGDWVTATLSLAAASSSAGITVLYFNDLGHCHFGEECQKYLISVALAFLSWFPISISSLIMLWLLAAG

SEQ ID NO: 7197 - protein, 103 aa, Glycine max
  peptide (1)..(103): Ceres Seq. ID no. 15168859
  misc_feature (1)..(86): Pfam Name: DUF588 Pfam Description: Domain of unknown function
  misc_feature (1)..(102): NCBI GI NO: 30686969 NR Description: expressed protein [Arabidopsis thaliana]
  misc_feature (1)..(102): NCBI GI NO: 18409932 NR Description: expressed protein [Arabidopsis thaliana]
  misc_feature (1)..(100): NCBI GI NO: 15241672 NR Description: hypothetical protein [Arabidopsis thaliana]
  misc_feature (1)..(102): NCBI GI NO: 18401722 NR Description: expressed protein [Arabidopsis thaliana]
  misc_feature (1)..(101): NCBI GI NO: 25408537 NR Description: hypothetical protein At2g37200
  misc_feature (1)..(101): NCBI GI NO: 30687069 NR Description: expressed protein [Arabidopsis thaliana]
  misc_feature (1)..(39): NCBI GI NO: 7939530 NR Description: gb|AAD20689
  misc_feature (1)..(102): NCBI GI NO: 11357817 NR Description: hypothetical protein F5K20
  misc_feature (1)..(89): NCBI GI NO: 26006486 NR Description: Unknown protein
  misc_feature (1)..(100): NCBI GI NO: 22330130 NR Description: hypothetical protein [Arabidopsis thaliana]
MGLQVIWSFVLALLDAYALVKKKVLHNAVLVSLFVVGDWVTATLSLAAASSSAGITVLYFNDLGHCHFGEECQKYLISVALAFLSWFPISISSLIMLWLLAAG

SEQ ID NO: 7198 - DNA, 813 bp, Glycine max
  misc_feature (1)..(813): Ceres Seq. ID no. 14304228
cctaaaaaatgtcccgattgctgtcgaaaaccctaattccccacgggagattcttcctccgtcgcttcaacgacgcggcttcgaagaaaacggcggcgccgagcctcgtctgtttcaaccgccgtccctattcatcgaaacctcatctgatcgagatcgacctggactcttcctcgtcagcgacttccaaggccgaagccgaagccgcggttctcaagaagctgaacgagttcgtacggaggatcgtcgttcagaactcgactcccgattggctccctttctccccaggatcctccttctgggtccctccgcaccaaaacaccgccgccaagatcgctaatttggtcgaccaggtgacgcatcctttgacggaggaggaggttctctccctgtcttctccttctggctggccttgctcctctttcttcactcctcctccagatgatgattcttcatctaaacaaagggtggaaggtagcacggagttgaacgttccggggaatgagatgctggaagtcaagctagcgcagtttcccgatccaatctacttgttggaacacggagatgatgatgagtgattttacatttccagctcacgtggaaggccagtcctgatgcatggtttgcgttgacaggctttggagaaaaaaagacagatgattctcgagactgatgaggttgtgtttgtatatacagttgcaagccgtggaattatatcgatgttttggctgtcttaacgctgtttgtgaactataaattatacagcttgatattaattaattaaaaccgtagcagacggtgcaacttcagatt

SEQ ID NO: 7199 - protein, 189 aa, Glycine max
  peptide (1)..(189): Ceres Seq. ID no. 14304229
  misc_feature (1)..(189): NCBI GI NO: 18398961 NR Description: expressed protein [Arabidopsis thaliana]
  misc_feature (28)..(189): NCBI GI NO: 14423398 NR Description: Unknown protein [Arabidopsis thaliana]
  misc_feature (1)..(116): NCBI GI NO: 38175698 NR Description: unknown protein
  misc_feature (115)..(159): NCBI GI NO: 38175698 NR Description: unknown protein
  misc_feature (1)..(140): NCBI GI NO: 18394407 NR Description: expressed protein [Arabidopsis thaliana]
  misc_feature (1)..(140): NCBI GI NO: 30685027 NR Description: expressed protein [Arabidopsis thaliana]
  misc_feature (68)..(140): NCBI GI NO: 18412160 NR Description: expressed protein [Arabidopsis thaliana]
  misc_feature (68)..(140): NCBI GI NO: 21592720 NR Description: unknown [Arabidopsis thaliana]
  misc_feature (68)..(140): NCBI GI NO: 25364101 NR Description: hypothetical protein F9K20.6
  misc_feature (1)..(140): NCBI GI NO: 38346553 NR Description: OSJNBa0035M09.14
MSRLLSKTLIPHGRFFLRRFNDAASKKTAAPSLVCFNRRPYSSKPHLIEIDLDSSSSATSKAEAEAAVLKKLNEFVRRIVVQNSTPDWLPFSPGSSFWVPPHQNTAAKIANLVDQVTHPLTEEEVLSLSSPSGWPCSSFFTPPPDDDSSSKQRVEGSTELNVPGNEMLEVKLAQFPDPIYLLEHGDDDE

SEQ ID NO: 7200 - protein, 112 aa, Glycine max
  peptide (1)..(112): Ceres Seq. ID no. 14304230
LKNVPIAVENPNSPREILPPSLQRRGFEENGGAEPRLFQPPSLFIETSSDRDRPGLFLVSDFQGRSRSRGSQEAERVRTEDRRSELDSRLAPFLPRILLLGPSAPKHRRQDR

SEQ ID NO: 7201 - DNA, 1013 bp, Glycine max
  misc_feature (1)..(1013): Ceres Seq. ID no. 14306812
aatcccaatccaaatctcatcgccaagcaatcatcactctagccctttgccctccccacccgcagcagcatggcgagcccgcagtgctgcgcgaacccaccggcgctcaaccccgccgccggcgagggcaaggtcgtggacagcttcggcgggatcaaggcgtacgtcgccggcgcccaggactccaaggccgccgtcgtcctcatctccgacgtctacggttttgaagcgccgaatctgaggaagatagccgataaagttgcttcgtctggatattttgttgtcgtgccagatttcttacatggggatccatttgtacctgaaaacgctgaccgaccaatagcagtgtggataaaggagcataccccgggaaaagcatttgaagaggcaaaacctgttattgctgctctaaaggaacaaggagcgtctagtgttggggctgcaggttattgctggggtgcaaaggtagttgcagagctagggaaagctaatgagatccaggcagctgttatgtcgcacccttcatttgttactgttgatgatataaaagaggtgaaatgccccatctctatacttggagctgaaaccgacgtaatgtccccaccagaattggtcaaggagttcgagcaggttctatcctctaactcacggattgctcactttgtcaagatcttccctggggtttctcatggatggaccgtgagatacaaaagcgaagacgcagctgctgtgaagagcgcctaggaagccctggcggacatggttgactggtttaacaagaacctcaagtaaacctaatgaattagcggccatccttttgtaataagccagtgtcactcttcaggagtcatcacgcgagcacccacggtttatgttatggtcttagctatatagcctatagcgcatgcatctttgtctgccgcaggtctgctggtatgtgtgtgattgctcgtatcggggtctgcttgtgctgaacattgaactactgcactcaaataaaatgtggtatttac

SEQ ID NO: 7202 - protein, 224 aa, Glycine max
  peptide (1)..(224): Ceres Seq. ID no. 14306813
  misc_feature (29)..(224): Pfam Name: Pfam Description:  Dienelactone hydrolase family
  misc_feature (1)..(224): NCBI GI NO: 18403820 NR Description: expressed protein [Arabidopsis thaliana]
  misc_feature (1)..(224): NCBI GI NO: 18403812 NR Description: expressed protein [Arabidopsis thaliana]
  misc_feature (1)..(224): NCBI GI NO: 24899687 NR Description: Unknown protein [Arabidopsis thaliana]
  misc_feature (1)..(224): NCBI GI NO: 40253303 NR Description: putative Endo-1,3;1,4-beta-D-glucanase precursor
  misc_feature (1)..(224): NCBI GI NO: 40253306 NR Description: putative Endo-1,3;1,4-beta-D-glucanase precursor
  misc_feature (44)..(224): NCBI GI NO: 9294513 NR Description: contains similarity to endo-1
  misc_feature (1)..(195): NCBI GI NO: 8928122 NR Description: Endo-1,3;1,4-beta-D-glucanase precursor
  misc_feature (70)..(224): NCBI GI NO: 40253308 NR Description: Endo-1,3
  misc_feature (1)..(224): NCBI GI NO: 6319267 NR Description: Hypothetical ORF; Yal049cp
  misc_feature (29)..(224): NCBI GI NO: 20270371 NR Description: hypothetical protein BC001573 [Homo sapiens]
MASPQCCANPPALNPAAGEGKVVDSFGGIKAYVAGAQDSKAAVVLISDVYGFEAPNLRKIADKVASSGYFVVVPDFLHGDPFVPENADRPIAVWIKEHTPGKAFEEAKPVIAALKEQGASSVGAAGYCWGAKVVAELGKANEIQAAVMSHPSFVTVDDIKEVKCPISILGAETDVMSPPELVKEFEQVLSSNSRIAHFVKIFPGVSHGWTVRYKSEDAAAVKSA

SEQ ID NO: 7203 - DNA, 1396 bp, Glycine max
  misc_feature (1)..(1396): Ceres Seq. ID no. 15176057
gctttcttaccttccattctttcattctctctcttgcattacagcgacactgttcaaatctcttttctttctaaaaattaaaagcaaagaatttacgtaagagactgagattgagtgagtgaatggagtttagtaacctcactctggagatcttctccaaactggagcaaaaatggctctcacattgtaaagccaccaacaaaactcgcattctcagcattgacggcggaggaaccaccgccattgtcgccggcgaagctctcatctacctcgaggatcagatccgtgttcacacctccgatcctcacgctcaggtagccgatttcttcgacatcgtcgccggcaccggcattggcgccatccttgccgccatgatcaccgccggcgacgcctttggtaggccgctctacaccgccagggaagccgtccgtctcgtctcggaaagaaactctgaactctacaagctcaaatccggcggaatcttccgccggcgccggagattctcctccaggagcatggacaacgcgttgaagcaagtgttccagagaaaggaggaggacggacggttgttgaccttgaaggacacgtgtaaaccgctccttattccttgcttcgacctcaagagttccgcgccgttcgtgttttcgcgcgccgacgcgtccgagtctccgagcttcgacttcgagctctggaaggtgtgccgtgccacgtcagcgacgccgagccacttcaagccgttcgacttcgcttccgtcgacggcaagacctcgtgctccgccgtcgacggcggcctagtcatgaacaaccctactgcagcggccgtcacgcacgtcctccataacaagcgcgatttcccgtcggtgaacggcgtggaggatctgctcgtcctttccttggggaacggatcgtcgaacgcaaaagcgtgcgagactcgcacgtgctcaacgccgtcggtggttgacattgtgctcgacggtgtttccgagaccattgaccagatgttagggaacgccttctgctggaaccgtacggactacgtcagaatccaggctttcggtttggaaagtgaagcaatgaagaaggaagaggttctcaaagagaggggactcgagtcgttaccgtttggcgggaagcggttactgacagagactaacggaaacagaatagatagcttcgtgcaacgtcttgttgctaccggaaaaccaagcccgccgtcaagtccctgcaaggattccgccgtcaaccctctcgctaacggtcgctagtttttttattttacttaatattttagcttcttttttttttttttagattttaacggtgtaaagtgtaactagtgtttttacctagttatgccagctgtcgtagttaatagcatttaataatttaccactgc

SEQ ID NO: 7204 - protein, 380 aa, Glycine max
  peptide (1)..(380): Ceres Seq. ID no. 15176058
  misc_feature (31)..(234): Pfam Name: Pfam Description:  Patatin-like phospholipase
  misc_feature (1)..(380): NCBI GI NO: 11357489 NR Description: hypothetical protein F16M2
  misc_feature (1)..(380): NCBI GI NO: 18412659 NR Description: patatin-related [Arabidopsis thaliana]
  misc_feature (27)..(312): NCBI GI NO: 15225054 NR Description: patatin family [Arabidopsis thaliana]
  misc_feature (321)..(356): NCBI GI NO: 15225054 NR Description: patatin family [Arabidopsis thaliana]
  misc_feature (27)..(312): NCBI GI NO: 15233136 NR Description: patatin-related [Arabidopsis thaliana]
  misc_feature (321)..(356): NCBI GI NO: 15233136 NR Description: patatin-related [Arabidopsis thaliana]
  misc_feature (27)..(312): NCBI GI NO: 34897124 NR Description: putative lipid acyl hydrolase [Oryza sativa]
  misc_feature (321)..(356): NCBI GI NO: 34897124 NR Description: putative lipid acyl hydrolase [Oryza sativa]
  misc_feature (30)..(312): NCBI GI NO: 30688454 NR Description: patatin-related [Arabidopsis thaliana]
  misc_feature (30)..(309): NCBI GI NO: 7486230 NR Description: hypothetical protein F27B13
MEFSNLTLEIFSKLEQKWLSHCKATNKTRILSIDGGGTTAIVAGEALIYLEDQIRVHTSDPHAQVADFFDIVAGTGIGAILAAMITAGDAFGRPLYTAREAVRLVSERNSELYKLKSGGIFRRRRRFSSRSMDNALKQVFQRKEEDGRLLTLKDTCKPLLIPCFDLKSSAPFVFSRADASESPSFDFELWKVCRATSATPSHFKPFDFASVDGKTSCSAVDGGLVMNNPTAAAVTHVLHNKRDFPSVNGVEDLLVLSLGNGSSNAKACETRTCSTPSVVDIVLDGVSETIDQMLGNAFCWNRTDYVRIQAFGLESEAMKKEEVLKERGLESLPFGGKRLLTETNGNRIDSFVQRLVATGKPSPPSSPCKDSAVNPLANGR

SEQ ID NO: 7205 - protein, 297 aa, Glycine max
  peptide (1)..(297): Ceres Seq. ID no. 15176059
  misc_feature (1)..(151): Pfam Name: Pfam Description:  Patatin-like phospholipase
  misc_feature (1)..(297): NCBI GI NO: 11357489 NR Description: hypothetical protein F16M2
  misc_feature (1)..(297): NCBI GI NO: 18412659 NR Description: patatin-related [Arabidopsis thaliana]
  misc_feature (1)..(229): NCBI GI NO: 15225054 NR Description: patatin family [Arabidopsis thaliana]
  misc_feature (238)..(273): NCBI GI NO: 15225054 NR Description: patatin family [Arabidopsis thaliana]
  misc_feature (1)..(229): NCBI GI NO: 15233136 NR Description: patatin-related [Arabidopsis thaliana]
  misc_feature (238)..(273): NCBI GI NO: 15233136 NR Description: patatin-related [Arabidopsis thaliana]
  misc_feature (1)..(229): NCBI GI NO: 34897124 NR Description: putative lipid acyl hydrolase [Oryza sativa]
  misc_feature (238)..(273): NCBI GI NO: 34897124 NR Description: putative lipid acyl hydrolase [Oryza sativa]
  misc_feature (1)..(229): NCBI GI NO: 30688454 NR Description: patatin-related [Arabidopsis thaliana]
  misc_feature (1)..(226): NCBI GI NO: 7486230 NR Description: hypothetical protein F27B13
MITAGDAFGRPLYTAREAVRLVSERNSELYKLKSGGIFRRRRRFSSRSMDNALKQVFQRKEEDGRLLTLKDTCKPLLIPCFDLKSSAPFVFSRADASESPSFDFELWKVCRATSATPSHFKPFDFASVDGKTSCSAVDGGLVMNNPTAAAVTHVLHNKRDFPSVNGVEDLLVLSLGNGSSNAKACETRTCSTPSVVDIVLDGVSETIDQMLGNAFCWNRTDYVRIQAFGLESEAMKKEEVLKERGLESLPFGGKRLLTETNGNRIDSFVQRLVATGKPSPPSSPCKDSAVNPLANGR

SEQ ID NO: 7206 - protein, 249 aa, Glycine max
  peptide (1)..(249): Ceres Seq. ID no. 15176060
  misc_feature (1)..(103): Pfam Name: Pfam Description:  Patatin-like phospholipase
  misc_feature (1)..(249): NCBI GI NO: 11357489 NR Description: hypothetical protein F16M2
  misc_feature (1)..(249): NCBI GI NO: 18412659 NR Description: patatin-related [Arabidopsis thaliana]
  misc_feature (1)..(181): NCBI GI NO: 15225054 NR Description: patatin family [Arabidopsis thaliana]
  misc_feature (190)..(225): NCBI GI NO: 15225054 NR Description: patatin family [Arabidopsis thaliana]
  misc_feature (1)..(181): NCBI GI NO: 15233136 NR Description: patatin-related [Arabidopsis thaliana]
  misc_feature (190)..(225): NCBI GI NO: 15233136 NR Description: patatin-related [Arabidopsis thaliana]
  misc_feature (1)..(181): NCBI GI NO: 34897124 NR Description: putative lipid acyl hydrolase [Oryza sativa]
  misc_feature (190)..(225): NCBI GI NO: 34897124 NR Description: putative lipid acyl hydrolase [Oryza sativa]
  misc_feature (1)..(181): NCBI GI NO: 30688454 NR Description: patatin-related [Arabidopsis thaliana]
  misc_feature (1)..(178): NCBI GI NO: 7486230 NR Description: hypothetical protein F27B13
MDNALKQVFQRKEEDGRLLTLKDTCKPLLIPCFDLKSSAPFVFSRADASESPSFDFELWKVCRATSATPSHFKPFDFASVDGKTSCSAVDGGLVMNNPTAAAVTHVLHNKRDFPSVNGVEDLLVLSLGNGSSNAKACETRTCSTPSVVDIVLDGVSETIDQMLGNAFCWNRTDYVRIQAFGLESEAMKKEEVLKERGLESLPFGGKRLLTETNGNRIDSFVQRLVATGKPSPPSSPCKDSAVNPLANGR

SEQ ID NO: 7207 - DNA, 774 bp, Glycine max
  misc_feature (1)..(774): Ceres Seq. ID no. 14304167
acataatgcgttctaaatttaattccagtagacccatgcacaccagaacacttccttctgcggcgggttgcttcctcctcttacgagcctttccattcactccatcgattcggtgggtgcgggtgctgcgaaaccgagctagaccctgatcggtgtcggcacaccgccggagaacaagatgatcgtctgcgtcgccgtcgtcggtcaccagaacaatccgctgtacattcagagcttcacggaggccgacgatgctcttaagctccaccacatcgtccattgctcgctcgatgtggtcgacgagcgagtgaacaatcctaaaaagtctggaccgatgcttaatgagacgtttttgggactgctttatcctattgaaaactacaaagtatatggatatctgactaatacgaaggtgaaatttatcttggtgaccacggatctggatgttaaagatgcggatgtaaggaattttttcaggaggttccattctgcatatgtagatgccgtttcaaacccattccatgtaccaggcaaaaagataacctccagaacttttgcagaaagagtgagcacaattgtcaagtcatttggcttgagttctgctgggtgaacatctataactggtgcctagtatgatgatgcttggttgatatttggcacaacttttcttttgttattctaagctcctgccttgtagttttagcagtggtaaatgcttaggaacattttgaacagaatcctattttcaatatatcatattcaaattgaaccatc

SEQ ID NO: 7208 - protein, 143 aa, Glycine max
  peptide (1)..(143): Ceres Seq. ID no. 14304168
  misc_feature (1)..(140): NCBI GI NO: 18399520 NR Description: expressed protein [Arabidopsis thaliana]
  misc_feature (1)..(140): NCBI GI NO: 21555278 NR Description: unknown [Arabidopsis thaliana]
  misc_feature (1)..(139): NCBI GI NO: 32526668 NR Description: hypothetical protein
  misc_feature (1)..(116): NCBI GI NO: 25338945 NR Description: hypothetical protein At2g20930
  misc_feature (1)..(134): NCBI GI NO: 6841572 NR Description: HSPC176 [Homo sapiens]
  misc_feature (1)..(134): NCBI GI NO: 27659496 NR Description: similar to hypothetical protein, 2-6
  misc_feature (1)..(134): NCBI GI NO: 10946914 NR Description: hypothetical protein, 2-6 [Mus musculus]
  misc_feature (3)..(134): NCBI GI NO: 34851319 NR Description: similar to hypothetical protein, 2-6
  misc_feature (1)..(134): NCBI GI NO: 7706429 NR Description: unknown [Homo sapiens]
  misc_feature (1)..(136): NCBI GI NO: 31247934 NR Description: ENSANGP00000010040 [Anopheles gambiae]
MIVCVAVVGHQNNPLYIQSFTEADDALKLHHIVHCSLDVVDERVNNPKKSGPMLNETFLGLLYPIENYKVYGYLTNTKVKFILVTTDLDVKDADVRNFFRRFHSAYVDAVSNPFHVPGKKITSRTFAERVSTIVKSFGLSSAG

SEQ ID NO: 7209 - protein, 91 aa, Glycine max
  peptide (1)..(91): Ceres Seq. ID no. 14304169
  misc_feature (1)..(88): NCBI GI NO: 18399520 NR Description: expressed protein [Arabidopsis thaliana]
  misc_feature (1)..(88): NCBI GI NO: 21555278 NR Description: unknown [Arabidopsis thaliana]
  misc_feature (1)..(87): NCBI GI NO: 32526668 NR Description: hypothetical protein
  misc_feature (1)..(64): NCBI GI NO: 25338945 NR Description: hypothetical protein At2g20930
  misc_feature (1)..(82): NCBI GI NO: 6841572 NR Description: HSPC176 [Homo sapiens]
  misc_feature (1)..(82): NCBI GI NO: 27659496 NR Description: similar to hypothetical protein, 2-6
  misc_feature (1)..(82): NCBI GI NO: 10946914 NR Description: hypothetical protein, 2-6 [Mus musculus]
  misc_feature (1)..(82): NCBI GI NO: 34851319 NR Description: similar to hypothetical protein, 2-6
  misc_feature (1)..(82): NCBI GI NO: 7706429 NR Description: unknown [Homo sapiens]
  misc_feature (1)..(84): NCBI GI NO: 31247934 NR Description: ENSANGP00000010040 [Anopheles gambiae]
MLNETFLGLLYPIENYKVYGYLTNTKVKFILVTTDLDVKDADVRNFFRRFHSAYVDAVSNPFHVPGKKITSRTFAERVSTIVKSFGLSSAG

SEQ ID NO: 7210 - DNA, 818 bp, Glycine max
  misc_feature (1)..(818): Ceres Seq. ID no. 14306814
ctagattagagttgatctcggctggtgatttcactagtccgcgcaggtgccaagcccggattgggcccgctgctcccctctcgtctcccgtcgtcggaccaccggcgacccctcttccaagccgccatcgtcctcacctccggcacttcctcttctccaccactcgacccagctcagcagcagggcggcggacgggaggatgatggggagcaacaaccccggcggcgctgggggagggggagggatggccccgggcacgggggccggcggcagcgacgggcggcacgacgacgaggccgtgctcaccgagttcctctcctccctcatggactacaatcccacgatcccggacgagctcgtggagcactacctcggccgaagcggcttccactgccccgacctacgcctaacaaggctggttgctgtagctgctcaaaagttcatttcagacattgcaagtgactctcttcagcactgcaaagccagggttgcagcacctgtcaaagataacaagagcaaacaaccaaaggatagacgtcttgtattgacaatggatgatctttcaaaagccttgcgtgagcatggtgttaatctgaaacatccagagtattttgcggacagcccatcagcagggatggccccctcaacaagagaggagtagaatcgattgcttcttcaacaagagagggctagaatcaattgtttcttataagcgtacccagtgaacggtcgtgtccttcccaactttatgtaacaaaaccttataagcatgtatcgaatgtcagttcttgatgtattatggacccgtagttgccttc

SEQ ID NO: 7211 - protein, 153 aa, Glycine max
  peptide (1)..(153): Ceres Seq. ID no. 14306815
  misc_feature (47)..(96): Pfam Name: Pfam Description:  Transcription initiation factor TFIID 23-30kDa subunit
  misc_feature (21)..(153): NCBI GI NO: 15236059 NR Description: Transcription factor II homolog
  misc_feature (21)..(153): NCBI GI NO: 26450720 NR Description: putative transcription factor II
  misc_feature (1)..(138): NCBI GI NO: 2136293 NR Description: transcription factor IID 30k chain - human
  misc_feature (3)..(138): NCBI GI NO: 9910576 NR Description: TAF10 RNA polymerase II, TATA box binding protein
  misc_feature (3)..(138): NCBI GI NO: 26338586 NR Description: unnamed protein product [Mus musculus]
  misc_feature (3)..(138): NCBI GI NO: 21619259 NR Description: Ilk protein [Mus musculus]
  misc_feature (3)..(138): NCBI GI NO: 34859827 NR Description: similar to Ilk protein [Rattus norvegicus]
  misc_feature (1)..(138): NCBI GI NO: 5454106 NR Description: TBP-related factor 10; TATA box binding protein
  misc_feature (1)..(137): NCBI GI NO: 17137648 NR Description: TBP-associated factor 10b CG3069-PA
  misc_feature (7)..(138): NCBI GI NO: 20863106 NR Description: similar to Transcription initiation factor TFIID 30kDa subunit
MMGSNNPGGAGGGGGMAPGTGAGGSDGRHDDEAVLTEFLSSLMDYNPTIPDELVEHYLGRSGFHCPDLRLTRLVAVAAQKFISDIASDSLQHCKARVAAPVKDNKSKQPKDRRLVLTMDDLSKALREHGVNLKHPEYFADSPSAGMAPSTREE

SEQ ID NO: 7212 - protein, 152 aa, Glycine max
  peptide (1)..(152): Ceres Seq. ID no. 14306816
  misc_feature (46)..(95): Pfam Name: Pfam Description:  Transcription initiation factor TFIID 23-30kDa subunit
  misc_feature (20)..(152): NCBI GI NO: 15236059 NR Description: Transcription factor II homolog
  misc_feature (20)..(152): NCBI GI NO: 26450720 NR Description: putative transcription factor II
  misc_feature (1)..(137): NCBI GI NO: 2136293 NR Description: transcription factor IID 30k chain - human
  misc_feature (2)..(137): NCBI GI NO: 9910576 NR Description: TAF10 RNA polymerase II, TATA box binding protein
  misc_feature (2)..(137): NCBI GI NO: 26338586 NR Description: unnamed protein product [Mus musculus]
  misc_feature (2)..(137): NCBI GI NO: 34859827 NR Description: similar to Ilk protein [Rattus norvegicus]
  misc_feature (2)..(137): NCBI GI NO: 21619259 NR Description: Ilk protein [Mus musculus]
  misc_feature (1)..(137): NCBI GI NO: 5454106 NR Description: TBP-related factor 10; TATA box binding protein
  misc_feature (1)..(136): NCBI GI NO: 17137648 NR Description: TBP-associated factor 10b CG3069-PA
  misc_feature (6)..(137): NCBI GI NO: 20863106 NR Description: similar to Transcription initiation factor TFIID 30kDa subunit
MGSNNPGGAGGGGGMAPGTGAGGSDGRHDDEAVLTEFLSSLMDYNPTIPDELVEHYLGRSGFHCPDLRLTRLVAVAAQKFISDIASDSLQHCKARVAAPVKDNKSKQPKDRRLVLTMDDLSKALREHGVNLKHPEYFADSPSAGMAPSTREE

SEQ ID NO: 7213 - protein, 138 aa, Glycine max
  peptide (1)..(138): Ceres Seq. ID no. 14306817
  misc_feature (32)..(81): Pfam Name: Pfam Description:  Transcription initiation factor TFIID 23-30kDa subunit
  misc_feature (6)..(138): NCBI GI NO: 15236059 NR Description: Transcription factor II homolog
  misc_feature (6)..(138): NCBI GI NO: 26450720 NR Description: putative transcription factor II
  misc_feature (1)..(123): NCBI GI NO: 2136293 NR Description: transcription factor IID 30k chain - human
  misc_feature (1)..(123): NCBI GI NO: 9910576 NR Description: TAF10 RNA polymerase II, TATA box binding protein
  misc_feature (1)..(123): NCBI GI NO: 34859827 NR Description: similar to Ilk protein [Rattus norvegicus]
  misc_feature (1)..(123): NCBI GI NO: 26338586 NR Description: unnamed protein product [Mus musculus]
  misc_feature (1)..(123): NCBI GI NO: 21619259 NR Description: Ilk protein [Mus musculus]
  misc_feature (1)..(123): NCBI GI NO: 5454106 NR Description: TBP-related factor 10; TATA box binding protein
  misc_feature (1)..(122): NCBI GI NO: 17137648 NR Description: TBP-associated factor 10b CG3069-PA
  misc_feature (1)..(123): NCBI GI NO: 20863106 NR Description: similar to Transcription initiation factor TFIID 30kDa subunit
MAPGTGAGGSDGRHDDEAVLTEFLSSLMDYNPTIPDELVEHYLGRSGFHCPDLRLTRLVAVAAQKFISDIASDSLQHCKARVAAPVKDNKSKQPKDRRLVLTMDDLSKALREHGVNLKHPEYFADSPSAGMAPSTREE

SEQ ID NO: 7214 - DNA, 1493 bp, Glycine max
  misc_feature (1)..(1493): Ceres Seq. ID no. 13582609
atttctttgggattcttgcccttgttttggtgatgccatgggagttagctgtttttgtttcctttctctctgatagaaaaagaactaagaatgggcaaatctttattgatttacttaaaaaaatatcaatatcctttaaaatatacaggcaccagagaattttttattttttatttttaatgttaaaaggtcaatgaatatgattatgagatggaagggagtaccttctttggcttcttcctaagtcctaaccttgacgaggccaattccattcattttgatgtgtctctgttttcaacaaacgttcacaacaacacatttcgccgtttcaaatcactacttaacaccggggcacatagagagagagagacatcatggtctcttctaatggactagctacgagtcagccacttttttcttttggattgatttctgatgtccaatatgctgacattcctgatggccgttcattccttggtgttccacggtattatagacacagtcttctcatattgcagagagcagttaaagaatggaacactcatcagaagcacaagtttgtgattaattttggagattttgttgatgggttttgtcccaaagatcaatctcttgatactgtaaagaaagttgttgatgaatttgagatgttcacaggaggacctgtgtatcatatgattggcaatcactgcctatacaatcttcctcgcagcaagttaccttcattactgaagatccatactcttgatggccgtgcatactatgatttctcgccagtgcctgaatatagatttgttgttctggatgcctatgacatcagtgccattggttggcctcaagatcatccaaaaacactggaggccttgaaaatcctaagggagaagaatccaaatgaagataagaacagtccaacaaatttggagggtcctgaacgaaggtttgtaatgtttaatggagctgttggaaaggaacaggtcgaatggttagatggtgttctcttggagtcaacaaacttgaaacagaaggtggttgtctgctgccatctgcctctacatcctggtgcggcaactgaagagacactgttgtggaattacgatgaagtaatgaatttgatacacagatacaattgcgttaaggtctgtcttgcagggcatgatcataaaggcggatactctattgattctcatgggatacaccatagagtttttgaagctgctttggaatgccctcctggtacggatgcatttggatacattgatgtctatgatgacaggatatcacttgttggaactgacagaatgaaaagtacagagatggattttactcccccaagttaatttgtatgacaggatgtcttcacgtttgtaaaaatacctattattttttcactaatgtttgaaatagtacctatcatcttgttctagtcctacctacagggaagtttgtatttaaagttggaataacttaaattgagttggtactgttcatgaatc

SEQ ID NO: 7215 - protein, 320 aa, Glycine max
  peptide (1)..(320): Ceres Seq. ID no. 13582610
  misc_feature (14)..(264): Pfam Name: Pfam Description:  Calcineurin-like phosphoesterase
  misc_feature (6)..(315): NCBI GI NO: 15233946 NR Description: calcineurin-like phosphoesterase family
  misc_feature (1)..(318): NCBI GI NO: 34898102 NR Description: hypothetical protein~similar to Arabidopsisthaliana chromosome 4
  misc_feature (1)..(316): NCBI GI NO: 13278450 NR Description: RIKEN cDNA 2310004I24 gene [Mus musculus]
  misc_feature (11)..(316): NCBI GI NO: 34870877 NR Description: similar to RIKEN cDNA 2310004I24 gene
  misc_feature (123)..(319): NCBI GI NO: 33416711 NR Description: Unknown (protein for MGC:69104) [Xenopus laevis]
  misc_feature (9)..(179): NCBI GI NO: 21361843 NR Description: x 006 protein [Homo sapiens]
  misc_feature (1)..(179): NCBI GI NO: 13384932 NR Description: RIKEN cDNA 2310004I24 [Mus musculus]
  misc_feature (9)..(168): NCBI GI NO: 9437345 NR Description: x 006 protein [Homo sapiens]
  misc_feature (135)..(208): NCBI GI NO: 34902950 NR Description: P0462H08.18
  misc_feature (20)..(103): NCBI GI NO: 34902950 NR Description: P0462H08.18
MVSSNGLATSQPLFSFGLISDVQYADIPDGRSFLGVPRYYRHSLLILQRAVKEWNTHQKHKFVINFGDFVDGFCPKDQSLDTVKKVVDEFEMFTGGPVYHMIGNHCLYNLPRSKLPSLLKIHTLDGRAYYDFSPVPEYRFVVLDAYDISAIGWPQDHPKTLEALKILREKNPNEDKNSPTNLEGPERRFVMFNGAVGKEQVEWLDGVLLESTNLKQKVVVCCHLPLHPGAATEETLLWNYDEVMNLIHRYNCVKVCLAGHDHKGGYSIDSHGIHHRVFEAALECPPGTDAFGYIDVYDDRISLVGTDRMKSTEMDFTPPS

SEQ ID NO: 7216 - protein, 229 aa, Glycine max
  peptide (1)..(229): Ceres Seq. ID no. 13582611
  misc_feature (1)..(173): Pfam Name: Pfam Description:  Calcineurin-like phosphoesterase
  misc_feature (1)..(224): NCBI GI NO: 15233946 NR Description: calcineurin-like phosphoesterase family
  misc_feature (1)..(227): NCBI GI NO: 34898102 NR Description: hypothetical protein~similar to Arabidopsisthaliana chromosome 4
  misc_feature (1)..(225): NCBI GI NO: 13278450 NR Description: RIKEN cDNA 2310004I24 gene [Mus musculus]
  misc_feature (1)..(225): NCBI GI NO: 34870877 NR Description: similar to RIKEN cDNA 2310004I24 gene
  misc_feature (32)..(228): NCBI GI NO: 33416711 NR Description: Unknown (protein for MGC:69104) [Xenopus laevis]
  misc_feature (1)..(88): NCBI GI NO: 21361843 NR Description: x 006 protein [Homo sapiens]
  misc_feature (1)..(88): NCBI GI NO: 13384932 NR Description: RIKEN cDNA 2310004I24 [Mus musculus]
  misc_feature (1)..(77): NCBI GI NO: 9437345 NR Description: x 006 protein [Homo sapiens]
  misc_feature (44)..(117): NCBI GI NO: 34902950 NR Description: P0462H08.18
  misc_feature (1)..(12): NCBI GI NO: 34902950 NR Description: P0462H08.18
MFTGGPVYHMIGNHCLYNLPRSKLPSLLKIHTLDGRAYYDFSPVPEYRFVVLDAYDISAIGWPQDHPKTLEALKILREKNPNEDKNSPTNLEGPERRFVMFNGAVGKEQVEWLDGVLLESTNLKQKVVVCCHLPLHPGAATEETLLWNYDEVMNLIHRYNCVKVCLAGHDHKGGYSIDSHGIHHRVFEAALECPPGTDAFGYIDVYDDRISLVGTDRMKSTEMDFTPPS

SEQ ID NO: 7217 - protein, 220 aa, Glycine max
  peptide (1)..(220): Ceres Seq. ID no. 13582612
  misc_feature (1)..(164): Pfam Name: Pfam Description:  Calcineurin-like phosphoesterase
  misc_feature (1)..(215): NCBI GI NO: 15233946 NR Description: calcineurin-like phosphoesterase family
  misc_feature (1)..(218): NCBI GI NO: 34898102 NR Description: hypothetical protein~similar to Arabidopsisthaliana chromosome 4
  misc_feature (1)..(216): NCBI GI NO: 13278450 NR Description: RIKEN cDNA 2310004I24 gene [Mus musculus]
  misc_feature (1)..(216): NCBI GI NO: 34870877 NR Description: similar to RIKEN cDNA 2310004I24 gene
  misc_feature (23)..(219): NCBI GI NO: 33416711 NR Description: Unknown (protein for MGC:69104) [Xenopus laevis]
  misc_feature (1)..(79): NCBI GI NO: 21361843 NR Description: x 006 protein [Homo sapiens]
  misc_feature (1)..(79): NCBI GI NO: 13384932 NR Description: RIKEN cDNA 2310004I24 [Mus musculus]
  misc_feature (1)..(68): NCBI GI NO: 9437345 NR Description: x 006 protein [Homo sapiens]
  misc_feature (35)..(108): NCBI GI NO: 34902950 NR Description: P0462H08.18
  misc_feature (3)..(216): NCBI GI NO: 17934785 NR Description: conserved hypothetical protein
MIGNHCLYNLPRSKLPSLLKIHTLDGRAYYDFSPVPEYRFVVLDAYDISAIGWPQDHPKTLEALKILREKNPNEDKNSPTNLEGPERRFVMFNGAVGKEQVEWLDGVLLESTNLKQKVVVCCHLPLHPGAATEETLLWNYDEVMNLIHRYNCVKVCLAGHDHKGGYSIDSHGIHHRVFEAALECPPGTDAFGYIDVYDDRISLVGTDRMKSTEMDFTPPS

SEQ ID NO: 7218 - DNA, 1093 bp, Glycine max
  misc_feature (1)..(1093): Ceres Seq. ID no. 14304124
acgattacgaagcgtgcccaactccatctgcttccttttcctcttccccccgtccccgacgacccccggccgaaaccctagcgaggcgcgatgttcgggtaccggaaggcgccggacctcgacctcgaggcgggcggctcggcggcgctctacccggggatgacggaggacgtggagctgcgctgggccttcatccgcaagatctacgtcatcctctcggtccagctcgccatgaccgccgccgtcgcggggttcgtcgtcaaggtccccgccgtctccgagttcttcgtctcctccaacgctggcctgggcctctacatcttcctcctcgtcctgcccctcatcgtgctctgccccctgcgctactaccaccagaagcaccccgtcaacctcatcctgctcggcgtcttcaccgtctccatcagcttcgccgtcggcatgacgtgcgccttcaccagcggaaaaatcatcttggaagctgcaattctgacagcagtggtggtgatcagcttgactgcctacactttctgggctgcaaagataggccatgatttcaacttcctgggcccgttcctgtttggagctcttatggtgctgctggtgttctcacttatccagatctttttcccactgggcaagatctccaccatgatatatggggccgtggcgtcgatcatcttctgtggctacatcatcttcgacacggacaacatcatcaagcgccacacgtatgacgagtacatctgggctgccgtgtccctctacctcgacatcatcaacctgttcctgaatctgatgcaaattctgcgggcagctgatagctgagcgcaccttgcccaacatcgcatgatttaagtccactagcttgtgcatatcagaaaattcatgaatgcccgcagatacctgtaggcatgtacaatcgttatcagtaaattctgccgtcctagactccatcacatgtcttgtttcctagcttcctggagtatgcaatgtgtgattgaaccaagctgcacgatgaaaatatactcactggtgctttgtgattgcaaggcacgtgaatttaattccctgctacgaaatgttccattttaat

SEQ ID NO: 7219 - protein, 244 aa, Glycine max
  peptide (1)..(244): Ceres Seq. ID no. 14304125
  misc_feature (29)..(243): Pfam Name: Pfam Description:  Uncharacterised protein family UPF0005
  misc_feature (1)..(243): NCBI GI NO: 34393841 NR Description: putative z-protein
  misc_feature (11)..(244): NCBI GI NO: 15229411 NR Description: hypothetical protein [Arabidopsis thaliana]
  misc_feature (4)..(243): NCBI GI NO: 15218701 NR Description: hypothetical protein [Arabidopsis thaliana]
  misc_feature (20)..(244): NCBI GI NO: 14626300 NR Description: putative receptor-associated protein
  misc_feature (4)..(241): NCBI GI NO: 15235466 NR Description: hypothetical protein [Arabidopsis thaliana]
  misc_feature (9)..(244): NCBI GI NO: 18414455 NR Description: expressed protein [Arabidopsis thaliana]
  misc_feature (24)..(244): NCBI GI NO: 34393840 NR Description: putative z-protein
  misc_feature (9)..(87): NCBI GI NO: 7485070 NR Description: hypothetical protein - Arabidopsis thaliana
  misc_feature (124)..(195): NCBI GI NO: 7485070 NR Description: hypothetical protein - Arabidopsis thaliana
  misc_feature (85)..(124): NCBI GI NO: 7485070 NR Description: hypothetical protein - Arabidopsis thaliana
MFGYRKAPDLDLEAGGSAALYPGMTEDVELRWAFIRKIYVILSVQLAMTAAVAGFVVKVPAVSEFFVSSNAGLGLYIFLLVLPLIVLCPLRYYHQKHPVNLILLGVFTVSISFAVGMTCAFTSGKIILEAAILTAVVVISLTAYTFWAAKIGHDFNFLGPFLFGALMVLLVFSLIQIFFPLGKISTMIYGAVASIIFCGYIIFDTDNIIKRHTYDEYIWAAVSLYLDIINLFLNLMQILRAADS

SEQ ID NO: 7220 - protein, 221 aa, Glycine max
  peptide (1)..(221): Ceres Seq. ID no. 14304126
  misc_feature (6)..(220): Pfam Name: Pfam Description:  Uncharacterised protein family UPF0005
  misc_feature (1)..(220): NCBI GI NO: 34393841 NR Description: putative z-protein
  misc_feature (1)..(221): NCBI GI NO: 15229411 NR Description: hypothetical protein [Arabidopsis thaliana]
  misc_feature (1)..(220): NCBI GI NO: 15218701 NR Description: hypothetical protein [Arabidopsis thaliana]
  misc_feature (1)..(221): NCBI GI NO: 14626300 NR Description: putative receptor-associated protein
  misc_feature (1)..(218): NCBI GI NO: 15235466 NR Description: hypothetical protein [Arabidopsis thaliana]
  misc_feature (1)..(221): NCBI GI NO: 18414455 NR Description: expressed protein [Arabidopsis thaliana]
  misc_feature (1)..(221): NCBI GI NO: 34393840 NR Description: putative z-protein
  misc_feature (1)..(64): NCBI GI NO: 7485070 NR Description: hypothetical protein - Arabidopsis thaliana
  misc_feature (101)..(172): NCBI GI NO: 7485070 NR Description: hypothetical protein - Arabidopsis thaliana
  misc_feature (62)..(101): NCBI GI NO: 7485070 NR Description: hypothetical protein - Arabidopsis thaliana
MTEDVELRWAFIRKIYVILSVQLAMTAAVAGFVVKVPAVSEFFVSSNAGLGLYIFLLVLPLIVLCPLRYYHQKHPVNLILLGVFTVSISFAVGMTCAFTSGKIILEAAILTAVVVISLTAYTFWAAKIGHDFNFLGPFLFGALMVLLVFSLIQIFFPLGKISTMIYGAVASIIFCGYIIFDTDNIIKRHTYDEYIWAAVSLYLDIINLFLNLMQILRAADS

SEQ ID NO: 7221 - protein, 197 aa, Glycine max
  peptide (1)..(197): Ceres Seq. ID no. 14304127
  misc_feature (1)..(196): Pfam Name: Pfam Description:  Uncharacterised protein family UPF0005
  misc_feature (1)..(196): NCBI GI NO: 34393841 NR Description: putative z-protein
  misc_feature (1)..(197): NCBI GI NO: 15229411 NR Description: hypothetical protein [Arabidopsis thaliana]
  misc_feature (1)..(196): NCBI GI NO: 15218701 NR Description: hypothetical protein [Arabidopsis thaliana]
  misc_feature (1)..(197): NCBI GI NO: 14626300 NR Description: putative receptor-associated protein
  misc_feature (1)..(194): NCBI GI NO: 15235466 NR Description: hypothetical protein [Arabidopsis thaliana]
  misc_feature (1)..(197): NCBI GI NO: 18414455 NR Description: expressed protein [Arabidopsis thaliana]
  misc_feature (1)..(197): NCBI GI NO: 34393840 NR Description: putative z-protein
  misc_feature (1)..(40): NCBI GI NO: 7485070 NR Description: hypothetical protein - Arabidopsis thaliana
  misc_feature (77)..(148): NCBI GI NO: 7485070 NR Description: hypothetical protein - Arabidopsis thaliana
  misc_feature (38)..(77): NCBI GI NO: 7485070 NR Description: hypothetical protein - Arabidopsis thaliana
MTAAVAGFVVKVPAVSEFFVSSNAGLGLYIFLLVLPLIVLCPLRYYHQKHPVNLILLGVFTVSISFAVGMTCAFTSGKIILEAAILTAVVVISLTAYTFWAAKIGHDFNFLGPFLFGALMVLLVFSLIQIFFPLGKISTMIYGAVASIIFCGYIIFDTDNIIKRHTYDEYIWAAVSLYLDIINLFLNLMQILRAADS

SEQ ID NO: 7222 - DNA, 1476 bp, Glycine max
  misc_feature (1)..(1476): Ceres Seq. ID no. 13582342
acatcttggccaactgggtcgcttccaataccttcagattttggtaggatttcgtgcttttgcataattcgttgagtttctgaagctatggaggcttataagagatgggtgaggcagaacaaagagtttgtgcactccatggagtctttggccaatggattgacatagcttcttcctgaacggttttctgaatcagagattggaccagaagcagtaacaactattctgggaatcatcacagctctcaatgaacatataattgatacagctcctaagcaaaatattacaggctctgtcgagccttattcatttccttatccattatgcttatctgcattaaaggatttggaaacattagttgaagttgtggcacaacaatactatggtgatgataagaaatggaatttccttgccattactgaagcaaccaaggtactggttcggttatctttgtttcggaagagtggatataagatgctgctacaaggaggggaaacacctaatgatgaggagtattcagatagttttacttcacaacatcatatgggcttaaagcccgatgtgcatcataggcctggttatatgaaaaacaatcttggtgcaaaaccaatgaatcaggaaggaagagcattatctgctttggttagatttggagaaaaagcaaaggggtcagatccagtgtggttacgcagggttgaacaccaacaagcaactatggagcctacaacttcaagggtggatagaccaacacttctcaccatattgtctgaaaggggtctttgtggggctctgttttttattggagaagttctacttattagtagaccacttatttatgttttatttattcgaaaatatggtattcggtcatggaccccttggttcctttcgctggctattgattgcataggaaacagtattctttcactcattacatcgtcagtggctggtgggaaggaccgaatgtttcatctgtctgccctagaaaaggatgaggttaaacggcgaaagctgctatttgttctttacctaatgagagatccatttttcagcaagtatactaggcaaagacttgaaagcacggagaaagttttggagcctattcctgtcataggatttctcacagcaaaacttgttgaacttataattggagctcaaacacgatacacttacatgtcaggatcgtgaataaaatccagaacaaatgcctaattgccctccaagattttggaaagatagatattcttactcttcttccacactacctgctgttccaaacttttcaaatgatgaagaggtatcaaaccagctactattatgatttaaaaataacaaaccattgcaagcttgaacttttcttttgcttgacaattccaaacatagaagatgttaagctgcaacccatgtgtgagacaaattgtttgcaaggatagctacactatcaacaactcagtataaattggaatatttattggg

SEQ ID NO: 7223 - protein, 237 aa, Glycine max
  peptide (1)..(237): Ceres Seq. ID no. 13582343
  misc_feature (1)..(237): NCBI GI NO: 4837733 NR Description: shrunken seed protein [Arabidopsis thaliana]
  misc_feature (1)..(237): NCBI GI NO: 18406863 NR Description: shrunken seed protein (SSE1)
  misc_feature (1)..(237): NCBI GI NO: 7485633 NR Description: hypothetical protein At2g45690
  misc_feature (111)..(234): NCBI GI NO: 21355481 NR Description: CG3947-PA [Drosophila melanogaster]
  misc_feature (109)..(237): NCBI GI NO: 28829898 NR Description: similar to Mus musculus (Mouse)
  misc_feature (109)..(236): NCBI GI NO: 21553069 NR Description: peroxisome biogenesis factor 16; peroxin-16
  misc_feature (28)..(236): NCBI GI NO: 4758898 NR Description: peroxisomal biogenesis factor 16 isoform 1
  misc_feature (109)..(236): NCBI GI NO: 34856558 NR Description: similar to peroxisome biogenesis factor 16
  misc_feature (28)..(217): NCBI GI NO: 12653395 NR Description: Similar to peroxisomal biogenesis factor 16
  misc_feature (28)..(217): NCBI GI NO: 17136080 NR Description: peroxisomal biogenesis factor 16 isoform 2
MLLQGGETPNDEEYSDSFTSQHHMGLKPDVHHRPGYMKNNLGAKPMNQEGRALSALVRFGEKAKGSDPVWLRRVEHQQATMEPTTSRVDRPTLLTILSERGLCGALFFIGEVLLISRPLIYVLFIRKYGIRSWTPWFLSLAIDCIGNSILSLITSSVAGGKDRMFHLSALEKDEVKRRKLLFVLYLMRDPFFSKYTRQRLESTEKVLEPIPVIGFLTAKLVELIIGAQTRYTYMSGS

SEQ ID NO: 7224 - protein, 214 aa, Glycine max
  peptide (1)..(214): Ceres Seq. ID no. 13582344
  misc_feature (1)..(214): NCBI GI NO: 4837733 NR Description: shrunken seed protein [Arabidopsis thaliana]
  misc_feature (1)..(214): NCBI GI NO: 18406863 NR Description: shrunken seed protein (SSE1)
  misc_feature (1)..(214): NCBI GI NO: 7485633 NR Description: hypothetical protein At2g45690
  misc_feature (88)..(211): NCBI GI NO: 21355481 NR Description: CG3947-PA [Drosophila melanogaster]
  misc_feature (86)..(214): NCBI GI NO: 28829898 NR Description: similar to Mus musculus (Mouse)
  misc_feature (86)..(213): NCBI GI NO: 21553069 NR Description: peroxisome biogenesis factor 16; peroxin-16
  misc_feature (5)..(213): NCBI GI NO: 4758898 NR Description: peroxisomal biogenesis factor 16 isoform 1
  misc_feature (86)..(213): NCBI GI NO: 34856558 NR Description: similar to peroxisome biogenesis factor 16
  misc_feature (5)..(194): NCBI GI NO: 12653395 NR Description: Similar to peroxisomal biogenesis factor 16
  misc_feature (5)..(194): NCBI GI NO: 17136080 NR Description: peroxisomal biogenesis factor 16 isoform 2
MGLKPDVHHRPGYMKNNLGAKPMNQEGRALSALVRFGEKAKGSDPVWLRRVEHQQATMEPTTSRVDRPTLLTILSERGLCGALFFIGEVLLISRPLIYVLFIRKYGIRSWTPWFLSLAIDCIGNSILSLITSSVAGGKDRMFHLSALEKDEVKRRKLLFVLYLMRDPFFSKYTRQRLESTEKVLEPIPVIGFLTAKLVELIIGAQTRYTYMSGS

SEQ ID NO: 7225 - protein, 201 aa, Glycine max
  peptide (1)..(201): Ceres Seq. ID no. 13582345
  misc_feature (1)..(201): NCBI GI NO: 4837733 NR Description: shrunken seed protein [Arabidopsis thaliana]
  misc_feature (1)..(201): NCBI GI NO: 18406863 NR Description: shrunken seed protein (SSE1)
  misc_feature (1)..(201): NCBI GI NO: 7485633 NR Description: hypothetical protein At2g45690
  misc_feature (75)..(198): NCBI GI NO: 21355481 NR Description: CG3947-PA [Drosophila melanogaster]
  misc_feature (73)..(201): NCBI GI NO: 28829898 NR Description: similar to Mus musculus (Mouse)
  misc_feature (73)..(200): NCBI GI NO: 21553069 NR Description: peroxisome biogenesis factor 16; peroxin-16
  misc_feature (1)..(200): NCBI GI NO: 4758898 NR Description: peroxisomal biogenesis factor 16 isoform 1
  misc_feature (73)..(200): NCBI GI NO: 34856558 NR Description: similar to peroxisome biogenesis factor 16
  misc_feature (1)..(181): NCBI GI NO: 12653395 NR Description: Similar to peroxisomal biogenesis factor 16
  misc_feature (1)..(181): NCBI GI NO: 17136080 NR Description: peroxisomal biogenesis factor 16 isoform 2
MKNNLGAKPMNQEGRALSALVRFGEKAKGSDPVWLRRVEHQQATMEPTTSRVDRPTLLTILSERGLCGALFFIGEVLLISRPLIYVLFIRKYGIRSWTPWFLSLAIDCIGNSILSLITSSVAGGKDRMFHLSALEKDEVKRRKLLFVLYLMRDPFFSKYTRQRLESTEKVLEPIPVIGFLTAKLVELIIGAQTRYTYMSGS

SEQ ID NO: 7226 - DNA, 1747 bp, Glycine max
  misc_feature (1)..(1747): Ceres Seq. ID no. 12583190
cactattattgaaatatagaagcctctttccttcttcttctttttcttcttccttcatagcaaaagccatggccacgagacccgagagtgaaaaagaccctccacaaccaccttcacgtggctttctggccacagtacaagaaatcacaagaatctatagttcactgccacctagaccttctattgaagaagtagaagctgccacgtccactgtggacaccctcaacaacgaggagcaaatcaaactcaacgaaatctcaatgcaacaacaacctcctcacgatgatgtccctcaagacctcttctctgtcctgcaacaactcaaaaagactatggttctgttccacactcatcaacagaggagagatgcgctttatcttcttgagcttgaaaatatgtttcaaaccttcggtgatctcattcagagggcttctgaattagtttctggagatacccagaagcaaaaacttcccactatacccgaggaacacgcggtgatcactgaggaaagtgaaactctggtgaaggaagaggaaggaagacacaagaatgttttccatgtggtaaagccttccttgtctgcaggggatggaagcactgagaaattaagtctaatgaaagtggctactgttatagaaagttgtgctggtagtggagctacaatccttgagcttagagggaaattggtggatcagatggagtggttgcctgtgtcaattgggaaattatctgatgtcactgaaatggacctatctgaaaacagactcatggctcttccaacaaccattgtgggtcttaaggccttaacaaagcttgatcttcactcaaaccaacttataaaccttcctcactcatttggtgaattgataaaccttgttgatctcgacctccacgccaacaaattgaaatcacttcctgctacttttggaaacttgacaaacctcactgatcttgatttgagctcaaatgggttcacagatttaccagagacaattgggaatttgagcagcttgaagcgattgaatgttgaaacgaacgagcttgaggaactgccttacacaattggcaattgctcatcactatccgtgctaaagttggatttgaatcagctcaaggcccttcctgaggcaattgggaagcttgaatgcttggagattctcactttgcactataatagagttaagaggttgccttccacaatggataatctatgcaatttgaaggaacttgatgttagctttaatgaacttgagtttgtaccggagagcctgtgttttgcaactaatttgaagaaattgaacttgggaaagaacttcgcggacctaagagccttgccagcatcaattggaaatcttgaaatgcttgaggagttggacataagtgatgatcaaataaaagctctaccagagtctttcaggttcttgtcaaagttgagagtttttagggctgatgagaccccccttgatttgccaccaagagaattggtcaagttgggttctcaggaagttgtgcagtatatggctgattttgtcaccaagagggatgcaaaacttgtgccatcaaagaagaaaaagaaggggttttggttctggttttgctccatattttgcccccaactgaaatgatacttggacaaaatctctgttaacttatgtttcttgtggttgtatgtcgtttatccgttgcatatgtttggaaaaccttgtttttcctaataaaatgatctgtaatcttggatttgccttgt

SEQ ID NO: 7227 - protein, 540 aa, Glycine max
  peptide (1)..(540): Ceres Seq. ID no. 12583191
  misc_feature (405)..(427): Pfam Name: Pfam Description:  Leucine Rich Repeat
  misc_feature (188)..(535): NCBI GI NO: 37537048 NR Description: putative leucine-rich repeat protein
  misc_feature (187)..(532): NCBI GI NO: 15237011 NR Description: putative protein; protein id: At4g35470
  misc_feature (154)..(538): NCBI GI NO: 20148766 NR Description: PSR9 [Brassica nigra]
  misc_feature (183)..(536): NCBI GI NO: 15227838 NR Description: unknown protein; protein id: At2g17440.1
  misc_feature (45)..(501): NCBI GI NO: 20148766 NR Description: PSR9 [Brassica nigra]
  misc_feature (45)..(504): NCBI GI NO: 15227838 NR Description: unknown protein; protein id: At2g17440.1
  misc_feature (45)..(504): NCBI GI NO: 37537048 NR Description: putative leucine-rich repeat protein
  misc_feature (45)..(477): NCBI GI NO: 15237011 NR Description: putative protein; protein id: At4g35470
  misc_feature (235)..(503): NCBI GI NO: 24216020 NR Description: Leucine-rich repeat containing protein
  misc_feature (270)..(524): NCBI GI NO: 22330985 NR Description: hypothetical protein; protein id: At3g11330
LLLKYRSLFPSSSFSSSFIAKAMATRPESEKDPPQPPSRGFLATVQEITRIYSSLPPRPSIEEVEAATSTVDTLNNEEQIKLNEISMQQQPPHDDVPQDLFSVLQQLKKTMVLFHTHQQRRDALYLLELENMFQTFGDLIQRASELVSGDTQKQKLPTIPEEHAVITEESETLVKEEEGRHKNVFHVVKPSLSAGDGSTEKLSLMKVATVIESCAGSGATILELRGKLVDQMEWLPVSIGKLSDVTEMDLSENRLMALPTTIVGLKALTKLDLHSNQLINLPHSFGELINLVDLDLHANKLKSLPATFGNLTNLTDLDLSSNGFTDLPETIGNLSSLKRLNVETNELEELPYTIGNCSSLSVLKLDLNQLKALPEAIGKLECLEILTLHYNRVKRLPSTMDNLCNLKELDVSFNELEFVPESLCFATNLKKLNLGKNFADLRALPASIGNLEMLEELDISDDQIKALPESFRFLSKLRVFRADETPLDLPPRELVKLGSQEVVQYMADFVTKRDAKLVPSKKKKKGFWFWFCSIFCPQLK

SEQ ID NO: 7228 - protein, 518 aa, Glycine max
  peptide (1)..(518): Ceres Seq. ID no. 12583192
  misc_feature (383)..(405): Pfam Name: Pfam Description:  Leucine Rich Repeat
  misc_feature (166)..(513): NCBI GI NO: 37537048 NR Description: putative leucine-rich repeat protein
  misc_feature (165)..(510): NCBI GI NO: 15237011 NR Description: putative protein; protein id: At4g35470
  misc_feature (132)..(516): NCBI GI NO: 20148766 NR Description: PSR9 [Brassica nigra]
  misc_feature (161)..(514): NCBI GI NO: 15227838 NR Description: unknown protein; protein id: At2g17440.1
  misc_feature (23)..(479): NCBI GI NO: 20148766 NR Description: PSR9 [Brassica nigra]
  misc_feature (23)..(482): NCBI GI NO: 15227838 NR Description: unknown protein; protein id: At2g17440.1
  misc_feature (23)..(482): NCBI GI NO: 37537048 NR Description: putative leucine-rich repeat protein
  misc_feature (23)..(455): NCBI GI NO: 15237011 NR Description: putative protein; protein id: At4g35470
  misc_feature (213)..(481): NCBI GI NO: 24216020 NR Description: Leucine-rich repeat containing protein
  misc_feature (248)..(502): NCBI GI NO: 22330985 NR Description: hypothetical protein; protein id: At3g11330
MATRPESEKDPPQPPSRGFLATVQEITRIYSSLPPRPSIEEVEAATSTVDTLNNEEQIKLNEISMQQQPPHDDVPQDLFSVLQQLKKTMVLFHTHQQRRDALYLLELENMFQTFGDLIQRASELVSGDTQKQKLPTIPEEHAVITEESETLVKEEEGRHKNVFHVVKPSLSAGDGSTEKLSLMKVATVIESCAGSGATILELRGKLVDQMEWLPVSIGKLSDVTEMDLSENRLMALPTTIVGLKALTKLDLHSNQLINLPHSFGELINLVDLDLHANKLKSLPATFGNLTNLTDLDLSSNGFTDLPETIGNLSSLKRLNVETNELEELPYTIGNCSSLSVLKLDLNQLKALPEAIGKLECLEILTLHYNRVKRLPSTMDNLCNLKELDVSFNELEFVPESLCFATNLKKLNLGKNFADLRALPASIGNLEMLEELDISDDQIKALPESFRFLSKLRVFRADETPLDLPPRELVKLGSQEVVQYMADFVTKRDAKLVPSKKKKKGFWFWFCSIFCPQLK

SEQ ID NO: 7229 - protein, 454 aa, Glycine max
  peptide (1)..(454): Ceres Seq. ID no. 12583193
  misc_feature (319)..(341): Pfam Name: Pfam Description:  Leucine Rich Repeat
  misc_feature (102)..(449): NCBI GI NO: 37537048 NR Description: putative leucine-rich repeat protein
  misc_feature (101)..(446): NCBI GI NO: 15237011 NR Description: putative protein; protein id: At4g35470
  misc_feature (68)..(452): NCBI GI NO: 20148766 NR Description: PSR9 [Brassica nigra]
  misc_feature (97)..(450): NCBI GI NO: 15227838 NR Description: unknown protein; protein id: At2g17440.1
  misc_feature (1)..(415): NCBI GI NO: 20148766 NR Description: PSR9 [Brassica nigra]
  misc_feature (1)..(418): NCBI GI NO: 15227838 NR Description: unknown protein; protein id: At2g17440.1
  misc_feature (1)..(418): NCBI GI NO: 37537048 NR Description: putative leucine-rich repeat protein
  misc_feature (1)..(391): NCBI GI NO: 15237011 NR Description: putative protein; protein id: At4g35470
  misc_feature (149)..(417): NCBI GI NO: 24216020 NR Description: Leucine-rich repeat containing protein
  misc_feature (184)..(438): NCBI GI NO: 22330985 NR Description: hypothetical protein; protein id: At3g11330
MQQQPPHDDVPQDLFSVLQQLKKTMVLFHTHQQRRDALYLLELENMFQTFGDLIQRASELVSGDTQKQKLPTIPEEHAVITEESETLVKEEEGRHKNVFHVVKPSLSAGDGSTEKLSLMKVATVIESCAGSGATILELRGKLVDQMEWLPVSIGKLSDVTEMDLSENRLMALPTTIVGLKALTKLDLHSNQLINLPHSFGELINLVDLDLHANKLKSLPATFGNLTNLTDLDLSSNGFTDLPETIGNLSSLKRLNVETNELEELPYTIGNCSSLSVLKLDLNQLKALPEAIGKLECLEILTLHYNRVKRLPSTMDNLCNLKELDVSFNELEFVPESLCFATNLKKLNLGKNFADLRALPASIGNLEMLEELDISDDQIKALPESFRFLSKLRVFRADETPLDLPPRELVKLGSQEVVQYMADFVTKRDAKLVPSKKKKKGFWFWFCSIFCPQLK

SEQ ID NO: 7230 - DNA, 1238 bp, Glycine max
  misc_feature (1)..(1238): Ceres Seq. ID no. 13582153
ctacaacaccagatgttctagataaaaacgtagaaaacaatttacaggagttctggcaggctacctatacaaaatcatcttcagtgactgaggtcccaaatgctgttgcaaatacaaaattggatattgctgatcttgtaaaacaacagagaaattcaccaaagtcaatgtccattccccgcagagcaccagaagttcctcttttggatatgacaaataatagcactatgttgaattgcatttctcgagacaccacagagcaccaatcccgtggcttatctgtccaactgccaccacttcaacaaacagactttgcatataagaatgacatgtctaagccagccaattcacatgaagcgaaaatctctcaagcactgcctgacaaacagatgtggtcatctcagattcgagttataaggctaagtgatggcttacctgtccaacagccaccagagcaacaaacagactttgcatataacaatggaacatctaagccagtcgaatcacaggaagggaagatctctcaagcactgcccaacaaacagatacggccatctcagcttgaggttatagagctatgtgatgacttatctgtccaacagcctccagagcaacaaacaaacttcacatataagaatggcatgtctaagccagccgaatcacaggaagtgaagatctctcaagcactgcccaacaaacagatactgcaatcacagctcgatgttatagagctaagtgatggcttacctgttcagcagctgccagagcaacaaataaattttgcatataagaatgacatgtctaagccagctgaattgcatgaagtgaagatctctcaagcacagtccaacaaacaaatacagccatctcagattcaagttatagagctaagtgatgacgatgatgaagaaaatgaaaaaccaagtactgcaaaactggttccttctgtgcaatcggataccttgatgtggcattacagagatcccatgggaaatgtacaaggaccattttccttaatttctctgaaacgttggagtgatgctggctactttccccgacatttcaaggtctggaagtcaggtaataggcaggatgaagatgtattactggtgaacatactagcccaatttttccccctttagtcaaattgcttattgatgcacattgtaaaatccaggtcaataattgtgttgtgattaccaggtaactgcaattgtaactagaaactcatgctctct

SEQ ID NO: 7231 - protein, 379 aa, Glycine max
  peptide (1)..(379): Ceres Seq. ID no. 13582154
  misc_feature (322)..(374): Pfam Name: Pfam Description:  GYF domain
  misc_feature (203)..(373): NCBI GI NO: 10178285 NR Description: putative protein [Arabidopsis thaliana]
  misc_feature (203)..(373): NCBI GI NO: 30682386 NR Description: expressed protein [Arabidopsis thaliana]
  misc_feature (282)..(375): NCBI GI NO: 18420685 NR Description: expressed protein [Arabidopsis thaliana]
  misc_feature (170)..(375): NCBI GI NO: 9759086 NR Description: emb|CAB62634
  misc_feature (214)..(377): NCBI GI NO: 30693413 NR Description: expressed protein [Arabidopsis thaliana]
  misc_feature (214)..(377): NCBI GI NO: 11290564 NR Description: hypothetical protein F24M12
  misc_feature (268)..(377): NCBI GI NO: 30679672 NR Description: expressed protein [Arabidopsis thaliana]
  misc_feature (268)..(377): NCBI GI NO: 25411712 NR Description: hypothetical protein At2g16470
  misc_feature (223)..(376): NCBI GI NO: 25411830 NR Description: hypothetical protein At2g18090
  misc_feature (223)..(376): NCBI GI NO: 30680213 NR Description: expressed protein [Arabidopsis thaliana]
TTPDVLDKNVENNLQEFWQATYTKSSSVTEVPNAVANTKLDIADLVKQQRNSPKSMSIPRRAPEVPLLDMTNNSTMLNCISRDTTEHQSRGLSVQLPPLQQTDFAYKNDMSKPANSHEAKISQALPDKQMWSSQIRVIRLSDGLPVQQPPEQQTDFAYNNGTSKPVESQEGKISQALPNKQIRPSQLEVIELCDDLSVQQPPEQQTNFTYKNGMSKPAESQEVKISQALPNKQILQSQLDVIELSDGLPVQQLPEQQINFAYKNDMSKPAELHEVKISQAQSNKQIQPSQIQVIELSDDDDEENEKPSTAKLVPSVQSDTLMWHYRDPMGNVQGPFSLISLKRWSDAGYFPRHFKVWKSGNRQDEDVLLVNILAQFFPL

SEQ ID NO: 7232 - protein, 324 aa, Glycine max
  peptide (1)..(324): Ceres Seq. ID no. 13582155
  misc_feature (267)..(319): Pfam Name: Pfam Description:  GYF domain
  misc_feature (148)..(318): NCBI GI NO: 10178285 NR Description: putative protein [Arabidopsis thaliana]
  misc_feature (148)..(318): NCBI GI NO: 30682386 NR Description: expressed protein [Arabidopsis thaliana]
  misc_feature (227)..(320): NCBI GI NO: 18420685 NR Description: expressed protein [Arabidopsis thaliana]
  misc_feature (115)..(320): NCBI GI NO: 9759086 NR Description: emb|CAB62634
  misc_feature (159)..(322): NCBI GI NO: 30693413 NR Description: expressed protein [Arabidopsis thaliana]
  misc_feature (159)..(322): NCBI GI NO: 11290564 NR Description: hypothetical protein F24M12
  misc_feature (213)..(322): NCBI GI NO: 30679672 NR Description: expressed protein [Arabidopsis thaliana]
  misc_feature (213)..(322): NCBI GI NO: 25411712 NR Description: hypothetical protein At2g16470
  misc_feature (168)..(321): NCBI GI NO: 25411830 NR Description: hypothetical protein At2g18090
  misc_feature (168)..(321): NCBI GI NO: 30680213 NR Description: expressed protein [Arabidopsis thaliana]
MSIPRRAPEVPLLDMTNNSTMLNCISRDTTEHQSRGLSVQLPPLQQTDFAYKNDMSKPANSHEAKISQALPDKQMWSSQIRVIRLSDGLPVQQPPEQQTDFAYNNGTSKPVESQEGKISQALPNKQIRPSQLEVIELCDDLSVQQPPEQQTNFTYKNGMSKPAESQEVKISQALPNKQILQSQLDVIELSDGLPVQQLPEQQINFAYKNDMSKPAELHEVKISQAQSNKQIQPSQIQVIELSDDDDEENEKPSTAKLVPSVQSDTLMWHYRDPMGNVQGPFSLISLKRWSDAGYFPRHFKVWKSGNRQDEDVLLVNILAQFFPL

SEQ ID NO: 7233 - protein, 310 aa, Glycine max
  peptide (1)..(310): Ceres Seq. ID no. 13582156
  misc_feature (253)..(305): Pfam Name: Pfam Description:  GYF domain
  misc_feature (134)..(304): NCBI GI NO: 10178285 NR Description: putative protein [Arabidopsis thaliana]
  misc_feature (134)..(304): NCBI GI NO: 30682386 NR Description: expressed protein [Arabidopsis thaliana]
  misc_feature (213)..(306): NCBI GI NO: 18420685 NR Description: expressed protein [Arabidopsis thaliana]
  misc_feature (101)..(306): NCBI GI NO: 9759086 NR Description: emb|CAB62634
  misc_feature (145)..(308): NCBI GI NO: 30693413 NR Description: expressed protein [Arabidopsis thaliana]
  misc_feature (145)..(308): NCBI GI NO: 11290564 NR Description: hypothetical protein F24M12
  misc_feature (199)..(308): NCBI GI NO: 30679672 NR Description: expressed protein [Arabidopsis thaliana]
  misc_feature (199)..(308): NCBI GI NO: 25411712 NR Description: hypothetical protein At2g16470
  misc_feature (154)..(307): NCBI GI NO: 25411830 NR Description: hypothetical protein At2g18090
  misc_feature (154)..(307): NCBI GI NO: 30680213 NR Description: expressed protein [Arabidopsis thaliana]
MTNNSTMLNCISRDTTEHQSRGLSVQLPPLQQTDFAYKNDMSKPANSHEAKISQALPDKQMWSSQIRVIRLSDGLPVQQPPEQQTDFAYNNGTSKPVESQEGKISQALPNKQIRPSQLEVIELCDDLSVQQPPEQQTNFTYKNGMSKPAESQEVKISQALPNKQILQSQLDVIELSDGLPVQQLPEQQINFAYKNDMSKPAELHEVKISQAQSNKQIQPSQIQVIELSDDDDEENEKPSTAKLVPSVQSDTLMWHYRDPMGNVQGPFSLISLKRWSDAGYFPRHFKVWKSGNRQDEDVLLVNILAQFFPL

SEQ ID NO: 7234 - DNA, 766 bp, Glycine max
  misc_feature (1)..(766): Ceres Seq. ID no. 14304110
atgatgctgctagtgctgagtgtgtgtatctgaggaaagaaagagaccattcttatttgtctggtttggttcttgagtaatttttttttcttcttttcttgagtaacttgattcatgtgtcaaagattctgatcattggtattattagctagacatagtgtagtgttgttgagtggggtttgtagacaatgaggagaggtagagggaaagggaagaagcagagtgcatctgctcgggaagatcatggaagcggtgaagaggatgaaaagattccagcttacaggagaagaggaaggccacagaagcctatgaaagatgattttgaagaggaggaagatgaagaagaagagttggtagagaagatggaggaagaagaagaagaggatgattcagtaacaagtaaaaaagaagaaaacgagaggaagaggaagatgattaatggaagcaatacggatgcaaatgaaaaagagaatgggttaggatcaaaatcaagtagagatggttccagttccaccaagtccacatctactggtttcagacagaatgggagcaggaggaaaagcaagcctagacgagctgctgaagctgttgtggaatgtaatggagtttgagaaaactttatgatcaagaactttccaagacacatgatgaaacattaatttgaggtttcttcttcgtttaggttatcttacaagtttctttgtaagttgagaactttggctatcttttggtgtatcaatctgcattgttttttttttcatctctc

SEQ ID NO: 7235 - protein, 140 aa, Glycine max
  peptide (1)..(140): Ceres Seq. ID no. 14304111
  misc_feature (21)..(95): Pfam Name: Pfam Description:  Chromadorea ALT protein
  misc_feature (1)..(140): NCBI GI NO: 21537173 NR Description: unknown [Arabidopsis thaliana]
  misc_feature (1)..(140): NCBI GI NO: 18405905 NR Description: expressed protein [Arabidopsis thaliana]
  misc_feature (1)..(140): NCBI GI NO: 15230905 NR Description: expressed protein [Arabidopsis thaliana]
  misc_feature (1)..(137): NCBI GI NO: 33088054 NR Description: unknown [Setaria italica]
  misc_feature (8)..(127): NCBI GI NO: 21553446 NR Description: unknown [Arabidopsis thaliana]
  misc_feature (5)..(80): NCBI GI NO: 26330836 NR Description: unnamed protein product [Mus musculus]
  misc_feature (8)..(127): NCBI GI NO: 18410791 NR Description: expressed protein [Arabidopsis thaliana]
MRRGRGKGKKQSASAREDHGSGEEDEKIPAYRRRGRPQKPMKDDFEEEEDEEEELVEKMEEEEEEDDSVTSKKEENERKRKMINGSNTDANEKENGLGSKSSRDGSSSTKSTSTGFRQNGSRRKSKPRRAAEAVVECNGV

SEQ ID NO: 7236 - protein, 100 aa, Glycine max
  peptide (1)..(100): Ceres Seq. ID no. 14304112
  misc_feature (1)..(55): Pfam Name: Pfam Description:  Chromadorea ALT protein
  misc_feature (1)..(100): NCBI GI NO: 21537173 NR Description: unknown [Arabidopsis thaliana]
  misc_feature (1)..(100): NCBI GI NO: 18405905 NR Description: expressed protein [Arabidopsis thaliana]
  misc_feature (1)..(100): NCBI GI NO: 15230905 NR Description: expressed protein [Arabidopsis thaliana]
  misc_feature (1)..(97): NCBI GI NO: 33088054 NR Description: unknown [Setaria italica]
  misc_feature (1)..(87): NCBI GI NO: 21553446 NR Description: unknown [Arabidopsis thaliana]
  misc_feature (1)..(40): NCBI GI NO: 26330836 NR Description: unnamed protein product [Mus musculus]
  misc_feature (1)..(87): NCBI GI NO: 18410791 NR Description: expressed protein [Arabidopsis thaliana]
MKDDFEEEEDEEEELVEKMEEEEEEDDSVTSKKEENERKRKMINGSNTDANEKENGLGSKSSRDGSSSTKSTSTGFRQNGSRRKSKPRRAAEAVVECNGV

SEQ ID NO: 7237 - protein, 82 aa, Glycine max
  peptide (1)..(82): Ceres Seq. ID no. 14304113
  misc_feature (1)..(63): Pfam Name: BSP-II Pfam Description: Bone sialoprotein II
  misc_feature (1)..(82): NCBI GI NO: 21537173 NR Description: unknown [Arabidopsis thaliana]
  misc_feature (1)..(82): NCBI GI NO: 18405905 NR Description: expressed protein [Arabidopsis thaliana]
  misc_feature (1)..(82): NCBI GI NO: 15230905 NR Description: expressed protein [Arabidopsis thaliana]
  misc_feature (1)..(79): NCBI GI NO: 33088054 NR Description: unknown [Setaria italica]
  misc_feature (1)..(69): NCBI GI NO: 21553446 NR Description: unknown [Arabidopsis thaliana]
  misc_feature (1)..(22): NCBI GI NO: 26330836 NR Description: unnamed protein product [Mus musculus]
  misc_feature (1)..(69): NCBI GI NO: 18410791 NR Description: expressed protein [Arabidopsis thaliana]
MEEEEEEDDSVTSKKEENERKRKMINGSNTDANEKENGLGSKSSRDGSSSTKSTSTGFRQNGSRRKSKPRRAAEAVVECNGV

SEQ ID NO: 7238 - DNA, 1353 bp, Glycine max
  misc_feature (1)..(1353): Ceres Seq. ID no. 13595341
atttaaagacctttcctttaccaaactttgtctctttctacttcagccatctcttcttctgcctcatcctgcgccagtggaattttgagcctttccctcgaaatcaatgcatgtaaagactcaagctttgatgccgcatattggtttttcatttgcacattcatgtgggtcattgtgtgcttctcttagtttcagcatagtggcaaaatggtctgtgtttgtttgatttgagggtagtagctttgtgttctttttcatattgaggcatgaattttcttgtggggtagattttgatcttcaaaccttaagtgatagcaccccatttggcaaaagtgaggatttcagtgaattgtagtgaagtgggcattttttgttttttgaaaaaggcaaaaggatgattcagttgttgttcttggtgatttttgttgagggggttctggcatttcttttgttggtgaagataggacctttgagagatcttgtgataaagagcctggatcagttgaagatggggaagggtccagctacagtgaaaaccattgctggtaccatgtctgtgattcttctttcaagtctcatgagcattatcaagatccagaacaaaggtgctaaactcggtactatgtcgcccatggatcaagttctatggagatctcacttgctcgaggcttcactcatgggttttacattattccttggattcctaattgatcgtacccaccattatcttcaaaaacttattaatttaaggagtaatgcgggagcttcaaaagaagaattggaaaaccttaaaaaagaaactgtccaacttaaagaaaaggatgagaaagcatccaaggagattaaacagctaaaggaagaactttcatgtctgtccaaaagtttggaaaagattaaatcggaatctgaagagaaggataagaaagtcgagaccgccgaagcacatgttgcttccctccaaaagcaagctgcagatctactacttgaatatgatagactcttagaagaaaaccaaaaccttcaggctcaaacactgggacataagagttgaggaatgactgagatgcattgataaacaaagttttggggtgagacttcattaggaccatccctagttttgttgcaaaatctttattttggaaaaaaaagagtacttttttggtccttttcgatattgcaacattgaccaaaagaactctctgcttaagtttataagttttacagttcattttcagtttgttcaaaattttgttattggatcgtcgctttacaattgccccatctagtttttgtttttgccccttccttttattgtttggatgaatatattttagttgaaggattattggcggg

SEQ ID NO: 7239 - protein, 218 aa, Glycine max
  peptide (1)..(218): Ceres Seq. ID no. 15221545
  misc_feature (4)..(200): Pfam Name: Pfam Description:  B-cell receptor-associated protein 31-like
  misc_feature (1)..(214): NCBI GI NO: 15231412 NR Description: expressed protein [Arabidopsis thaliana]
  misc_feature (1)..(215): NCBI GI NO: 15239667 NR Description: hypothetical protein [Arabidopsis thaliana]
  misc_feature (1)..(212): NCBI GI NO: 34897474 NR Description: unknown protein
  misc_feature (1)..(218): NCBI GI NO: 9759015 NR Description: gene_id:K16E1.4~unknown protein
  misc_feature (1)..(218): NCBI GI NO: 18422225 NR Description: expressed protein [Arabidopsis thaliana]
  misc_feature (1)..(218): NCBI GI NO: 21553655 NR Description: unknown [Arabidopsis thaliana]
  misc_feature (1)..(212): NCBI GI NO: 22655198 NR Description: unknown protein [Arabidopsis thaliana]
  misc_feature (1)..(162): NCBI GI NO: 30682503 NR Description: expressed protein [Arabidopsis thaliana]
  misc_feature (1)..(121): NCBI GI NO: 18402620 NR Description: expressed protein [Arabidopsis thaliana]
  misc_feature (94)..(217): NCBI GI NO: 38174409 NR Description: Unknown (protein for MGC:75863)
MIQLLFLVIFVEGVLAFLLLVKIGPLRDLVIKSLDQLKMGKGPATVKTIAGTMSVILLSSLMSIIKIQNKGAKLGTMSPMDQVLWRSHLLEASLMGFTLFLGFLIDRTHHYLQKLINLRSNAGASKEELENLKKETVQLKEKDEKASKEIKQLKEELSCLSKSLEKIKSESEEKDKKVETAEAHVASLQKQAADLLLEYDRLLEENQNLQAQTLGHKS

SEQ ID NO: 7240 - protein, 180 aa, Glycine max
  peptide (1)..(180): Ceres Seq. ID no. 15221546
  misc_feature (1)..(162): Pfam Name: Pfam Description:  B-cell receptor-associated protein 31-like
  misc_feature (1)..(176): NCBI GI NO: 15231412 NR Description: expressed protein [Arabidopsis thaliana]
  misc_feature (1)..(177): NCBI GI NO: 15239667 NR Description: hypothetical protein [Arabidopsis thaliana]
  misc_feature (1)..(174): NCBI GI NO: 34897474 NR Description: unknown protein
  misc_feature (1)..(180): NCBI GI NO: 9759015 NR Description: gene_id:K16E1.4~unknown protein
  misc_feature (1)..(180): NCBI GI NO: 18422225 NR Description: expressed protein [Arabidopsis thaliana]
  misc_feature (1)..(180): NCBI GI NO: 21553655 NR Description: unknown [Arabidopsis thaliana]
  misc_feature (1)..(174): NCBI GI NO: 22655198 NR Description: unknown protein [Arabidopsis thaliana]
  misc_feature (1)..(124): NCBI GI NO: 30682503 NR Description: expressed protein [Arabidopsis thaliana]
  misc_feature (1)..(83): NCBI GI NO: 18402620 NR Description: expressed protein [Arabidopsis thaliana]
  misc_feature (56)..(179): NCBI GI NO: 38174409 NR Description: Unknown (protein for MGC:75863)
MGKGPATVKTIAGTMSVILLSSLMSIIKIQNKGAKLGTMSPMDQVLWRSHLLEASLMGFTLFLGFLIDRTHHYLQKLINLRSNAGASKEELENLKKETVQLKEKDEKASKEIKQLKEELSCLSKSLEKIKSESEEKDKKVETAEAHVASLQKQAADLLLEYDRLLEENQNLQAQTLGHKS

SEQ ID NO: 7241 - protein, 166 aa, Glycine max
  peptide (1)..(166): Ceres Seq. ID no. 15221547
  misc_feature (1)..(148): Pfam Name: Pfam Description:  B-cell receptor-associated protein 31-like
  misc_feature (1)..(162): NCBI GI NO: 15231412 NR Description: expressed protein [Arabidopsis thaliana]
  misc_feature (1)..(163): NCBI GI NO: 15239667 NR Description: hypothetical protein [Arabidopsis thaliana]
  misc_feature (1)..(160): NCBI GI NO: 34897474 NR Description: unknown protein
  misc_feature (1)..(166): NCBI GI NO: 9759015 NR Description: gene_id:K16E1.4~unknown protein
  misc_feature (1)..(166): NCBI GI NO: 18422225 NR Description: expressed protein [Arabidopsis thaliana]
  misc_feature (1)..(166): NCBI GI NO: 21553655 NR Description: unknown [Arabidopsis thaliana]
  misc_feature (1)..(160): NCBI GI NO: 22655198 NR Description: unknown protein [Arabidopsis thaliana]
  misc_feature (1)..(110): NCBI GI NO: 30682503 NR Description: expressed protein [Arabidopsis thaliana]
  misc_feature (1)..(69): NCBI GI NO: 18402620 NR Description: expressed protein [Arabidopsis thaliana]
  misc_feature (42)..(165): NCBI GI NO: 38174409 NR Description: Unknown (protein for MGC:75863)
MSVILLSSLMSIIKIQNKGAKLGTMSPMDQVLWRSHLLEASLMGFTLFLGFLIDRTHHYLQKLINLRSNAGASKEELENLKKETVQLKEKDEKASKEIKQLKEELSCLSKSLEKIKSESEEKDKKVETAEAHVASLQKQAADLLLEYDRLLEENQNLQAQTLGHKS

SEQ ID NO: 7242 - DNA, 1197 bp, Glycine max
  misc_feature (1)..(1197): Ceres Seq. ID no. 13595857
gactgggcgcagtgcacgctattccgagcatatgaacgacgtcggtttgagcctagcgcagcatttcaatttcgaaggaaattctaacctggttccgttggtgctgagtttcaggcttgcagcagccatagaagtgtaggagttggagagagagtgatcaattcgatgccttcacttcgcatcctaaacaaaatctgttattcgataaaccagaattgcaaatgccagtaccgaacaatctcctccacggcacagttgcagggttcatggatggaaaaggtcaaaaacgtcatcaccggccaaaacagcacgccccagtcccagggagacgcctccgaatcattcagtctgctccgttttgcggatgaaatgaagaatgcaaagagaataggcgcgtttaaggagttcatggttgggcgaagcagcgaagccactttttcctccgccttcgacaaatacgaagccataattcgatttctcggtgctttggaccccactggagagaatctccagacaactcagaaacaagaagcggcaaaacattgtaattgcacgattgctgatgtggagaatgcacttgccaagtttacttgggccaaggaagcacagaagaagttagagaagctaaaagaagaaggaaaaccaatgccaaaaagctttgctgaagtccaaaagctagttggttcaactccattggatcttgctaggtctaatttggcccaagctggacaaattagcaggaatgcactttgtccatgtggttcaaagaagagatacaaaaggtgctgcggaaaggattgaaggaattcagagattaaatgttaaactgccaggaagcctgatctgttatggtggtttcatacctacacatggctaaattgatctgcagttgtaccttattttattcagttcagatcaagttggccaatgcgctagactgcaaacatgcccctaagctgattttaggatgatatattttgcccaacagttgcgtgattttctttagctttctaatttttgaggtgatcataggcagaaccaaacagaatatttttgttttgttcaagagtagttagttagttctcttctttcccttgctcctgcctaattaggcaagggaataagaaataattgtagtctcgttctaaaagtcaaaatgcttaaactcattttttactgatttatgtcatcatcatc

SEQ ID NO: 7243 - protein, 211 aa, Glycine max
  peptide (1)..(211): Ceres Seq. ID no. 13595858
  misc_feature (36)..(168): NCBI GI NO: 15229851 NR Description: hypothetical protein [Arabidopsis thaliana]
MPSLRILNKICYSINQNCKCQYRTISSTAQLQGSWMEKVKNVITGQNSTPQSQGDASESFSLLRFADEMKNAKRIGAFKEFMVGRSSEATFSSAFDKYEAIIRFLGALDPTGENLQTTQKQEAAKHCNCTIADVENALAKFTWAKEAQKKLEKLKEEGKPMPKSFAEVQKLVGSTPLDLARSNLAQAGQISRNALCPCGSKKRYKRCCGKD

SEQ ID NO: 7244 - protein, 176 aa, Glycine max
  peptide (1)..(176): Ceres Seq. ID no. 13595859
  misc_feature (1)..(133): NCBI GI NO: 15229851 NR Description: hypothetical protein [Arabidopsis thaliana]
MEKVKNVITGQNSTPQSQGDASESFSLLRFADEMKNAKRIGAFKEFMVGRSSEATFSSAFDKYEAIIRFLGALDPTGENLQTTQKQEAAKHCNCTIADVENALAKFTWAKEAQKKLEKLKEEGKPMPKSFAEVQKLVGSTPLDLARSNLAQAGQISRNALCPCGSKKRYKRCCGKD

SEQ ID NO: 7245 - protein, 143 aa, Glycine max
  peptide (1)..(143): Ceres Seq. ID no. 13595860
  misc_feature (1)..(100): NCBI GI NO: 15229851 NR Description: hypothetical protein [Arabidopsis thaliana]
MKNAKRIGAFKEFMVGRSSEATFSSAFDKYEAIIRFLGALDPTGENLQTTQKQEAAKHCNCTIADVENALAKFTWAKEAQKKLEKLKEEGKPMPKSFAEVQKLVGSTPLDLARSNLAQAGQISRNALCPCGSKKRYKRCCGKD

SEQ ID NO: 7246 - DNA, 651 bp, Glycine max
  misc_feature (1)..(651): Ceres Seq. ID no. 13595362
cccactttattgtgcttaawcttgctctctctatcccatatactcttaccagctaggtagctaagctgccccttgcaaccaacaatggcgccttcaccgagctggagtgcagctgtgttggccgtgctgctggtggtcgtcctgctattggggatgggatgcccggcggccgctgcgacgccatgtacggactgcacagcgcagtgcaactcaacatgcagcgccgccggggcaaggccgtgcggcgcccactgcagcccggcgccgggatgcccgagctgcctcgccgcgtaccacgccaagtgcttgccgtattgcgtgagcgcgtgcaaagcccaatcacctgctgggtacgactgccaaagcgcgtgcaacaagacacagctgtgcagcagctcgtgcagcgccgtctgcggcgagtcgccgacgtgcaaggcctgccaggacaactactaccgtgggtgcatatccagatgcacctcctactgcaactcccactgcgtctaggtctagcaacgactttcgacactctacggagtacgttttcacgtaaaaaaggattcagcgcctcaccaaggaaaaacgtgtcactgtaattttcttcatccaataatcataggagtgctcatatatgtatctgcctccttttcc

SEQ ID NO: 7247 - protein, 145 aa, Glycine max
  peptide (1)..(145): Ceres Seq. ID no. 15221554
MPGGRCDAMYGLHSAVQLNMQRRRGKAVRRPLQPGAGMPELPRRVPRQVLAVLRERVQSPITCWVRLPKRVQQDTAVQQLVQRRLRRVADVQGLPGQLLPWVHIQMHLLLQLPLRLGLATTFDTLRSTFSRKKGFSASPRKNVSL

SEQ ID NO: 7248 - protein, 140 aa, Glycine max
  peptide (1)..(140): Ceres Seq. ID no. 15221555
  misc_feature (28)..(139): Pfam Name: Pfam Description:  Keratin, high sulfur B2 protein
  misc_feature (8)..(89): NCBI GI NO: 19033560 NR Description: hypothetical protein
  misc_feature (26)..(119): NCBI GI NO: 21356647 NR Description: PFTAIRE-interacting factor 2
  misc_feature (18)..(84): NCBI GI NO: 19033555 NR Description: hypothetical protein
  misc_feature (23)..(139): NCBI GI NO: 40254819 NR Description: keratin, cuticle, ultrahigh sulphur 1
  misc_feature (27)..(139): NCBI GI NO: 7657283 NR Description: keratin associated protein 5-1
  misc_feature (26)..(135): NCBI GI NO: 7657285 NR Description: keratin associated protein 5-4
  misc_feature (23)..(139): NCBI GI NO: 125681 NR Description: Keratin, ultra high-sulfur matrix protein A
  misc_feature (26)..(139): NCBI GI NO: 7657283 NR Description: keratin associated protein 5-1
  misc_feature (9)..(84): NCBI GI NO: 19033562 NR Description: hypothetical protein
  misc_feature (2)..(84): NCBI GI NO: 19033552 NR Description: hypothetical protein
MAPSPSWSAAVLAVLLVVVLLLGMGCPAAAATPCTDCTAQCNSTCSAAGARPCGAHCSPAPGCPSCLAAYHAKCLPYCVSACKAQSPAGYDCQSACNKTQLCSSSCSAVCGESPTCKACQDNYYRGCISRCTSYCNSHCV

SEQ ID NO: 7249 - protein, 137 aa, Glycine max
  peptide (1)..(137): Ceres Seq. ID no. 15221556
MYGLHSAVQLNMQRRRGKAVRRPLQPGAGMPELPRRVPRQVLAVLRERVQSPITCWVRLPKRVQQDTAVQQLVQRRLRRVADVQGLPGQLLPWVHIQMHLLLQLPLRLGLATTFDTLRSTFSRKKGFSASPRKNVSL

SEQ ID NO: 7250 - DNA, 1256 bp, Glycine max
  misc_feature (1)..(1256): Ceres Seq. ID no. 12583421
aaaaaaaatcatgagccgcgtcaaatcacatcactgccaattcgaaatttccaatttcacagaacttttgttgcattgatctccgattttgttttccaacgcttcttcgtattctcaccaatctcaaatggcttctatctcccttcttctcgccctgttcgtgttcttcctaattgccacttctcttaccgaaagtaggaaggaattaaggaacaagcaggaaactgcattacagatgttagagcgctcaattcatttttccaacagaattaatccatcacgtgttgtccaaatctcttggcaaccaagggtttttctatacaaagggtttttgtcggacaaggagtgtgactaccttgtttctttggcatatgctgtgaaagaaaaatcctcagggaatggtggcctttcagagggggttgaaacttccttggatatggaagatgatattcttgcaaggattgaagaaagactttcagtttgggctttccttcctaaagagtacagcaagcctttgcaggtcatgcattatgggcctgagcagaatggtcggaacttagattattttacaaacaaaacccaattagaattaagtggacctttaatggcaacaattattttatatctctcaaatgatgttactcaagggggtcaaattctttttcctgaatcattgcctgggagtagcagctggtcaagttgtagtaatagcagcaatattctccaaccagtaaaagggaatgcaattctgtttttctctcttcacccaagtgcttctcctgacaagagtagcttccatgctagatgccctgtccttgagggtgatatgtggtctgcaattaaatacttctatgcaaaaccaattagtagaggtaaagtctcagccacattagatggtggtgaatgcactgatgaagatgacagttgtcccgcttgggcagccgtgggagaatgtcaacgaaaccctgtgttcatgattggatctcctgattattatggtacatgtaggaaaagttgtaatgcatgctgatcacaagttgattttacttttacactttttgtttatataattattctccctagagaaatacatgtggaattatcaattgctttttttaaaaatttcctcaagttcttttgagctgcacatcaaaaggtgctggaaatagtgtataggaaattagaacttgacacgatttagatttcaatttgatgtaatttttttgaatattcttttagtgatgtattgagtgttg

SEQ ID NO: 7251 - protein, 300 aa, Glycine max
  peptide (1)..(300): Ceres Seq. ID no. 12583422
  misc_feature (130)..(242): Pfam Name: II Pfam Description: 2OG-Fe
  misc_feature (23)..(300): NCBI GI NO: 30686940 NR Description: ShTK domain-containing protein
  misc_feature (106)..(300): NCBI GI NO: 37534316 NR Description: unknown protein
  misc_feature (49)..(104): NCBI GI NO: 37534316 NR Description: unknown protein
  misc_feature (21)..(300): NCBI GI NO: 9294583 NR Description: prolyl 4-hydroxylase alpha subunit-like protein
  misc_feature (44)..(300): NCBI GI NO: 30689216 NR Description: oxidoreductase, 2OG-Fe(II) oxygenase family
  misc_feature (7)..(300): NCBI GI NO: 18405808 NR Description: prolyl 4-hydroxylase, putative
  misc_feature (7)..(300): NCBI GI NO: 18086437 NR Description: AT3g28480/MFJ20_16 [Arabidopsis thaliana]
  misc_feature (49)..(300): NCBI GI NO: 29150365 NR Description: putative oxidoreductase
  misc_feature (57)..(300): NCBI GI NO: 28393447 NR Description: putative prolyl 4-hydroxylase
  misc_feature (45)..(300): NCBI GI NO: 18397528 NR Description: expressed protein; protein id: At3g06300
MASISLLLALFVFFLIATSLTESRKELRNKQETALQMLERSIHFSNRINPSRVVQISWQPRVFLYKGFLSDKECDYLVSLAYAVKEKSSGNGGLSEGVETSLDMEDDILARIEERLSVWAFLPKEYSKPLQVMHYGPEQNGRNLDYFTNKTQLELSGPLMATIILYLSNDVTQGGQILFPESLPGSSSWSSCSNSSNILQPVKGNAILFFSLHPSASPDKSSFHARCPVLEGDMWSAIKYFYAKPISRGKVSATLDGGECTDEDDSCPAWAAVGECQRNPVFMIGSPDYYGTCRKSCNAC

SEQ ID NO: 7252 - protein, 264 aa, Glycine max
  peptide (1)..(264): Ceres Seq. ID no. 12583423
  misc_feature (94)..(206): Pfam Name: II Pfam Description: 2OG-Fe
  misc_feature (1)..(264): NCBI GI NO: 30686940 NR Description: ShTK domain-containing protein
  misc_feature (70)..(264): NCBI GI NO: 37534316 NR Description: unknown protein
  misc_feature (13)..(68): NCBI GI NO: 37534316 NR Description: unknown protein
  misc_feature (1)..(264): NCBI GI NO: 9294583 NR Description: prolyl 4-hydroxylase alpha subunit-like protein
  misc_feature (8)..(264): NCBI GI NO: 30689216 NR Description: oxidoreductase, 2OG-Fe(II) oxygenase family
  misc_feature (1)..(264): NCBI GI NO: 18405808 NR Description: prolyl 4-hydroxylase, putative
  misc_feature (1)..(264): NCBI GI NO: 18086437 NR Description: AT3g28480/MFJ20_16 [Arabidopsis thaliana]
  misc_feature (13)..(264): NCBI GI NO: 29150365 NR Description: putative oxidoreductase
  misc_feature (21)..(264): NCBI GI NO: 28393447 NR Description: putative prolyl 4-hydroxylase
  misc_feature (9)..(264): NCBI GI NO: 18397528 NR Description: expressed protein; protein id: At3g06300
MLERSIHFSNRINPSRVVQISWQPRVFLYKGFLSDKECDYLVSLAYAVKEKSSGNGGLSEGVETSLDMEDDILARIEERLSVWAFLPKEYSKPLQVMHYGPEQNGRNLDYFTNKTQLELSGPLMATIILYLSNDVTQGGQILFPESLPGSSSWSSCSNSSNILQPVKGNAILFFSLHPSASPDKSSFHARCPVLEGDMWSAIKYFYAKPISRGKVSATLDGGECTDEDDSCPAWAAVGECQRNPVFMIGSPDYYGTCRKSCNAC

SEQ ID NO: 7253 - protein, 197 aa, Glycine max
  peptide (1)..(197): Ceres Seq. ID no. 12583424
  misc_feature (27)..(139): Pfam Name: II Pfam Description: 2OG-Fe
  misc_feature (1)..(197): NCBI GI NO: 30686940 NR Description: ShTK domain-containing protein
  misc_feature (3)..(197): NCBI GI NO: 37534316 NR Description: unknown protein
  misc_feature (1)..(197): NCBI GI NO: 9294583 NR Description: prolyl 4-hydroxylase alpha subunit-like protein
  misc_feature (1)..(197): NCBI GI NO: 30689216 NR Description: oxidoreductase, 2OG-Fe(II) oxygenase family
  misc_feature (1)..(197): NCBI GI NO: 18405808 NR Description: prolyl 4-hydroxylase, putative
  misc_feature (1)..(197): NCBI GI NO: 18086437 NR Description: AT3g28480/MFJ20_16 [Arabidopsis thaliana]
  misc_feature (1)..(197): NCBI GI NO: 29150365 NR Description: putative oxidoreductase
  misc_feature (1)..(197): NCBI GI NO: 28393447 NR Description: putative prolyl 4-hydroxylase
  misc_feature (1)..(197): NCBI GI NO: 18397528 NR Description: expressed protein; protein id: At3g06300
  misc_feature (1)..(197): NCBI GI NO: 21618073 NR Description: prolyl 4-hydroxylase alpha subunit-like protein
MEDDILARIEERLSVWAFLPKEYSKPLQVMHYGPEQNGRNLDYFTNKTQLELSGPLMATIILYLSNDVTQGGQILFPESLPGSSSWSSCSNSSNILQPVKGNAILFFSLHPSASPDKSSFHARCPVLEGDMWSAIKYFYAKPISRGKVSATLDGGECTDEDDSCPAWAAVGECQRNPVFMIGSPDYYGTCRKSCNAC

SEQ ID NO: 7254 - DNA, 1266 bp, Glycine max
  misc_feature (1)..(1266): Ceres Seq. ID no. 15179641
atcgcaatctcgagtagccgtcccaatcctcgatctgttctcagaccctcctccgtccgtcgcagctccagatttccttccccatggctccgatcaagatcggtatcaacggtttcggccggatcggcaggcttgtggccagggttgcgctccagagccccgatgtcgagctcgtcgccgtcaacgaccccttcatcaccaccgactacatgacctacatgttcaagtatgacactgtccacggacagtggaagcaccatgaagttaaggtgaaggactccaagacccttctcttcggtgagaaggaggttgctgtgtttggctgcaggaaccctgaggagatcccatgggctgctgctggtgctgagtacgttgttgagtccaccggtgttttcaccgacaaggacaaggctgcagctcacattaagggtggtgccaagaaggtcatcatttctgctcccagcaaggatgctcccatgtttgtctgtggtgtcaatgagaaggaatacaagtctgacatcgacattgtctccaacgctagctgcaccactaactgccttgctcctcttgctaaggttatcaatgacaggtttggcattgttgagggtttgatgaccacagttcatgccatgactgcaacccagaagactgttgatggtccttccagcaaggactggagaggtggaagggctgccagcttcaacatcattccaagcagcactggtgccgcaaaggctgttggcaaggtgctcccagagcttaacggaaagttgactggaatggccttccgtgttcccactgttgatgtttctgttgttgatctgactgttagacttgcgaagccagcaacctatgatcagattaaggctgctatcaaggaggagtctgagggaaacctcaagggcattttgggttacgttgatgaggaccttgtttccactgactttcagggtgacaacaggtccagcatcttcgatgccaaggccgggattgctctgaacgacaactttgtcaagcttgtctcctggtacgacaacgagtggggatacagcacccgcgtggtcgacctcatccgtcacatgcacagcaccaagtaaatgagaggcatgaagatacaggggagagtggtttgccccagaggagtgttcaaagcctcttcttctgagaataaatttttgtatggaattatgtcagctaaaaaccttttattggatgtatcctgatggttggtcacattttggtggtattatgtacttgcttgaactg

SEQ ID NO: 7255 - protein, 337 aa, Glycine max
  peptide (1)..(337): Ceres Seq. ID no. 15179642
  misc_feature (155)..(316): Pfam Name: Pfam Description:  Glyceraldehyde 3-phosphate dehydrogenase
  misc_feature (1)..(337): NCBI GI NO: 38346061 NR Description: OJ000223_09.15
  misc_feature (43)..(337): NCBI GI NO: 29150193 NR Description: putative glyceraldehydes 3-phosphate dehydrogenase
  misc_feature (1)..(47): NCBI GI NO: 29150193 NR Description: putative glyceraldehydes 3-phosphate dehydrogenase
  misc_feature (1)..(337): NCBI GI NO: 6166167 NR Description: Glyceraldehyde 3-phosphate dehydrogenase
  misc_feature (1)..(336): NCBI GI NO: 7431535 NR Description: glyceraldehyde-3-phosphate dehydrogenase
  misc_feature (33)..(337): NCBI GI NO: 120668 NR Description: Glyceraldehyde 3-phosphate dehydrogenase
  misc_feature (1)..(336): NCBI GI NO: 462137 NR Description: GLYCERALDEHYDE 3-PHOSPHATE DEHYDROGENASE
  misc_feature (1)..(337): NCBI GI NO: 120666 NR Description: Glyceraldehyde 3-phosphate dehydrogenase
  misc_feature (2)..(337): NCBI GI NO: 1345501 NR Description: glycolytic glyceraldehyde 3-phosphate dehydrogenase
  misc_feature (1)..(337): NCBI GI NO: 4539543 NR Description: glyceraldehyde-3-phosphate dehydrogenase
MAPIKIGINGFGRIGRLVARVALQSPDVELVAVNDPFITTDYMTYMFKYDTVHGQWKHHEVKVKDSKTLLFGEKEVAVFGCRNPEEIPWAAAGAEYVVESTGVFTDKDKAAAHIKGGAKKVIISAPSKDAPMFVCGVNEKEYKSDIDIVSNASCTTNCLAPLAKVINDRFGIVEGLMTTVHAMTATQKTVDGPSSKDWRGGRAASFNIIPSSTGAAKAVGKVLPELNGKLTGMAFRVPTVDVSVVDLTVRLAKPATYDQIKAAIKEESEGNLKGILGYVDEDLVSTDFQGDNRSSIFDAKAGIALNDNFVKLVSWYDNEWGYSTRVVDLIRHMHSTK

SEQ ID NO: 7256 - protein, 295 aa, Glycine max
  peptide (1)..(295): Ceres Seq. ID no. 15179643
  misc_feature (113)..(274): Pfam Name: Pfam Description:  Glyceraldehyde 3-phosphate dehydrogenase
  misc_feature (1)..(295): NCBI GI NO: 38346061 NR Description: OJ000223_09.15
  misc_feature (1)..(295): NCBI GI NO: 29150193 NR Description: putative glyceraldehydes 3-phosphate dehydrogenase
  misc_feature (1)..(295): NCBI GI NO: 6166167 NR Description: Glyceraldehyde 3-phosphate dehydrogenase
  misc_feature (1)..(294): NCBI GI NO: 7431535 NR Description: glyceraldehyde-3-phosphate dehydrogenase
  misc_feature (1)..(295): NCBI GI NO: 120668 NR Description: Glyceraldehyde 3-phosphate dehydrogenase
  misc_feature (1)..(294): NCBI GI NO: 462137 NR Description: GLYCERALDEHYDE 3-PHOSPHATE DEHYDROGENASE
  misc_feature (1)..(295): NCBI GI NO: 120666 NR Description: Glyceraldehyde 3-phosphate dehydrogenase
  misc_feature (1)..(295): NCBI GI NO: 1345501 NR Description: glycolytic glyceraldehyde 3-phosphate dehydrogenase
  misc_feature (1)..(295): NCBI GI NO: 4539543 NR Description: glyceraldehyde-3-phosphate dehydrogenase
  misc_feature (1)..(294): NCBI GI NO: 462141 NR Description: Glyceraldehyde 3-phosphate dehydrogenase (GAPDH)
MTYMFKYDTVHGQWKHHEVKVKDSKTLLFGEKEVAVFGCRNPEEIPWAAAGAEYVVESTGVFTDKDKAAAHIKGGAKKVIISAPSKDAPMFVCGVNEKEYKSDIDIVSNASCTTNCLAPLAKVINDRFGIVEGLMTTVHAMTATQKTVDGPSSKDWRGGRAASFNIIPSSTGAAKAVGKVLPELNGKLTGMAFRVPTVDVSVVDLTVRLAKPATYDQIKAAIKEESEGNLKGILGYVDEDLVSTDFQGDNRSSIFDAKAGIALNDNFVKLVSWYDNEWGYSTRVVDLIRHMHSTK

SEQ ID NO: 7257 - protein, 292 aa, Glycine max
  peptide (1)..(292): Ceres Seq. ID no. 15179644
  misc_feature (110)..(271): Pfam Name: Pfam Description:  Glyceraldehyde 3-phosphate dehydrogenase
  misc_feature (1)..(292): NCBI GI NO: 38346061 NR Description: OJ000223_09.15
  misc_feature (1)..(292): NCBI GI NO: 29150193 NR Description: putative glyceraldehydes 3-phosphate dehydrogenase
  misc_feature (1)..(292): NCBI GI NO: 6166167 NR Description: Glyceraldehyde 3-phosphate dehydrogenase
  misc_feature (1)..(291): NCBI GI NO: 7431535 NR Description: glyceraldehyde-3-phosphate dehydrogenase
  misc_feature (1)..(292): NCBI GI NO: 120668 NR Description: Glyceraldehyde 3-phosphate dehydrogenase
  misc_feature (1)..(291): NCBI GI NO: 462137 NR Description: GLYCERALDEHYDE 3-PHOSPHATE DEHYDROGENASE
  misc_feature (1)..(292): NCBI GI NO: 120666 NR Description: Glyceraldehyde 3-phosphate dehydrogenase
  misc_feature (1)..(292): NCBI GI NO: 1345501 NR Description: glycolytic glyceraldehyde 3-phosphate dehydrogenase
  misc_feature (1)..(292): NCBI GI NO: 4539543 NR Description: glyceraldehyde-3-phosphate dehydrogenase
  misc_feature (1)..(291): NCBI GI NO: 462141 NR Description: Glyceraldehyde 3-phosphate dehydrogenase (GAPDH)
MFKYDTVHGQWKHHEVKVKDSKTLLFGEKEVAVFGCRNPEEIPWAAAGAEYVVESTGVFTDKDKAAAHIKGGAKKVIISAPSKDAPMFVCGVNEKEYKSDIDIVSNASCTTNCLAPLAKVINDRFGIVEGLMTTVHAMTATQKTVDGPSSKDWRGGRAASFNIIPSSTGAAKAVGKVLPELNGKLTGMAFRVPTVDVSVVDLTVRLAKPATYDQIKAAIKEESEGNLKGILGYVDEDLVSTDFQGDNRSSIFDAKAGIALNDNFVKLVSWYDNEWGYSTRVVDLIRHMHSTK

SEQ ID NO: 7258 - DNA, 1187 bp, Glycine max
  misc_feature (1)..(1187): Ceres Seq. ID no. 12612330
gttcactagcttcggagtttctttcgaataattttttaaaaaaaaacaatggcgacggttcagttcttcaaccaattcccctgcaaaacacgagtccaaagctcagcaaactcaaaacccctctccaagccaccgtcgctggtgccgacgagcgcgttcactcgccgtccgttgttctcccccggcgaattcgccgtttctcgtgcggatttcagagtcagagtcatcgatgcagaagacgagtttgattcggagaggagtgagggaggatcggctctattgatggcggaggaagcaatcgaatccgtggaagagacggaggttctcaagagatcgctggtggattcgttgtacggcacagaccgagggttgagcgcatcgagcgagacgagagccgagatcggagatctaatcacacagctcgagtccaagaaccctacaccagctcccaccgatgctctcttccttctcaacggcaaatggatcctcgcgtacacatcgttcgttggtttgttcccgttgctttcacgagggatcgtgccgttagttaaagtcgacgagatctcacagactattgattcggaaaacttcacggtcgagaactctgttctgttcgctggtccgttagctacaacctcaatcagcaccaacgccaaattcgaaatccgtagccctaaacgcgtccagattaagttcgaggaaggtgtgatcggcactcctcagctaacggattcgatcgagatcccggagtatgttgagtttcttggtcagaagattgatcttactccgatcagagggttgcttacatctgtacaagacacggctacgtctgtggctagaaccatatcgagccagccaccgttgaaattctccttgccaggggacaatgcccagtcgtggctgctcaccacttatctggacaaggacattaggatctctagaggagatggtggaagcgtctttgtgcttatcaaagaaggaagccctctcttgaactcttgaactctttaatgccaagtacaaactaagtgtttaatattgttgttgtagtgttaatcgtttgtattaactcggatggtatggagttaagaaataatgttgtagctgctaaaaaaaaaaaaaaaaaagcttcgggtggacccggtcaacttcaagctcctaagccactgcctgctggtgagcccatc

SEQ ID NO: 7259 - protein, 317 aa, Glycine max
  peptide (1)..(317): Ceres Seq. ID no. 12612331
  misc_feature (91)..(308): Pfam Name: Pfam Description:  PAP_fibrillin
  misc_feature (1)..(316): NCBI GI NO: 14248556 NR Description: plastid-lipid associated protein PAP2
  misc_feature (1)..(316): NCBI GI NO: 14248550 NR Description: plastid-lipid associated protein PAP2
  misc_feature (1)..(316): NCBI GI NO: 15235575 NR Description: fibrillin precursor-like protein
  misc_feature (1)..(316): NCBI GI NO: 21618237 NR Description: fibrillin precursor-like protein
  misc_feature (1)..(316): NCBI GI NO: 18377868 NR Description: AT4g22240/T10I14_70 [Arabidopsis thaliana]
  misc_feature (1)..(316): NCBI GI NO: 15233357 NR Description: putative fibrillin; protein id: At4g04020
  misc_feature (3)..(316): NCBI GI NO: 14248554 NR Description: plastid-lipid associated protein PAP1
  misc_feature (3)..(316): NCBI GI NO: 14248548 NR Description: plastid-lipid associated protein PAP1
  misc_feature (1)..(315): NCBI GI NO: 3928760 NR Description: homolog to plastid-lipid-associated protein
  misc_feature (81)..(316): NCBI GI NO: 4139097 NR Description: fibrillin [Brassica napus]
MATVQFFNQFPCKTRVQSSANSKPLSKPPSLVPTSAFTRRPLFSPGEFAVSRADFRVRVIDAEDEFDSERSEGGSALLMAEEAIESVEETEVLKRSLVDSLYGTDRGLSASSETRAEIGDLITQLESKNPTPAPTDALFLLNGKWILAYTSFVGLFPLLSRGIVPLVKVDEISQTIDSENFTVENSVLFAGPLATTSISTNAKFEIRSPKRVQIKFEEGVIGTPQLTDSIEIPEYVEFLGQKIDLTPIRGLLTSVQDTATSVARTISSQPPLKFSLPGDNAQSWLLTTYLDKDIRISRGDGGSVFVLIKEGSPLLNS

SEQ ID NO: 7260 - protein, 239 aa, Glycine max
  peptide (1)..(239): Ceres Seq. ID no. 12612332
  misc_feature (13)..(230): Pfam Name: Pfam Description:  PAP_fibrillin
  misc_feature (1)..(238): NCBI GI NO: 14248556 NR Description: plastid-lipid associated protein PAP2
  misc_feature (1)..(238): NCBI GI NO: 14248550 NR Description: plastid-lipid associated protein PAP2
  misc_feature (1)..(238): NCBI GI NO: 15235575 NR Description: fibrillin precursor-like protein
  misc_feature (1)..(238): NCBI GI NO: 21618237 NR Description: fibrillin precursor-like protein
  misc_feature (1)..(238): NCBI GI NO: 18377868 NR Description: AT4g22240/T10I14_70 [Arabidopsis thaliana]
  misc_feature (1)..(238): NCBI GI NO: 15233357 NR Description: putative fibrillin; protein id: At4g04020
  misc_feature (1)..(238): NCBI GI NO: 14248554 NR Description: plastid-lipid associated protein PAP1
  misc_feature (1)..(238): NCBI GI NO: 14248548 NR Description: plastid-lipid associated protein PAP1
  misc_feature (1)..(237): NCBI GI NO: 3928760 NR Description: homolog to plastid-lipid-associated protein
  misc_feature (3)..(238): NCBI GI NO: 4139097 NR Description: fibrillin [Brassica napus]
MAEEAIESVEETEVLKRSLVDSLYGTDRGLSASSETRAEIGDLITQLESKNPTPAPTDALFLLNGKWILAYTSFVGLFPLLSRGIVPLVKVDEISQTIDSENFTVENSVLFAGPLATTSISTNAKFEIRSPKRVQIKFEEGVIGTPQLTDSIEIPEYVEFLGQKIDLTPIRGLLTSVQDTATSVARTISSQPPLKFSLPGDNAQSWLLTTYLDKDIRISRGDGGSVFVLIKEGSPLLNS

SEQ ID NO: 7261 - DNA, 773 bp, Glycine max
  misc_feature (1)..(773): Ceres Seq. ID no. 12612333
atcaaactcatacatagaaaataaataagaagaatttagaaaccctaaccatcatgtctccaaaatcaaaggctaaagctatgttcatcatcttcaaaatattaatgttaaatcttttgccaccaatatatgcatgtgggccatgcactacgccacgttaccccaaagggccgccccatcacggaggaggccggccgaaagtgtcgcctccgctgccgccaatcataatcaaccctccggtggtaccgccaccggtggtgatataccctccaccaatctcaccgccatacccgccgccgcacggtggtggtggttctcctccacaaaggacatgcccagttgatgccctaaaattggggctttgcttggatgtgcttggaggattggtgcatgtgggaatagggaacccagttgagaacgtgtgctgtccagttatacaagggttgcttgatcttgaagctgcaatttgtctttgcaccgttattagggctaagcttcttaacctcagcatcttccttcctattgcacttcaagtcttggtcacttgcgggaagactcctcctcctggttttgtttgtccaccgctgtattaaaccactgcatgcactacttcatactaccccaatactcaagcctatatagttctagttagttactacttactactagattaatatgtctttatcttttctattagggtttatgtaatgactcttatttcgttttatgtgtatgagtttacgctttaattaattatatacttctcaggattt

SEQ ID NO: 7262 - protein, 179 aa, Glycine max
  peptide (1)..(179): Ceres Seq. ID no. 12612334
  misc_feature (94)..(175): Pfam Name: Pfam Description:  Protease inhibitor/seed storage/LTP family
  misc_feature (21)..(178): NCBI GI NO: 15221483 NR Description: putative proline-rich cell wall protein
  misc_feature (16)..(175): NCBI GI NO: 1531756 NR Description: proline-rich-like protein [Asparagus officinalis]
  misc_feature (23)..(179): NCBI GI NO: 34898430 NR Description: Similar to Zea mays PRP gene.(X60432)
  misc_feature (33)..(175): NCBI GI NO: 485514 NR Description: ADR11-2 protein - soybean (fragment)
  misc_feature (16)..(176): NCBI GI NO: 7446486 NR Description: hypothetical protein - carrot
  misc_feature (23)..(178): NCBI GI NO: 15233717 NR Description: cell wall protein like; protein id: At4g15160.1
  misc_feature (23)..(176): NCBI GI NO: 19521 NR Description: proline rich protein [Lycopersicon esculentum]
  misc_feature (23)..(176): NCBI GI NO: 1709767 NR Description: 36.4 KD PROLINE-RICH PROTEIN
  misc_feature (22)..(176): NCBI GI NO: 1076501 NR Description: cell wall protein - alfalfa
  misc_feature (22)..(179): NCBI GI NO: 283044 NR Description: hybrid proline-rich protein - maize
MSPKSKAKAMFIIFKILMLNLLPPIYACGPCTTPRYPKGPPHHGGGRPKVSPPLPPIIINPPVVPPPVVIYPPPISPPYPPPHGGGGSPPQRTCPVDALKLGLCLDVLGGLVHVGIGNPVENVCCPVIQGLLDLEAAICLCTVIRAKLLNLSIFLPIALQVLVTCGKTPPPGFVCPPLY

SEQ ID NO: 7263 - protein, 170 aa, Glycine max
  peptide (1)..(170): Ceres Seq. ID no. 12612335
  misc_feature (85)..(166): Pfam Name: Pfam Description:  Protease inhibitor/seed storage/LTP family
  misc_feature (12)..(169): NCBI GI NO: 15221483 NR Description: putative proline-rich cell wall protein
  misc_feature (7)..(166): NCBI GI NO: 1531756 NR Description: proline-rich-like protein [Asparagus officinalis]
  misc_feature (14)..(170): NCBI GI NO: 34898430 NR Description: Similar to Zea mays PRP gene.(X60432)
  misc_feature (24)..(166): NCBI GI NO: 485514 NR Description: ADR11-2 protein - soybean (fragment)
  misc_feature (7)..(167): NCBI GI NO: 7446486 NR Description: hypothetical protein - carrot
  misc_feature (14)..(169): NCBI GI NO: 15233717 NR Description: cell wall protein like; protein id: At4g15160.1
  misc_feature (14)..(167): NCBI GI NO: 19521 NR Description: proline rich protein [Lycopersicon esculentum]
  misc_feature (14)..(167): NCBI GI NO: 1709767 NR Description: 36.4 KD PROLINE-RICH PROTEIN
  misc_feature (13)..(167): NCBI GI NO: 1076501 NR Description: cell wall protein - alfalfa
  misc_feature (13)..(170): NCBI GI NO: 283044 NR Description: hybrid proline-rich protein - maize
MFIIFKILMLNLLPPIYACGPCTTPRYPKGPPHHGGGRPKVSPPLPPIIINPPVVPPPVVIYPPPISPPYPPPHGGGGSPPQRTCPVDALKLGLCLDVLGGLVHVGIGNPVENVCCPVIQGLLDLEAAICLCTVIRAKLLNLSIFLPIALQVLVTCGKTPPPGFVCPPLY

SEQ ID NO: 7264 - protein, 162 aa, Glycine max
  peptide (1)..(162): Ceres Seq. ID no. 12612336
  misc_feature (77)..(158): Pfam Name: Pfam Description:  Protease inhibitor/seed storage/LTP family
  misc_feature (4)..(161): NCBI GI NO: 15221483 NR Description: putative proline-rich cell wall protein
  misc_feature (1)..(158): NCBI GI NO: 1531756 NR Description: proline-rich-like protein [Asparagus officinalis]
  misc_feature (6)..(162): NCBI GI NO: 34898430 NR Description: Similar to Zea mays PRP gene.(X60432)
  misc_feature (16)..(158): NCBI GI NO: 485514 NR Description: ADR11-2 protein - soybean (fragment)
  misc_feature (1)..(159): NCBI GI NO: 7446486 NR Description: hypothetical protein - carrot
  misc_feature (6)..(161): NCBI GI NO: 15233717 NR Description: cell wall protein like; protein id: At4g15160.1
  misc_feature (6)..(159): NCBI GI NO: 19521 NR Description: proline rich protein [Lycopersicon esculentum]
  misc_feature (6)..(159): NCBI GI NO: 1709767 NR Description: 36.4 KD PROLINE-RICH PROTEIN
  misc_feature (5)..(159): NCBI GI NO: 1076501 NR Description: cell wall protein - alfalfa
  misc_feature (5)..(162): NCBI GI NO: 283044 NR Description: hybrid proline-rich protein - maize
MLNLLPPIYACGPCTTPRYPKGPPHHGGGRPKVSPPLPPIIINPPVVPPPVVIYPPPISPPYPPPHGGGGSPPQRTCPVDALKLGLCLDVLGGLVHVGIGNPVENVCCPVIQGLLDLEAAICLCTVIRAKLLNLSIFLPIALQVLVTCGKTPPPGFVCPPLY

SEQ ID NO: 7265 - DNA, 823 bp, Glycine max
  misc_feature (1)..(823): Ceres Seq. ID no. 14301432
tcactcccttccttcgtcctttgcactcccactcctacgcttcccaacctcgccattccgtcgagcacatcccgggcgacgcaggcggccatggaggacggcggcgcgagagcggcggcggtgcagaagctgatggcggccaaggccaagtccggcaagagcttctccgacatcggggccgagacggggctcaccaacgtgtacgtcgcgcagctgctgcgccgccaggcgcagctcaagcccgacacggcggccgcgctgcgggcggccatcccggcgctcaccgaagagctcgtggaactcatgatgcagccgcccttccgctcgtacaaccctgaaatggtccacgagcccgccatatacagactgaatgaagctatcatgcattttggagagagcatcaaggcaatcatcaatgaggactttggtgatggaatcatgtcagctatagacttctactgtaccgtcgacaaagttaaaggggctgatggaaaagaccgtgtggtgctcacatttgatgggaagtatctgcctcacactgaacagaaagccgcgaatatgatgtcgaagttgccctgcaaggcaccttgagataatgagatggctggtactgggagaaggggggtatgtagcttcactaatgtctgcttatacttcggacaaaaaaattgagcgtcccttttctagtctgaatgatcgaccaaataaagagtggtcatatagtatgtaatgtctgcttgtactttggacctggaacagcattcgacatgcttttcctcgtctgaatgatcgactaaataaagtggcaatatagtttgtaaat

SEQ ID NO: 7266 - protein, 196 aa, Glycine max
  peptide (1)..(196): Ceres Seq. ID no. 14301433
  misc_feature (109)..(182): Pfam Name: Pfam Description:  Cyanate lyase C-terminal domain
  misc_feature (31)..(194): NCBI GI NO: 20137963 NR Description: Cyanate hydratase
  misc_feature (33)..(194): NCBI GI NO: 15229458 NR Description: cyanate lyase (CYN) [Arabidopsis thaliana]
  misc_feature (33)..(194): NCBI GI NO: 21554171 NR Description: cyanate lyase (CYN) [Arabidopsis thaliana]
  misc_feature (14)..(121): NCBI GI NO: 37535282 NR Description: putative cyanase
  misc_feature (34)..(194): NCBI GI NO: 37535282 NR Description: putative cyanase
  misc_feature (36)..(178): NCBI GI NO: 15597248 NR Description: cyanate lyase [Pseudomonas aeruginosa PA01]
  misc_feature (37)..(179): NCBI GI NO: 28869134 NR Description: cyanate lyase
  misc_feature (37)..(178): NCBI GI NO: 37524138 NR Description: cyanate lyase (cyanate hydrolase) (cyanase)
  misc_feature (58)..(174): NCBI GI NO: 40742192 NR Description: hypothetical protein AN7331.2
SLPSFVLCTPTPTLPNLAIPSSTSRATQAAMEDGGARAAAVQKLMAAKAKSGKSFSDIGAETGLTNVYVAQLLRRQAQLKPDTAAALRAAIPALTEELVELMMQPPFRSYNPEMVHEPAIYRLNEAIMHFGESIKAIINEDFGDGIMSAIDFYCTVDKVKGADGKDRVVLTFDGKYLPHTEQKAANMMSKLPCKAP

SEQ ID NO: 7267 - protein, 166 aa, Glycine max
  peptide (1)..(166): Ceres Seq. ID no. 14301434
  misc_feature (79)..(152): Pfam Name: Pfam Description:  Cyanate lyase C-terminal domain
  misc_feature (1)..(164): NCBI GI NO: 20137963 NR Description: Cyanate hydratase
  misc_feature (3)..(164): NCBI GI NO: 15229458 NR Description: cyanate lyase (CYN) [Arabidopsis thaliana]
  misc_feature (3)..(164): NCBI GI NO: 21554171 NR Description: cyanate lyase (CYN) [Arabidopsis thaliana]
  misc_feature (1)..(91): NCBI GI NO: 37535282 NR Description: putative cyanase
  misc_feature (4)..(164): NCBI GI NO: 37535282 NR Description: putative cyanase
  misc_feature (6)..(148): NCBI GI NO: 15597248 NR Description: cyanate lyase [Pseudomonas aeruginosa PA01]
  misc_feature (7)..(149): NCBI GI NO: 28869134 NR Description: cyanate lyase
  misc_feature (7)..(148): NCBI GI NO: 37524138 NR Description: cyanate lyase (cyanate hydrolase) (cyanase)
  misc_feature (28)..(144): NCBI GI NO: 40742192 NR Description: hypothetical protein AN7331.2
MEDGGARAAAVQKLMAAKAKSGKSFSDIGAETGLTNVYVAQLLRRQAQLKPDTAAALRAAIPALTEELVELMMQPPFRSYNPEMVHEPAIYRLNEAIMHFGESIKAIINEDFGDGIMSAIDFYCTVDKVKGADGKDRVVLTFDGKYLPHTEQKAANMMSKLPCKAP

SEQ ID NO: 7268 - protein, 152 aa, Glycine max
  peptide (1)..(152): Ceres Seq. ID no. 14301435
  misc_feature (65)..(138): Pfam Name: Pfam Description:  Cyanate lyase C-terminal domain
  misc_feature (1)..(150): NCBI GI NO: 20137963 NR Description: Cyanate hydratase
  misc_feature (1)..(150): NCBI GI NO: 15229458 NR Description: cyanate lyase (CYN) [Arabidopsis thaliana]
  misc_feature (1)..(150): NCBI GI NO: 21554171 NR Description: cyanate lyase (CYN) [Arabidopsis thaliana]
  misc_feature (1)..(77): NCBI GI NO: 37535282 NR Description: putative cyanase
  misc_feature (1)..(150): NCBI GI NO: 37535282 NR Description: putative cyanase
  misc_feature (1)..(134): NCBI GI NO: 15597248 NR Description: cyanate lyase [Pseudomonas aeruginosa PA01]
  misc_feature (1)..(135): NCBI GI NO: 28869134 NR Description: cyanate lyase
  misc_feature (1)..(134): NCBI GI NO: 37524138 NR Description: cyanate lyase (cyanate hydrolase) (cyanase)
  misc_feature (14)..(130): NCBI GI NO: 40742192 NR Description: hypothetical protein AN7331.2
MAAKAKSGKSFSDIGAETGLTNVYVAQLLRRQAQLKPDTAAALRAAIPALTEELVELMMQPPFRSYNPEMVHEPAIYRLNEAIMHFGESIKAIINEDFGDGIMSAIDFYCTVDKVKGADGKDRVVLTFDGKYLPHTEQKAANMMSKLPCKAP

SEQ ID NO: 7269 - DNA, 1002 bp, Glycine max
  misc_feature (1)..(1002): Ceres Seq. ID no. 13639221
agacattgtctcaatcccacacgcttcttactcctctcataacttttctgctccccgttgagaaagatttgaatccaaaggaaaaataacgctaatggctccaagagacagccgagccaccgcgctcattgggcccggcccaagcctatcaccggcccacaaagagatccgctacagaggcgtcaggaaacgcccctggggccgctacgccgccgagatccgcgatcccggcaagaaaacccgcgtctggctcggcactttcgacaccgccgaggaagccgcgcgcgcctacgacaccgccgcgcgtgagtttcgtggcgccaaggccaagaccaatttcccgacaccctcggaactcatccttaacaacaacaacataaacgctcgtagtcccagccagaccagcaccctcgactcatcctctcccccgccaccgccaccgctagaccttaccctcacccctctctcctccgctgtcttcccggtggcgcgtcctgttctattcttcgacgcattcgcgcgtgcggacaccatggtcgccgtctcgcgccgcgagacctgcggcttcgaacgccccgccgccgatttccgccgcggcgactccgactctgattataaccgccgcatactcctggatcttgacctgaacgtacctcctctcccggaggttgcctgattcatgcagggagttctgtttttttcgcaattattgtttttttggttttttaagcatctgggaggtactactacgcatcttttttgacgaaagtgccctcgagggagcagcaaagtgagtagtggatgacatgatgctcggatttgttgaccattttgtgatgatgaagatatataaccggcacgttatgtaaatacacgttataaccgaaagcaaacgtgcttttgcttggttgcttttttttttgcaactgaggactcttattcagagtatctcatggttgtttctgcaatttctcaaaatatataaatattccaatttccatc

SEQ ID NO: 7270 - protein, 193 aa, Glycine max
  peptide (1)..(193): Ceres Seq. ID no. 13639222
  misc_feature (24)..(88): Pfam Name: Pfam Description:  AP2 domain
  misc_feature (14)..(191): NCBI GI NO: 20340233 NR Description: ethylene responsive element binding factor 4-like
  misc_feature (23)..(139): NCBI GI NO: 2281635 NR Description: AP2 domain containing protein RAP2.5
  misc_feature (23)..(139): NCBI GI NO: 15232526 NR Description: ethylene responsive element binding factor 4
  misc_feature (1)..(110): NCBI GI NO: 4099914 NR Description: ethylene-responsive element binding protein homolog
  misc_feature (1)..(121): NCBI GI NO: 28274832 NR Description: ethylene response factor 3
  misc_feature (17)..(121): NCBI GI NO: 30526297 NR Description: ethylene response factor 2
  misc_feature (1)..(110): NCBI GI NO: 4099921 NR Description: EREBP-3 homolog [Stylosanthes hamata]
  misc_feature (23)..(122): NCBI GI NO: 7489114 NR Description: DNA binding protein EREBP-3 - common tobacco
  misc_feature (23)..(122): NCBI GI NO: 8809573 NR Description: ethylene-responsive element binding factor
  misc_feature (1)..(192): NCBI GI NO: 15241432 NR Description: ethylene responsive element binding factor 9
MAPRDSRATALIGPGPSLSPAHKEIRYRGVRKRPWGRYAAEIRDPGKKTRVWLGTFDTAEEAARAYDTAAREFRGAKAKTNFPTPSELILNNNNINARSPSQTSTLDSSSPPPPPPLDLTLTPLSSAVFPVARPVLFFDAFARADTMVAVSRRETCGFERPAADFRRGDSDSDYNRRILLDLDLNVPPLPEVA

SEQ ID NO: 7271 - DNA, 962 bp, Glycine max
  misc_feature (1)..(962): Ceres Seq. ID no. 13594828
tactagcttacttaggacctggcagcctctcaattttctctataaataccagtgcctccgtgtcttctcaattttcaccagccatagtcatacagcgacaataaggagagcaaattagaagcacagatcaaggggaagagaactccgcggctgatcagcaatggcgaccaagatctacatagtgtactactcgacctggggacacgtcgcgacgctggcggaggagatgaagaagggcgccgactccgtccccggcgtcgaggtcaccgtctggcgggtgccagagacgctgccagaggaggtgctcgggaagatgcacgcggcgccggggcgcgaggaccacccggtcatcacggcgagccagctggccgaggccgacggcatcctgttcggcttcccgacgcggttcggcatgatggcggcgcagatgaaggccttcttcgactccaccggcggcctctggcaggcacagagcctctcgggcaagcccgcgggcgtcttcttcgcgacgggcacccagggcggcgggcaggagaccacggctctcacggccgtgacgcagctgacgcaccacggcatgctgttcgtgccggtcgggtacacgcacggcgccggcatgttcgccatggacgaggtcaagggtggcagcccgtacggtgccggcaccttcgctggagccgatggcagcagggtgcccagcgatgccgagctcgccctcgcggcgcaccagggcaagtactttgccggcatcgccaagaagctcaaagccgtctgaactccgatcaccagccgtgtcccatgactcatatcaactactcaatcattacaagatgatttgacacatcattttcagtggagcagatttacataattctagacaattaaactgtactgcatttaatttcttgtttggacaaataatacaatttcttgttttgagtggagcattcggtcttggtttt

SEQ ID NO: 7272 - protein, 204 aa, Glycine max
  peptide (1)..(204): Ceres Seq. ID no. 13594829
  misc_feature (1)..(202): NCBI GI NO: 12484052 NR Description: quinone-oxidoreductase QR2
  misc_feature (1)..(202): NCBI GI NO: 34910128 NR Description: putative 1,4-benzoquinone reductase
  misc_feature (1)..(202): NCBI GI NO: 38636776 NR Description: putative quinone-oxidoreductase QR2
  misc_feature (3)..(202): NCBI GI NO: 21068664 NR Description: putative quinone oxidoreductase [Cicer arietinum]
  misc_feature (1)..(202): NCBI GI NO: 5031275 NR Description: unknown [Prunus armeniaca]
  misc_feature (1)..(202): NCBI GI NO: 30687535 NR Description: quinone reductase family [Arabidopsis thaliana]
  misc_feature (1)..(202): NCBI GI NO: 15239652 NR Description: quinone reductase, putative [Arabidopsis thaliana]
  misc_feature (1)..(203): NCBI GI NO: 2564066 NR Description: LEDI-3 protein [Lithospermum erythrorhizon]
  misc_feature (1)..(202): NCBI GI NO: 7445353 NR Description: hypothetical protein M4I22
  misc_feature (4)..(201): NCBI GI NO: 15234512 NR Description: quinone reductase family [Arabidopsis thaliana]
MATKIYIVYYSTWGHVATLAEEMKKGADSVPGVEVTVWRVPETLPEEVLGKMHAAPGREDHPVITASQLAEADGILFGFPTRFGMMAAQMKAFFDSTGGLWQAQSLSGKPAGVFFATGTQGGGQETTALTAVTQLTHHGMLFVPVGYTHGAGMFAMDEVKGGSPYGAGTFAGADGSRVPSDAELALAAHQGKYFAGIAKKLKAV

SEQ ID NO: 7273 - protein, 182 aa, Glycine max
  peptide (1)..(182): Ceres Seq. ID no. 13594830
  misc_feature (1)..(180): NCBI GI NO: 12484052 NR Description: quinone-oxidoreductase QR2
  misc_feature (1)..(180): NCBI GI NO: 34910128 NR Description: putative 1,4-benzoquinone reductase
  misc_feature (1)..(180): NCBI GI NO: 38636776 NR Description: putative quinone-oxidoreductase QR2
  misc_feature (1)..(180): NCBI GI NO: 21068664 NR Description: putative quinone oxidoreductase [Cicer arietinum]
  misc_feature (1)..(180): NCBI GI NO: 5031275 NR Description: unknown [Prunus armeniaca]
  misc_feature (1)..(180): NCBI GI NO: 30687535 NR Description: quinone reductase family [Arabidopsis thaliana]
  misc_feature (1)..(180): NCBI GI NO: 15239652 NR Description: quinone reductase, putative [Arabidopsis thaliana]
  misc_feature (1)..(181): NCBI GI NO: 2564066 NR Description: LEDI-3 protein [Lithospermum erythrorhizon]
  misc_feature (1)..(180): NCBI GI NO: 7445353 NR Description: hypothetical protein M4I22
  misc_feature (1)..(179): NCBI GI NO: 15234512 NR Description: quinone reductase family [Arabidopsis thaliana]
MKKGADSVPGVEVTVWRVPETLPEEVLGKMHAAPGREDHPVITASQLAEADGILFGFPTRFGMMAAQMKAFFDSTGGLWQAQSLSGKPAGVFFATGTQGGGQETTALTAVTQLTHHGMLFVPVGYTHGAGMFAMDEVKGGSPYGAGTFAGADGSRVPSDAELALAAHQGKYFAGIAKKLKAV

SEQ ID NO: 7274 - protein, 153 aa, Glycine max
  peptide (1)..(153): Ceres Seq. ID no. 13594831
  misc_feature (1)..(151): NCBI GI NO: 12484052 NR Description: quinone-oxidoreductase QR2
  misc_feature (1)..(151): NCBI GI NO: 34910128 NR Description: putative 1,4-benzoquinone reductase
  misc_feature (1)..(151): NCBI GI NO: 38636776 NR Description: putative quinone-oxidoreductase QR2
  misc_feature (1)..(151): NCBI GI NO: 21068664 NR Description: putative quinone oxidoreductase [Cicer arietinum]
  misc_feature (1)..(151): NCBI GI NO: 5031275 NR Description: unknown [Prunus armeniaca]
  misc_feature (1)..(151): NCBI GI NO: 30687535 NR Description: quinone reductase family [Arabidopsis thaliana]
  misc_feature (1)..(151): NCBI GI NO: 15239652 NR Description: quinone reductase, putative [Arabidopsis thaliana]
  misc_feature (1)..(152): NCBI GI NO: 2564066 NR Description: LEDI-3 protein [Lithospermum erythrorhizon]
  misc_feature (1)..(151): NCBI GI NO: 7445353 NR Description: hypothetical protein M4I22
  misc_feature (1)..(150): NCBI GI NO: 15234512 NR Description: quinone reductase family [Arabidopsis thaliana]
MHAAPGREDHPVITASQLAEADGILFGFPTRFGMMAAQMKAFFDSTGGLWQAQSLSGKPAGVFFATGTQGGGQETTALTAVTQLTHHGMLFVPVGYTHGAGMFAMDEVKGGSPYGAGTFAGADGSRVPSDAELALAAHQGKYFAGIAKKLKAV

SEQ ID NO: 7275 - DNA, 1296 bp, Glycine max
  misc_feature (1)..(1296): Ceres Seq. ID no. 12583314
aatgactggcattcaagttagcttagctatgatgaatgaagaggagtatagatggtcaacgtttttggtaagcaactagtaattaagcaagcaagaatcacaaattggaaccatgtttctcaaatgttttggcttcggcgctcagagacagtatccaacggtgatagaagagttgtgccatcgattttctctcgcagatctaaggaaatcaaccaacaatttcgatcaaaacacagtaattgatcgtggaggatgtggcagagtatataaaggttgtctccagcacaatgaacatgcttctgatacagtcgctgtaaagcgattgggaatgggaaatgaagagttgttcaggaatgaaatagagttactctgtcagcttcgtcaccctaatttggtctctcttataggattctgcaacgaccaaaaagagaagattattgtgtacgagtacttgtccaatggatctcttgatcaacttctacaaagtggggtactgtcatggaagaaaagactagagatatgcataggagcagcgcgtggactacactaccttcacgctggagccaaacgcaccatcattcaccgtgacatcaaacccagcaacattcttttggatgataacatggagccaaaactcgcaggtttcagccttagcgtactgggaccgcgttttaagtcaaaacccaaaccaattaaagtagattctgttttgggtacttatggctacctggctgcggagcatctcaaggacctcaccgtcacagataaaactgatgtttactcatttggtatggttctacttgatgttgtgtgtggagggaaatatttcatgaagtcaattaaaacggaatttctggaaaaacctcttgaggagaaaattgatggaattatcgaaggaagtatcgcaccagagtgttggcaagtcttcatagatatcatccgaaagtgcgtgaaatatgaagcacatgagcgaccaacaatgggtgaagtagaggtagaacttgagcatgctctgtcgttgcaggaacaagcagatatcacaaacaacattaaccaacaatgggtgaaattggaagcagatgagcgaccaacaatgggtgaagtaaaggtagaacttgagcatgctctgtccttacaagcactagcagatagagtaaacaccaactgtcgttataccttaatgtccaaaaccgttattaatccctggctcaaagagtcacaagattctgaataaagtattgaaatccataggtgatttgattaggtaagctgaaattaaggttagtgttttgagtc

SEQ ID NO: 7276 - protein, 373 aa, Glycine max
  peptide (1)..(373): Ceres Seq. ID no. 12583315
  misc_feature (1)..(368): NCBI GI NO: 9796478 NR Description: serine threonine kinase homolog COK-4
  misc_feature (21)..(308): NCBI GI NO: 15241880 NR Description: receptor-like protein kinase precursor - like
  misc_feature (21)..(313): NCBI GI NO: 34909896 NR Description: putative receptor-protein kinase
  misc_feature (20)..(312): NCBI GI NO: 20147233 NR Description: AT5g38990/K15E6_170 [Arabidopsis thaliana]
  misc_feature (21)..(312): NCBI GI NO: 15229329 NR Description: putative protein kinase; protein id: At3g04690.1
  misc_feature (20)..(312): NCBI GI NO: 15241605 NR Description: protein kinase - like protein
  misc_feature (21)..(308): NCBI GI NO: 15230520 NR Description: receptor-protein kinase-like protein
  misc_feature (21)..(308): NCBI GI NO: 17887381 NR Description: receptor protein kinase-like protein
  misc_feature (20)..(312): NCBI GI NO: 15241606 NR Description: protein kinase - like protein
  misc_feature (21)..(308): NCBI GI NO: 14334760 NR Description: putative receptor-protein kinase
MFLKCFGFGAQRQYPTVIEELCHRFSLADLRKSTNNFDQNTVIDRGGCGRVYKGCLQHNEHASDTVAVKRLGMGNEELFRNEIELLCQLRHPNLVSLIGFCNDQKEKIIVYEYLSNGSLDQLLQSGVLSWKKRLEICIGAARGLHYLHAGAKRTIIHRDIKPSNILLDDNMEPKLAGFSLSVLGPRFKSKPKPIKVDSVLGTYGYLAAEHLKDLTVTDKTDVYSFGMVLLDVVCGGKYFMKSIKTEFLEKPLEEKIDGIIEGSIAPECWQVFIDIIRKCVKYEAHERPTMGEVEVELEHALSLQEQADITNNINQQWVKLEADERPTMGEVKVELEHALSLQALADRVNTNCRYTLMSKTVINPWLKESQDSE

SEQ ID NO: 7277 - protein, 301 aa, Glycine max
  peptide (1)..(301): Ceres Seq. ID no. 12583316
  misc_feature (1)..(296): NCBI GI NO: 9796478 NR Description: serine threonine kinase homolog COK-4
  misc_feature (1)..(236): NCBI GI NO: 15241880 NR Description: receptor-like protein kinase precursor - like
  misc_feature (1)..(241): NCBI GI NO: 34909896 NR Description: putative receptor-protein kinase
  misc_feature (1)..(240): NCBI GI NO: 20147233 NR Description: AT5g38990/K15E6_170 [Arabidopsis thaliana]
  misc_feature (1)..(240): NCBI GI NO: 15229329 NR Description: putative protein kinase; protein id: At3g04690.1
  misc_feature (1)..(240): NCBI GI NO: 15241605 NR Description: protein kinase - like protein
  misc_feature (1)..(236): NCBI GI NO: 15230520 NR Description: receptor-protein kinase-like protein
  misc_feature (1)..(236): NCBI GI NO: 17887381 NR Description: receptor protein kinase-like protein
  misc_feature (1)..(240): NCBI GI NO: 15241606 NR Description: protein kinase - like protein
  misc_feature (1)..(236): NCBI GI NO: 14334760 NR Description: putative receptor-protein kinase
MGNEELFRNEIELLCQLRHPNLVSLIGFCNDQKEKIIVYEYLSNGSLDQLLQSGVLSWKKRLEICIGAARGLHYLHAGAKRTIIHRDIKPSNILLDDNMEPKLAGFSLSVLGPRFKSKPKPIKVDSVLGTYGYLAAEHLKDLTVTDKTDVYSFGMVLLDVVCGGKYFMKSIKTEFLEKPLEEKIDGIIEGSIAPECWQVFIDIIRKCVKYEAHERPTMGEVEVELEHALSLQEQADITNNINQQWVKLEADERPTMGEVKVELEHALSLQALADRVNTNCRYTLMSKTVINPWLKESQDSE

SEQ ID NO: 7278 - protein, 203 aa, Glycine max
  peptide (1)..(203): Ceres Seq. ID no. 12583317
  misc_feature (1)..(198): NCBI GI NO: 9796478 NR Description: serine threonine kinase homolog COK-4
  misc_feature (1)..(138): NCBI GI NO: 15241880 NR Description: receptor-like protein kinase precursor - like
  misc_feature (1)..(143): NCBI GI NO: 34909896 NR Description: putative receptor-protein kinase
  misc_feature (1)..(142): NCBI GI NO: 20147233 NR Description: AT5g38990/K15E6_170 [Arabidopsis thaliana]
  misc_feature (1)..(142): NCBI GI NO: 15229329 NR Description: putative protein kinase; protein id: At3g04690.1
  misc_feature (1)..(142): NCBI GI NO: 15241605 NR Description: protein kinase - like protein
  misc_feature (1)..(138): NCBI GI NO: 15230520 NR Description: receptor-protein kinase-like protein
  misc_feature (1)..(138): NCBI GI NO: 17887381 NR Description: receptor protein kinase-like protein
  misc_feature (1)..(142): NCBI GI NO: 15241606 NR Description: protein kinase - like protein
  misc_feature (1)..(138): NCBI GI NO: 14334760 NR Description: putative receptor-protein kinase
MEPKLAGFSLSVLGPRFKSKPKPIKVDSVLGTYGYLAAEHLKDLTVTDKTDVYSFGMVLLDVVCGGKYFMKSIKTEFLEKPLEEKIDGIIEGSIAPECWQVFIDIIRKCVKYEAHERPTMGEVEVELEHALSLQEQADITNNINQQWVKLEADERPTMGEVKVELEHALSLQALADRVNTNCRYTLMSKTVINPWLKESQDSE

SEQ ID NO: 7279 - DNA, 1849 bp, Glycine max
  misc_feature (1)..(1849): Ceres Seq. ID no. 15178736
agaaggttgtggggttagggctttagagtgtcttttcttctttttcttcttcttcttcttcgttgaatcgcgattgttctgttgtgcgactgaaagaagagagatcgaaaatggcgttggctttcgacgagttcggaaggcctttcataatcctgaaggaacaggagcagaagagcagacttcgaggtttggacgctcagaaagccaacatctccgccggcaaagccgtcgctcgcatcctccgaacctccctcggccccaaaggcatggacaagatgctccagagccccgacggcgacgtcactatcacgaacgacggtgccacgatccttgaccagatggacgtggacaaccaaatcgcgaagctgatggtggagctctcgcggagtcaggactacgaaatcggcgacggaaccaccggcgtcgtcgtcatggccggcgcgcttctcgagaaggccgagcgcctcctcgagcggggaattcaccccatcaggatcgccaagggttacgaaatggcgtccaggatcgccgtcgagcatctcgagcgcgtcgccaacaagttcgagttcgacgagtccaatttggagcccctcattcaaacttgcatgaccaccctctcctccaaaattgtgaatcggtgtaagcgtagcttggctgagattgctgttaaggctgttcttgctgttgctgatctggcgaggaaggatgttaatttggatctaattaaagtggaagggaaagttgggggtaaattggaggataccgagttgatctatgggattgttgtggacaaggatatgagtcatcctcaaatgcctaagcaaattgaggatgctaaaattgctatcctcacatgcccctttgagcctcccaagccaaagactaagcataaggttgacattgatacagtggagaagttccagacgttgaggttgcaggaacagaagtattttgatgacatggttcagaaatgcaaggatgtgggtgcaacccttgtcatttgccaatggggttttgacgatgaagcaaatcatctcttaatgcacaggaacttgccagctgttagatgggttggtggtgtagagttggaattgatagctatagcaactggtggaagaattgttcctaggtttcaggagttatctccagaaaagttgggaaaggctggtatggttcgagaaaagtcctttggtacaacaaaagaccgaatgctgtacattgaacattgtgcaaactcaagggctgtaactatattcattcgtggaggtaacaaaatgatcattgaggagacaaagcgcagccttcatgatgccttgtgcgtggctaggaatcttatccggaacaactctattgtctatggtggtggttcagctgagatttcttgctctatagctgtggaggcagctgctgatagataccctggagtagaacagtatgcaattagagcatttggggatgctttggaggccatcccaatggcccttgctgaaaatagtggcctgcaaccaattgaaacattatctgctgttaagtctcagcaaataaaggataataaccctcactttggcattgattgtaatgatgttggcactaatgacatgcgtgagcaaaatgtctttgaaactttgatcggaaagcagcaacagctcctactcgctactcaagttgtcaagatgatactgaaaattgatgatgtcatctccccatctgagtactgatatttttaaactcagtcatggtctacgtcaagatgctgaattggtgatactattttgtttcgatcggtttggttgtagtaagagtccgtacgttcacttgaaatgcaagattttggcccggtttgtatcgg

SEQ ID NO: 7280 - protein, 535 aa, Glycine max
  peptide (1)..(535): Ceres Seq. ID no. 15178737
  misc_feature (40)..(534): Pfam Name: Pfam Description:  TCP-1/cpn60 chaperonin family
  misc_feature (1)..(535): NCBI GI NO: 1587206 NR Description: T complex protein
  misc_feature (1)..(535): NCBI GI NO: 15221770 NR Description: T-complex protein 1, epsilon subunit/chaperonin
  misc_feature (1)..(535): NCBI GI NO: 1729864 NR Description: T-COMPLEX PROTEIN 1, EPSILON SUBUNIT
  misc_feature (1)..(535): NCBI GI NO: 730919 NR Description: T-COMPLEX PROTEIN 1, EPSILON SUBUNIT
  misc_feature (3)..(534): NCBI GI NO: 27924333 NR Description: Similar to chaperonin containing TCP1, subunit 5
  misc_feature (115)..(535): NCBI GI NO: 4206124 NR Description: T-complex protein 1 epsilon subunit
  misc_feature (3)..(534): NCBI GI NO: 603955 NR Description: KIAA0098 protein [Homo sapiens]
  misc_feature (3)..(534): NCBI GI NO: 12804225 NR Description: Unknown (protein for IMAGE:3543711) [Homo sapiens]
  misc_feature (3)..(534): NCBI GI NO: 24307939 NR Description: chaperonin containing TCP1, subunit 5 (epsilon)
  misc_feature (3)..(534): NCBI GI NO: 6683670 NR Description: CCT
MALAFDEFGRPFIILKEQEQKSRLRGLDAQKANISAGKAVARILRTSLGPKGMDKMLQSPDGDVTITNDGATILDQMDVDNQIAKLMVELSRSQDYEIGDGTTGVVVMAGALLEKAERLLERGIHPIRIAKGYEMASRIAVEHLERVANKFEFDESNLEPLIQTCMTTLSSKIVNRCKRSLAEIAVKAVLAVADLARKDVNLDLIKVEGKVGGKLEDTELIYGIVVDKDMSHPQMPKQIEDAKIAILTCPFEPPKPKTKHKVDIDTVEKFQTLRLQEQKYFDDMVQKCKDVGATLVICQWGFDDEANHLLMHRNLPAVRWVGGVELELIAIATGGRIVPRFQELSPEKLGKAGMVREKSFGTTKDRMLYIEHCANSRAVTIFIRGGNKMIIEETKRSLHDALCVARNLIRNNSIVYGGGSAEISCSIAVEAAADRYPGVEQYAIRAFGDALEAIPMALAENSGLQPIETLSAVKSQQIKDNNPHFGIDCNDVGTNDMREQNVFETLIGKQQQLLLATQVVKMILKIDDVISPSEY

SEQ ID NO: 7281 - protein, 483 aa, Glycine max
  peptide (1)..(483): Ceres Seq. ID no. 15178738
  misc_feature (1)..(482): Pfam Name: Pfam Description:  TCP-1/cpn60 chaperonin family
  misc_feature (1)..(483): NCBI GI NO: 1587206 NR Description: T complex protein
  misc_feature (1)..(483): NCBI GI NO: 15221770 NR Description: T-complex protein 1, epsilon subunit/chaperonin
  misc_feature (1)..(483): NCBI GI NO: 1729864 NR Description: T-COMPLEX PROTEIN 1, EPSILON SUBUNIT
  misc_feature (1)..(483): NCBI GI NO: 730919 NR Description: T-COMPLEX PROTEIN 1, EPSILON SUBUNIT
  misc_feature (1)..(482): NCBI GI NO: 27924333 NR Description: Similar to chaperonin containing TCP1, subunit 5
  misc_feature (63)..(483): NCBI GI NO: 4206124 NR Description: T-complex protein 1 epsilon subunit
  misc_feature (1)..(482): NCBI GI NO: 603955 NR Description: KIAA0098 protein [Homo sapiens]
  misc_feature (1)..(482): NCBI GI NO: 24307939 NR Description: chaperonin containing TCP1, subunit 5 (epsilon)
  misc_feature (1)..(482): NCBI GI NO: 12804225 NR Description: Unknown (protein for IMAGE:3543711) [Homo sapiens]
  misc_feature (1)..(482): NCBI GI NO: 6683670 NR Description: CCT
MDKMLQSPDGDVTITNDGATILDQMDVDNQIAKLMVELSRSQDYEIGDGTTGVVVMAGALLEKAERLLERGIHPIRIAKGYEMASRIAVEHLERVANKFEFDESNLEPLIQTCMTTLSSKIVNRCKRSLAEIAVKAVLAVADLARKDVNLDLIKVEGKVGGKLEDTELIYGIVVDKDMSHPQMPKQIEDAKIAILTCPFEPPKPKTKHKVDIDTVEKFQTLRLQEQKYFDDMVQKCKDVGATLVICQWGFDDEANHLLMHRNLPAVRWVGGVELELIAIATGGRIVPRFQELSPEKLGKAGMVREKSFGTTKDRMLYIEHCANSRAVTIFIRGGNKMIIEETKRSLHDALCVARNLIRNNSIVYGGGSAEISCSIAVEAAADRYPGVEQYAIRAFGDALEAIPMALAENSGLQPIETLSAVKSQQIKDNNPHFGIDCNDVGTNDMREQNVFETLIGKQQQLLLATQVVKMILKIDDVISPSEY

SEQ ID NO: 7282 - protein, 480 aa, Glycine max
  peptide (1)..(480): Ceres Seq. ID no. 15178739
  misc_feature (1)..(479): Pfam Name: Pfam Description:  TCP-1/cpn60 chaperonin family
  misc_feature (1)..(480): NCBI GI NO: 1587206 NR Description: T complex protein
  misc_feature (1)..(480): NCBI GI NO: 15221770 NR Description: T-complex protein 1, epsilon subunit/chaperonin
  misc_feature (1)..(480): NCBI GI NO: 1729864 NR Description: T-COMPLEX PROTEIN 1, EPSILON SUBUNIT
  misc_feature (1)..(480): NCBI GI NO: 730919 NR Description: T-COMPLEX PROTEIN 1, EPSILON SUBUNIT
  misc_feature (1)..(479): NCBI GI NO: 27924333 NR Description: Similar to chaperonin containing TCP1, subunit 5
  misc_feature (60)..(480): NCBI GI NO: 4206124 NR Description: T-complex protein 1 epsilon subunit
  misc_feature (1)..(479): NCBI GI NO: 603955 NR Description: KIAA0098 protein [Homo sapiens]
  misc_feature (1)..(479): NCBI GI NO: 24307939 NR Description: chaperonin containing TCP1, subunit 5 (epsilon)
  misc_feature (1)..(479): NCBI GI NO: 12804225 NR Description: Unknown (protein for IMAGE:3543711) [Homo sapiens]
  misc_feature (1)..(479): NCBI GI NO: 6683670 NR Description: CCT
MLQSPDGDVTITNDGATILDQMDVDNQIAKLMVELSRSQDYEIGDGTTGVVVMAGALLEKAERLLERGIHPIRIAKGYEMASRIAVEHLERVANKFEFDESNLEPLIQTCMTTLSSKIVNRCKRSLAEIAVKAVLAVADLARKDVNLDLIKVEGKVGGKLEDTELIYGIVVDKDMSHPQMPKQIEDAKIAILTCPFEPPKPKTKHKVDIDTVEKFQTLRLQEQKYFDDMVQKCKDVGATLVICQWGFDDEANHLLMHRNLPAVRWVGGVELELIAIATGGRIVPRFQELSPEKLGKAGMVREKSFGTTKDRMLYIEHCANSRAVTIFIRGGNKMIIEETKRSLHDALCVARNLIRNNSIVYGGGSAEISCSIAVEAAADRYPGVEQYAIRAFGDALEAIPMALAENSGLQPIETLSAVKSQQIKDNNPHFGIDCNDVGTNDMREQNVFETLIGKQQQLLLATQVVKMILKIDDVISPSEY

SEQ ID NO: 7283 - DNA, 1233 bp, Glycine max
  misc_feature (1)..(1233): Ceres Seq. ID no. 13502622
acctagaacatcctaatcgaaaaaagcaagcaagcaacttgtattgttgctacaaggcatataaattttcatcattgcaagttgcaaccattttgaccaaaaaccaataataagctttcgaccaaaagaagaaagaagaacccatttatcatcgttggaaaaaatcccagatctcaaaaaatggaattttcgcagagtcacagggtagagatgataagcatggcagttgctcttgttgccattgttggtggcaccgcttactattactacgtcaccaagaagccaaaagggtgcttggatcctgagaacttcaaagaatttaaacttgttaaacgcactcaactcagccataatgttgccacgttccgatttgatcttcctactcctaagtcagtgttgggacttcctattggacaacatatcagctgcagagggaaggatagtcttggtgaagaagttgtgaaaccatatactcctacaacattggatactgatgttggatactttgaattggttgtgaagatgtatccacaaggacggatgtctcatcactttagggagatacgtgaaggtgattacatggctgtgaagggaccaaagggacgttttaagtaccagcccaaccaagtaagagctttgggtatgattgctggtggcactggcatcaccccaatgtttcaagttacaagagctatattagaaaaccaacaggacaaaaccaacataaatttgatatatgccaatgtcacatttgatgacattcttttgaaggaagagctggatgcctttgccattaagttccctaatcaattcaaagtttactatgttctaaatcagccaccagaaatatggggacggtggtgttggattcgtcactaaggaaatgatccaaacagatttccctgcaccagcatcagatattaagatattaaggtgtggaccacctcccatgaacaaggctatggctgctaatcttgaagctcttggatacagtccccaaatgcagtttcagttttatagtcttgaataaagctcatctatattaaattttttaaaatacacacagcattcgagtccgatatcaatgtttggacatttgttggtattctctttctagatttgacagaataagcgcgcctgtgttacactctaggttagacattttacattgtagtgatgttcaggtttatggaaagttttgatggcgtatgctgtaacattgcaggctgtttc

SEQ ID NO: 7284 - protein, 232 aa, Glycine max
  peptide (1)..(232): Ceres Seq. ID no. 15223184
  misc_feature (46)..(145): Pfam Name: Pfam Description:  Oxidoreductase FAD-binding domain
  misc_feature (1)..(224): NCBI GI NO: 17221690 NR Description: cytochrome b5 reductase isoform II [Zea mays]
  misc_feature (2)..(224): NCBI GI NO: 15238025 NR Description: NADH-cytochrome b5 reductase
  misc_feature (1)..(224): NCBI GI NO: 4336205 NR Description: cytochrome b5 reductase [Zea mays]
  misc_feature (115)..(224): NCBI GI NO: 16648905 NR Description: NADH-cytochrome b5 reductase
  misc_feature (10)..(224): NCBI GI NO: 40739560 NR Description: hypothetical protein AN6366.2
  misc_feature (39)..(224): NCBI GI NO: 6070342 NR Description: NADH-cytochrome b5 reductase [Mortierella alpina]
  misc_feature (36)..(224): NCBI GI NO: 29126014 NR Description: putative NADH cytb-reductase [Gibberella zeae]
  misc_feature (36)..(224): NCBI GI NO: 28202143 NR Description: reductase [Gibberella zeae]
  misc_feature (36)..(224): NCBI GI NO: 27924030 NR Description: reductase [Fusarium sporotrichioides]
  misc_feature (42)..(224): NCBI GI NO: 19075352 NR Description: putative nadh-cytochrome b5 reductase
MEFSQSHRVEMISMAVALVAIVGGTAYYYYVTKKPKGCLDPENFKEFKLVKRTQLSHNVATFRFDLPTPKSVLGLPIGQHISCRGKDSLGEEVVKPYTPTTLDTDVGYFELVVKMYPQGRMSHHFREIREGDYMAVKGPKGRFKYQPNQVRALGMIAGGTGITPMFQVTRAILENQQDKTNINLIYANVTFDDILLKEELDAFAIKFPNQFKVYYVLNQPPEIWGRWCWIRH

SEQ ID NO: 7285 - protein, 222 aa, Glycine max
  peptide (1)..(222): Ceres Seq. ID no. 15223185
  misc_feature (36)..(135): Pfam Name: Pfam Description:  Oxidoreductase FAD-binding domain
  misc_feature (1)..(214): NCBI GI NO: 17221690 NR Description: cytochrome b5 reductase isoform II [Zea mays]
  misc_feature (1)..(214): NCBI GI NO: 15238025 NR Description: NADH-cytochrome b5 reductase
  misc_feature (1)..(214): NCBI GI NO: 4336205 NR Description: cytochrome b5 reductase [Zea mays]
  misc_feature (105)..(214): NCBI GI NO: 16648905 NR Description: NADH-cytochrome b5 reductase
  misc_feature (1)..(214): NCBI GI NO: 40739560 NR Description: hypothetical protein AN6366.2
  misc_feature (29)..(214): NCBI GI NO: 6070342 NR Description: NADH-cytochrome b5 reductase [Mortierella alpina]
  misc_feature (26)..(214): NCBI GI NO: 29126014 NR Description: putative NADH cytb-reductase [Gibberella zeae]
  misc_feature (26)..(214): NCBI GI NO: 28202143 NR Description: reductase [Gibberella zeae]
  misc_feature (26)..(214): NCBI GI NO: 27924030 NR Description: reductase [Fusarium sporotrichioides]
  misc_feature (32)..(214): NCBI GI NO: 19075352 NR Description: putative nadh-cytochrome b5 reductase
MISMAVALVAIVGGTAYYYYVTKKPKGCLDPENFKEFKLVKRTQLSHNVATFRFDLPTPKSVLGLPIGQHISCRGKDSLGEEVVKPYTPTTLDTDVGYFELVVKMYPQGRMSHHFREIREGDYMAVKGPKGRFKYQPNQVRALGMIAGGTGITPMFQVTRAILENQQDKTNINLIYANVTFDDILLKEELDAFAIKFPNQFKVYYVLNQPPEIWGRWCWIRH

SEQ ID NO: 7286 - protein, 219 aa, Glycine max
  peptide (1)..(219): Ceres Seq. ID no. 15223186
  misc_feature (33)..(132): Pfam Name: Pfam Description:  Oxidoreductase FAD-binding domain
  misc_feature (1)..(211): NCBI GI NO: 17221690 NR Description: cytochrome b5 reductase isoform II [Zea mays]
  misc_feature (1)..(211): NCBI GI NO: 15238025 NR Description: NADH-cytochrome b5 reductase
  misc_feature (1)..(211): NCBI GI NO: 4336205 NR Description: cytochrome b5 reductase [Zea mays]
  misc_feature (102)..(211): NCBI GI NO: 16648905 NR Description: NADH-cytochrome b5 reductase
  misc_feature (1)..(211): NCBI GI NO: 40739560 NR Description: hypothetical protein AN6366.2
  misc_feature (26)..(211): NCBI GI NO: 6070342 NR Description: NADH-cytochrome b5 reductase [Mortierella alpina]
  misc_feature (23)..(211): NCBI GI NO: 29126014 NR Description: putative NADH cytb-reductase [Gibberella zeae]
  misc_feature (23)..(211): NCBI GI NO: 28202143 NR Description: reductase [Gibberella zeae]
  misc_feature (23)..(211): NCBI GI NO: 27924030 NR Description: reductase [Fusarium sporotrichioides]
  misc_feature (29)..(211): NCBI GI NO: 19075352 NR Description: putative nadh-cytochrome b5 reductase
MAVALVAIVGGTAYYYYVTKKPKGCLDPENFKEFKLVKRTQLSHNVATFRFDLPTPKSVLGLPIGQHISCRGKDSLGEEVVKPYTPTTLDTDVGYFELVVKMYPQGRMSHHFREIREGDYMAVKGPKGRFKYQPNQVRALGMIAGGTGITPMFQVTRAILENQQDKTNINLIYANVTFDDILLKEELDAFAIKFPNQFKVYYVLNQPPEIWGRWCWIRH

SEQ ID NO: 7287 - DNA, 1343 bp, Glycine max
  misc_feature (1)..(1343): Ceres Seq. ID no. 13582564
  misc_feature (84)..(84): n is a, c, t, g, unknown, or other
gccgagcgtcgttctatctatttttttctctgcctgctgcacacacactgagactgagagaaagagaaccaactactacagtcnacagaaaaccaaaaaaacactgtgtgtgtgtgtttgtgtgtcaaaaaaaaaaaccctaagctaatgatgatggatccgcgacagcgagagaagctacttcacaaaaccgaggcctgtgctttcgtggcaggtgttgttccggagctttcccttgtcaccgttccagggaacaacaacaacaccaacaacgttaacaacaacaacaacaacgtttctcattctcaatctcaccggtcgggtcggatccatgaaaaccaccaccaccaccttggtctcgtggctgctgtcaccaccaccttcggaactgttcacaggaagaaaaggatggccagacaaagaagatccactaaccccactttgttgatgaaccctctcatcaacaacaacaacaacaagtctggttcttctcttccttctccaagtattgcttcctcctcgcacgtgccactctcctcctcaactctcccgcccgcacgtgaaatcgatcaaagaaggttgagattccttttccagaaggagttaaagaacagtgatgttagctcccttaggagaatgatattgccaaagaaagcagcagaggctttccttccagctcttgaatccaaagaaggaattgtaatcagcatggatgatatagatggtcttcatgtatggagtttcaagtacaggttttggcctaacaataacagtcggatgtatgtacttgaaaatactggagactttgtcaacacacatggccttcgctttggagattccattttggtttaccaagatagtgaaaacaacaattatgttattcaggcgaaaaaggcttctgatcaggatgaatttatggaagaaactagtgataccatcaatgatatcttccttaatgattatgaagtgaacaaacctggttgcttcaatgtaacctatcctgcagtgaatgatacaggcatgtcattcatatatgagactaccttctcaaatgactcccctcttgattttttgggtggatcaatgaccaatttttcaaggattggaccagttgaaacctttggctctgttgagaatttgtcacttgatgacttctattaaaggcatcaaatcacaaaggaagcattaacatggtaccaagactagcactattaagtgtgtgcttctttattttggtactaaagaaacatataaagtgtgctttgttgttgtcgtggtcatgaccatgagagaatttgtgtagaataaaagagtagccatgccaatgggcatgtttcctgtcc

SEQ ID NO: 7288 - protein, 337 aa, Glycine max
  peptide (1)..(337): Ceres Seq. ID no. 13582565
  misc_feature (148)..(253): Pfam Name: Pfam Description:  B3 DNA binding domain
  misc_feature (115)..(270): NCBI GI NO: 3582520 NR Description: FUSCA3 [Arabidopsis thaliana]
  misc_feature (115)..(270): NCBI GI NO: 18405094 NR Description: transcriptional regulator (FUSCA3)
  misc_feature (128)..(270): NCBI GI NO: 3582518 NR Description: FUSCA3 [Arabidopsis thaliana]
  misc_feature (115)..(270): NCBI GI NO: 9279669 NR Description: FUSCA3 [Arabidopsis thaliana]
  misc_feature (47)..(254): NCBI GI NO: 10764150 NR Description: transcription factor viviparous 1 [Picea abies]
  misc_feature (77)..(261): NCBI GI NO: 15987516 NR Description: LEAFY COTYLEDON 2 [Arabidopsis thaliana]
  misc_feature (77)..(261): NCBI GI NO: 18396728 NR Description: transcriptional factor B3 protein leafy cotyledon 2
  misc_feature (77)..(261): NCBI GI NO: 25518439 NR Description: hypothetical protein F3H9.5 - Arabidopsis thaliana
  misc_feature (36)..(249): NCBI GI NO: 15230140 NR Description: abscisic acid-insensitive protein 3 (ABI3)
  misc_feature (99)..(291): NCBI GI NO: 586238 NR Description: Viviparous protein homolog
MMMDPRQREKLLHKTEACAFVAGVVPELSLVTVPGNNNNTNNVNNNNNNVSHSQSHRSGRIHENHHHHLGLVAAVTTTFGTVHRKKRMARQRRSTNPTLLMNPLINNNNNKSGSSLPSPSIASSSHVPLSSSTLPPAREIDQRRLRFLFQKELKNSDVSSLRRMILPKKAAEAFLPALESKEGIVISMDDIDGLHVWSFKYRFWPNNNSRMYVLENTGDFVNTHGLRFGDSILVYQDSENNNYVIQAKKASDQDEFMEETSDTINDIFLNDYEVNKPGCFNVTYPAVNDTGMSFIYETTFSNDSPLDFLGGSMTNFSRIGPVETFGSVENLSLDDFY

SEQ ID NO: 7289 - protein, 336 aa, Glycine max
  peptide (1)..(336): Ceres Seq. ID no. 13582566
  misc_feature (147)..(252): Pfam Name: Pfam Description:  B3 DNA binding domain
  misc_feature (114)..(269): NCBI GI NO: 3582520 NR Description: FUSCA3 [Arabidopsis thaliana]
  misc_feature (114)..(269): NCBI GI NO: 18405094 NR Description: transcriptional regulator (FUSCA3)
  misc_feature (127)..(269): NCBI GI NO: 3582518 NR Description: FUSCA3 [Arabidopsis thaliana]
  misc_feature (114)..(269): NCBI GI NO: 9279669 NR Description: FUSCA3 [Arabidopsis thaliana]
  misc_feature (46)..(253): NCBI GI NO: 10764150 NR Description: transcription factor viviparous 1 [Picea abies]
  misc_feature (76)..(260): NCBI GI NO: 15987516 NR Description: LEAFY COTYLEDON 2 [Arabidopsis thaliana]
  misc_feature (76)..(260): NCBI GI NO: 18396728 NR Description: transcriptional factor B3 protein leafy cotyledon 2
  misc_feature (76)..(260): NCBI GI NO: 25518439 NR Description: hypothetical protein F3H9.5 - Arabidopsis thaliana
  misc_feature (35)..(248): NCBI GI NO: 15230140 NR Description: abscisic acid-insensitive protein 3 (ABI3)
  misc_feature (98)..(290): NCBI GI NO: 586238 NR Description: Viviparous protein homolog
MMDPRQREKLLHKTEACAFVAGVVPELSLVTVPGNNNNTNNVNNNNNNVSHSQSHRSGRIHENHHHHLGLVAAVTTTFGTVHRKKRMARQRRSTNPTLLMNPLINNNNNKSGSSLPSPSIASSSHVPLSSSTLPPAREIDQRRLRFLFQKELKNSDVSSLRRMILPKKAAEAFLPALESKEGIVISMDDIDGLHVWSFKYRFWPNNNSRMYVLENTGDFVNTHGLRFGDSILVYQDSENNNYVIQAKKASDQDEFMEETSDTINDIFLNDYEVNKPGCFNVTYPAVNDTGMSFIYETTFSNDSPLDFLGGSMTNFSRIGPVETFGSVENLSLDDFY

SEQ ID NO: 7290 - protein, 335 aa, Glycine max
  peptide (1)..(335): Ceres Seq. ID no. 13582567
  misc_feature (146)..(251): Pfam Name: Pfam Description:  B3 DNA binding domain
  misc_feature (113)..(268): NCBI GI NO: 3582520 NR Description: FUSCA3 [Arabidopsis thaliana]
  misc_feature (113)..(268): NCBI GI NO: 18405094 NR Description: transcriptional regulator (FUSCA3)
  misc_feature (126)..(268): NCBI GI NO: 3582518 NR Description: FUSCA3 [Arabidopsis thaliana]
  misc_feature (113)..(268): NCBI GI NO: 9279669 NR Description: FUSCA3 [Arabidopsis thaliana]
  misc_feature (45)..(252): NCBI GI NO: 10764150 NR Description: transcription factor viviparous 1 [Picea abies]
  misc_feature (75)..(259): NCBI GI NO: 15987516 NR Description: LEAFY COTYLEDON 2 [Arabidopsis thaliana]
  misc_feature (75)..(259): NCBI GI NO: 18396728 NR Description: transcriptional factor B3 protein leafy cotyledon 2
  misc_feature (75)..(259): NCBI GI NO: 25518439 NR Description: hypothetical protein F3H9.5 - Arabidopsis thaliana
  misc_feature (34)..(247): NCBI GI NO: 15230140 NR Description: abscisic acid-insensitive protein 3 (ABI3)
  misc_feature (97)..(289): NCBI GI NO: 586238 NR Description: Viviparous protein homolog
MDPRQREKLLHKTEACAFVAGVVPELSLVTVPGNNNNTNNVNNNNNNVSHSQSHRSGRIHENHHHHLGLVAAVTTTFGTVHRKKRMARQRRSTNPTLLMNPLINNNNNKSGSSLPSPSIASSSHVPLSSSTLPPAREIDQRRLRFLFQKELKNSDVSSLRRMILPKKAAEAFLPALESKEGIVISMDDIDGLHVWSFKYRFWPNNNSRMYVLENTGDFVNTHGLRFGDSILVYQDSENNNYVIQAKKASDQDEFMEETSDTINDIFLNDYEVNKPGCFNVTYPAVNDTGMSFIYETTFSNDSPLDFLGGSMTNFSRIGPVETFGSVENLSLDDFY

SEQ ID NO: 7291 - DNA, 1301 bp, Glycine max
  misc_feature (1)..(1301): Ceres Seq. ID no. 12611435
tttttgagtctgggttttagttcaaaacaaaatgcatgggcagggcctgatcattggaagtatcgaaaatccaaagtctcagaggttcatcctacttctgaagatgggtcgaccctaaaaagtagacagccaaagagtaagagacaaactgaagttgatttaaatttcacaaattctcttgagaaaaaaatgctagatacattttctcctcccaagaatcccaaattgttactgcttcctgaaagcagattaccttgcaatacaaaacttcctgaggattgtcactatcagccagaagatcttgtcaagttatttcttctgtctaatgtaaagtgtctcgggaggaaggcaaacaggttctcagatggatctagagaacaatccgatgaatatgaatcattcccttcgtgggataatggaagtgtttgtggggatgacgctggtgactacggaggtgatcttcatggtgacatggaggacaccgacactcttgttactcagcctcgtcaggtcagtaaaattgaagtccagtatgacaagacttccaaacaagtcgatgttcatgcactaaaaattactctttgggaccatgttcaagaatctgttaaacttcctttagagggtcaaaaagataccttatctttcaggaatatattagccaactttcctagcgaatgcaatgctgctgcaacaattagtgacatctctcctcatctgtgcttcatatgtctattgcatttggcaaacgagaaaggattgagcattcaaaactcccctaatttggatgatcttgccatacggtttccacaagttgctgattctatgaggggaacagtttagattcctcttcactcaattattcttcagctcaggaatcaagaaacgatggggactgttttactagtgaaacacgtccaagaaagcattgaagtgagcaacaagtttgtggttggaggttgcaaatatcagtttgcttatggtggtttaacactcgttaaggaaatttcagacctataatggctccttgttattattctgtacatgaaagtatgcaacacatgtagtgctcaatttcattctccactgcagcccgttacatgaaagtattcaacacatgtagtacgagaatggctagtgttggtataaacaaaggcatagactgatggatgagcgactgattattgaatcgcacttacctatccctccattttctattaattgtcaaactgaaataatcaaatttatttgtaaataataataataataatagtagtagtagtagtaagttttatttatctgcc

SEQ ID NO: 7292 - protein, 279 aa, Glycine max
  peptide (1)..(279): Ceres Seq. ID no. 12611436
  misc_feature (1)..(266): Pfam Name: Pfam Description:  Barren protein
  misc_feature (1)..(266): NCBI GI NO: 15225709 NR Description: hypothetical protein; protein id: At2g32590.1
  misc_feature (1)..(269): NCBI GI NO: 34913488 NR Description: putative condensin complex subunit
  misc_feature (6)..(266): NCBI GI NO: 33417152 NR Description: Unknown (protein for MGC:69107) [Xenopus laevis]
FLSLGFSSKQNAWAGPDHWKYRKSKVSEVHPTSEDGSTLKSRQPKSKRQTEVDLNFTNSLEKKMLDTFSPPKNPKLLLLPESRLPCNTKLPEDCHYQPEDLVKLFLLSNVKCLGRKANRFSDGSREQSDEYESFPSWDNGSVCGDDAGDYGGDLHGDMEDTDTLVTQPRQVSKIEVQYDKTSKQVDVHALKITLWDHVQESVKLPLEGQKDTLSFRNILANFPSECNAAATISDISPHLCFICLLHLANEKGLSIQNSPNLDDLAIRFPQVADSMRGTV

SEQ ID NO: 7293 - protein, 216 aa, Glycine max
  peptide (1)..(216): Ceres Seq. ID no. 12611437
  misc_feature (1)..(203): Pfam Name: Pfam Description:  Barren protein
  misc_feature (1)..(203): NCBI GI NO: 15225709 NR Description: hypothetical protein; protein id: At2g32590.1
  misc_feature (1)..(206): NCBI GI NO: 34913488 NR Description: putative condensin complex subunit
  misc_feature (1)..(203): NCBI GI NO: 33417152 NR Description: Unknown (protein for MGC:69107) [Xenopus laevis]
MLDTFSPPKNPKLLLLPESRLPCNTKLPEDCHYQPEDLVKLFLLSNVKCLGRKANRFSDGSREQSDEYESFPSWDNGSVCGDDAGDYGGDLHGDMEDTDTLVTQPRQVSKIEVQYDKTSKQVDVHALKITLWDHVQESVKLPLEGQKDTLSFRNILANFPSECNAAATISDISPHLCFICLLHLANEKGLSIQNSPNLDDLAIRFPQVADSMRGTV

SEQ ID NO: 7294 - DNA, 863 bp, Glycine max
  misc_feature (1)..(863): Ceres Seq. ID no. 13595452
aaagaaacattctagagctccgctccactcccagtaatggcggcgacatggacttgttttgtaacttcgttgtgtatttcttcaccttcttataaaccatcgtcgttgcacggtctgtctttccggaggcaagcagtgaccagaacgaacagattttttaccaggatatatgcgctgtctagcaacgacatcaaagtcgggacaagcatagaagtcgatggtgctccgtggcgtgttctggagtttctgcatgtgaagccaggcaaaggtgctgcttttgtcagaaccaaaatcaggaactacgtcaatggtagcacagtcgagagaacctttcgtgctgggattactatagaagaggccaatgtctccaaggagactaagcaattcacttataaagacggctctcagtttgttttcatggacttgagcagttatgaggaaacacgtttaaacgaggctgatatgggcgacaagaccaaatggcttaaagagggaatggactgcaatttgctctactggaaggacaaggtcatcgattttgaacttcccattacagttcagcttaaaatagttgacgttgatcctggtctccgaggtgacactgcacaaggtggaactaaacctgccacactcgagactggtgcagttgtcaatgtacccctctttgtcaatgttggtgaagatattatggtggacacgagaaccggtacgtacatgagccgggtctgacacttcttccctattgctaacgactaaggaatgtgatatttaatgagcggttttgcttagactactctgattagttgagtgaacgcccagaattgctactattggtttccctaataatgattctgtattatttt

SEQ ID NO: 7295 - protein, 230 aa, Glycine max
  peptide (1)..(230): Ceres Seq. ID no. 13595453
  misc_feature (47)..(229): Pfam Name: EF-P Pfam Description: Elongation factor P
  misc_feature (6)..(229): NCBI GI NO: 18398225 NR Description: elongation factor P (EF-P) -related
  misc_feature (47)..(229): NCBI GI NO: 12322730 NR Description: putative elongation factor P (EF-P); 66839-65711
  misc_feature (47)..(229): NCBI GI NO: 2494275 NR Description: Elongation factor P (EF-P)
  misc_feature (47)..(229): NCBI GI NO: 22298837 NR Description: translation elongation factor EF-P
  misc_feature (47)..(229): NCBI GI NO: 23125000 NR Description: hypothetical protein [Nostoc punctiforme]
  misc_feature (47)..(229): NCBI GI NO: 23042812 NR Description: hypothetical protein
  misc_feature (47)..(229): NCBI GI NO: 33860586 NR Description: Elongation factor P (EF-P)
  misc_feature (47)..(229): NCBI GI NO: 16331453 NR Description: elongation factor P [Synechocystis sp. PCC 6803]
  misc_feature (47)..(229): NCBI GI NO: 37520854 NR Description: elongation factor P [Gloeobacter violaceus]
  misc_feature (47)..(229): NCBI GI NO: 33239478 NR Description: Translation elongation factor P
MAATWTCFVTSLCISSPSYKPSSLHGLSFRRQAVTRTNRFFTRIYALSSNDIKVGTSIEVDGAPWRVLEFLHVKPGKGAAFVRTKIRNYVNGSTVERTFRAGITIEEANVSKETKQFTYKDGSQFVFMDLSSYEETRLNEADMGDKTKWLKEGMDCNLLYWKDKVIDFELPITVQLKIVDVDPGLRGDTAQGGTKPATLETGAVVNVPLFVNVGEDIMVDTRTGTYMSRV

SEQ ID NO: 7296 - DNA, 1363 bp, Glycine max
  misc_feature (1)..(1363): Ceres Seq. ID no. 13595442
gtttccaaggttgctctgggaatccgaggttctaaactctgcaactaactttaatggcaactgggcaagtcattaataaacctccttcacttcctccgtaccctgaggtatattctaactctttttaatcttttttttttctagctactataattgatctaacattaccctatttatccactgatctaaatctagtccgatttaaaaataaatgttcaggtttatttatttatttatttttcactgttttgactataattgaacattttcatgcgaatttcataatcataaatatagacaaataagtgatgtgttaatttttttaccatagatatagaagggaaaaaaaggtcgattctaccattctacttttatgaaattattattaagtgatgggttaattttttttaaaggaaataattatgaagactgagttaaggtgtgtaatttatctatagatgattcgggaggcaattgaagcactgaatgaagagaatggttcgaataaatcatcaatttcgaagtacatcgaatccacctatggtggattgcctcaggcccacaaggttttgctcaatgtgcacctcgcgaaaatgagggaaagtggagtgctagtgttttggaagaacaactacaccaagcgtgacccaaatgcgccgccacggcggggccgtggcaggccacccaagcccaaggagcctctgccaccgggcactgtcttatcaccgcccaggcccaggggccgtccttcgaaggacccaaatgacctgcagaagcctcttaaggcttcggtggtgggtagtggtaggcctcgaggccggcccagaaaaatggcctggcccactggaggccttggtgaagtatcgcaggcctctaaggcgaagcctgtcactagtaatgggaggcctagaggtaggcctcccaaagtgaaggccgtattcactgaaattagtgtttgactataaaggcttatagggcttgcatggaatagggaagtgttgtttctacaaaaagttggactgagtaacggttttgtgtgtttactagattcttctcttatgtgttacacttagctgaaatgctgaattgttgtgtacaatcgtgtagtgtagtgtagtgtagttagttgctgaggctttgttcgtttgtaaattgtaactgtgaaaataggacaatgggtggagctaatggacgcaatctctcaaattcttgatgtgaagagtctgtgtgttatgcaccaaattgattggaggcaaagtctttaaaaaaaaaaaaaaaaaaaaaaaaaaaaaaaccagaaaaaaaaaaaaaaaaaagcttatcgataccgtcccggacctcgaggggggggccccggtaccca

SEQ ID NO: 7297 - protein, 166 aa, Glycine max
  peptide (1)..(166): Ceres Seq. ID no. 15221580
  misc_feature (1)..(63): Pfam Name: Pfam Description:  linker histone H1 and H5 family
  misc_feature (1)..(166): NCBI GI NO: 7439663 NR Description: high mobility group protein HMGI/Y-1 - sword bean
  misc_feature (1)..(166): NCBI GI NO: 7439645 NR Description: high mobility group protein HMGI/Y-2 - sword bean
  misc_feature (1)..(166): NCBI GI NO: 1708261 NR Description: HMG-Y related protein A (SB16A protein)
  misc_feature (8)..(166): NCBI GI NO: 1708262 NR Description: HMG-Y related protein B (SB16B protein)
  misc_feature (1)..(166): NCBI GI NO: 2129885 NR Description: HMGI/Y protein - garden pea
  misc_feature (1)..(163): NCBI GI NO: 4585621 NR Description: HMGI/Y protein [Zea mays]
  misc_feature (1)..(163): NCBI GI NO: 9837562 NR Description: high mobility group I/Y-2 [Zea mays]
  misc_feature (1)..(163): NCBI GI NO: 11544762 NR Description: HMGI/Y protein [Zea mays]
  misc_feature (1)..(158): NCBI GI NO: 1808590 NR Description: HMG-I/Y [Arabidopsis thaliana]
  misc_feature (1)..(158): NCBI GI NO: 15223947 NR Description: linker histone protein -related
MIREAIEALNEENGSNKSSISKYIESTYGGLPQAHKVLLNVHLAKMRESGVLVFWKNNYTKRDPNAPPRRGRGRPPKPKEPLPPGTVLSPPRPRGRPSKDPNDLQKPLKASVVGSGRPRGRPRKMAWPTGGLGEVSQASKAKPVTSNGRPRGRPPKVKAVFTEISV

SEQ ID NO: 7298 - protein, 121 aa, Glycine max
  peptide (1)..(121): Ceres Seq. ID no. 15221581
  misc_feature (1)..(121): NCBI GI NO: 7439663 NR Description: high mobility group protein HMGI/Y-1 - sword bean
  misc_feature (1)..(121): NCBI GI NO: 7439645 NR Description: high mobility group protein HMGI/Y-2 - sword bean
  misc_feature (1)..(121): NCBI GI NO: 1708261 NR Description: HMG-Y related protein A (SB16A protein)
  misc_feature (1)..(121): NCBI GI NO: 1708262 NR Description: HMG-Y related protein B (SB16B protein)
  misc_feature (1)..(121): NCBI GI NO: 2129885 NR Description: HMGI/Y protein - garden pea
  misc_feature (1)..(118): NCBI GI NO: 4585621 NR Description: HMGI/Y protein [Zea mays]
  misc_feature (1)..(118): NCBI GI NO: 9837562 NR Description: high mobility group I/Y-2 [Zea mays]
  misc_feature (1)..(118): NCBI GI NO: 11544762 NR Description: HMGI/Y protein [Zea mays]
  misc_feature (1)..(113): NCBI GI NO: 1808590 NR Description: HMG-I/Y [Arabidopsis thaliana]
  misc_feature (1)..(113): NCBI GI NO: 15223947 NR Description: linker histone protein -related
MRESGVLVFWKNNYTKRDPNAPPRRGRGRPPKPKEPLPPGTVLSPPRPRGRPSKDPNDLQKPLKASVVGSGRPRGRPRKMAWPTGGLGEVSQASKAKPVTSNGRPRGRPPKVKAVFTEISV

SEQ ID NO: 7299 - protein, 92 aa, Glycine max
  peptide (1)..(92): Ceres Seq. ID no. 15221582
MRRHGGAVAGHPSPRSLCHRALSYHRPGPGAVLRRTQMTCRSLLRLRWWVVVGLEAGPEKWPGPLEALVKYRRPLRRSLSLVMGGLEVGLPK

SEQ ID NO: 7300 - DNA, 901 bp, Glycine max
  misc_feature (1)..(901): Ceres Seq. ID no. 14304209
aaccacacactgccttgttcatctcgaacataaatcaagagcatatcattctttgtgagctttattgatctaaaccaatggcgaactcgacgattcttcttgattactggccaagcatgttctgtatgagggctagagtcgcgttgagggagaaaggtgttgtgttcgaggccagagaagaggatctcacgaacaagagccctttgctcctccagagtaatccgattcacaagaaggtcccggttctgatccacaacggtaaaccggtttgcgagtccctcaatgttgtccagtacgtggacgaggcttggtctgacaagaacccattcttcccttctgatccttacgggaaagctcaggctaggttttgggctgatttcgtggacaagaagtttagtgatgcccaattcaagatatggggaaagaaaggtgaggaacaagcagcaggggtgaaggagtttattgaggcagtgaagattcttgaagctgagcttggagacaaaccttactttggtggagatagctttggatatgtagacattgcactgattacattctacagttggttcggagcatacgagaagtttggtaacttcagcatcgaggcagagagtccaaaactgattgcttgggctaagaggtgtatggagaaagagagtgtgtctaagtctctccctgaccaagagaaaattgttgcgtacgccgctgagtttaggaagaataatctctgatctgaataaaaccttgtttgtgccttctgtttcggatgatgctgtagtctgtttttaactgtggtttttgtgtgtttcctaataatgcgtgagggcaagcgtcggcctttgtgtggtggtgttgtatggatcctgagtaatgcatttttaaataaaatatattttcaaat

SEQ ID NO: 7301 - protein, 217 aa, Glycine max
  peptide (1)..(217): Ceres Seq. ID no. 14304210
  misc_feature (85)..(193): Pfam Name: Pfam Description:  Glutathione S-transferase, C-terminal domain
  misc_feature (1)..(217): NCBI GI NO: 15218311 NR Description: glutathione transferase, putative
  misc_feature (1)..(217): NCBI GI NO: 21592638 NR Description: 2
  misc_feature (1)..(214): NCBI GI NO: 18411929 NR Description: glutathione transferase, putative
  misc_feature (1)..(214): NCBI GI NO: 21592644 NR Description: glutathione transferase, putative
  misc_feature (1)..(214): NCBI GI NO: 8052534 NR Description: F3F9.11 [Arabidopsis thaliana]
  misc_feature (1)..(214): NCBI GI NO: 15220041 NR Description: glutathione transferase, putative
  misc_feature (1)..(168): NCBI GI NO: 8052534 NR Description: F3F9.11 [Arabidopsis thaliana]
  misc_feature (1)..(214): NCBI GI NO: 7447307 NR Description: glutathione transferase (EC 2.5.1.18) - papaya
  misc_feature (1)..(214): NCBI GI NO: 8052535 NR Description: F3F9.13 [Arabidopsis thaliana]
  misc_feature (1)..(214): NCBI GI NO: 15218304 NR Description: glutathione transferase, putative
MANSTILLDYWPSMFCMRARVALREKGVVFEAREEDLTNKSPLLLQSNPIHKKVPVLIHNGKPVCESLNVVQYVDEAWSDKNPFFPSDPYGKAQARFWADFVDKKFSDAQFKIWGKKGEEQAAGVKEFIEAVKILEAELGDKPYFGGDSFGYVDIALITFYSWFGAYEKFGNFSIEAESPKLIAWAKRCMEKESVSKSLPDQEKIVAYAAEFRKNNL

SEQ ID NO: 7302 - protein, 204 aa, Glycine max
  peptide (1)..(204): Ceres Seq. ID no. 14304211
  misc_feature (72)..(180): Pfam Name: Pfam Description:  Glutathione S-transferase, C-terminal domain
  misc_feature (1)..(204): NCBI GI NO: 15218311 NR Description: glutathione transferase, putative
  misc_feature (1)..(204): NCBI GI NO: 21592638 NR Description: 2
  misc_feature (1)..(201): NCBI GI NO: 18411929 NR Description: glutathione transferase, putative
  misc_feature (1)..(201): NCBI GI NO: 21592644 NR Description: glutathione transferase, putative
  misc_feature (1)..(201): NCBI GI NO: 8052534 NR Description: F3F9.11 [Arabidopsis thaliana]
  misc_feature (1)..(201): NCBI GI NO: 15220041 NR Description: glutathione transferase, putative
  misc_feature (1)..(155): NCBI GI NO: 8052534 NR Description: F3F9.11 [Arabidopsis thaliana]
  misc_feature (1)..(201): NCBI GI NO: 7447307 NR Description: glutathione transferase (EC 2.5.1.18) - papaya
  misc_feature (1)..(201): NCBI GI NO: 8052535 NR Description: F3F9.13 [Arabidopsis thaliana]
  misc_feature (1)..(201): NCBI GI NO: 15218304 NR Description: glutathione transferase, putative
MFCMRARVALREKGVVFEAREEDLTNKSPLLLQSNPIHKKVPVLIHNGKPVCESLNVVQYVDEAWSDKNPFFPSDPYGKAQARFWADFVDKKFSDAQFKIWGKKGEEQAAGVKEFIEAVKILEAELGDKPYFGGDSFGYVDIALITFYSWFGAYEKFGNFSIEAESPKLIAWAKRCMEKESVSKSLPDQEKIVAYAAEFRKNNL

SEQ ID NO: 7303 - protein, 201 aa, Glycine max
  peptide (1)..(201): Ceres Seq. ID no. 14304212
  misc_feature (69)..(177): Pfam Name: Pfam Description:  Glutathione S-transferase, C-terminal domain
  misc_feature (1)..(201): NCBI GI NO: 15218311 NR Description: glutathione transferase, putative
  misc_feature (1)..(201): NCBI GI NO: 21592638 NR Description: 2
  misc_feature (1)..(198): NCBI GI NO: 18411929 NR Description: glutathione transferase, putative
  misc_feature (1)..(198): NCBI GI NO: 21592644 NR Description: glutathione transferase, putative
  misc_feature (1)..(198): NCBI GI NO: 8052534 NR Description: F3F9.11 [Arabidopsis thaliana]
  misc_feature (1)..(198): NCBI GI NO: 15220041 NR Description: glutathione transferase, putative
  misc_feature (1)..(152): NCBI GI NO: 8052534 NR Description: F3F9.11 [Arabidopsis thaliana]
  misc_feature (1)..(198): NCBI GI NO: 7447307 NR Description: glutathione transferase (EC 2.5.1.18) - papaya
  misc_feature (1)..(198): NCBI GI NO: 8052535 NR Description: F3F9.13 [Arabidopsis thaliana]
  misc_feature (1)..(198): NCBI GI NO: 15218304 NR Description: glutathione transferase, putative
MRARVALREKGVVFEAREEDLTNKSPLLLQSNPIHKKVPVLIHNGKPVCESLNVVQYVDEAWSDKNPFFPSDPYGKAQARFWADFVDKKFSDAQFKIWGKKGEEQAAGVKEFIEAVKILEAELGDKPYFGGDSFGYVDIALITFYSWFGAYEKFGNFSIEAESPKLIAWAKRCMEKESVSKSLPDQEKIVAYAAEFRKNNL

SEQ ID NO: 7304 - DNA, 1598 bp, Glycine max
  misc_feature (1)..(1598): Ceres Seq. ID no. 15174875
acacttgtttctctctcttcaatggccgagccccactccaccgccgcgattcttcctccctccaccgcccggttggaggaaactccgtccgggagctctcagactcccctccgctccggaagaggcggctggagtattgtcgatggctccttcgccattgttagggacaatacctgctcctgcttcgtcgtcgtcttcagcttgtggttcttcgtgtcgatgactatgatactgggggtttatgggtccatgaccatcgtgctgggtccaaaatcttcaattgttttccaacctagtcccgtgttcgttcaatctgtgaaggtagaaaacttaaaggcaaaccctggcccaggacccattctttatgggacatatcggtatcccccacttgatgttgttaccacttggggagaaagtattaatgtttctcttccctctggctcatacaaggaatggaaatattatctgaattgtgggtcttcaataaatatttcgtatcacgtgagctctaagagctcttctgttttccttataatcgccgaaggggacgtgagcctcacacggtggctggaggacccaacagaacctaatacaactctgtcatggaatgtgatccatggaactggtatgatcacacaggacatattctggtcgtcgagctattatgtggcattgggcaatttggatgaggatgtggaggtagcattaaacctcagtataagggcctccttgcataatacaacgaatgctttctacaaatgtgatcttgccaatggtccatgcagtttgaatcttttgttttctgatggaagtgcagctgtcttagttactcctggtccacaacagaatgcatccaatgagtggtatgtcaaactgtcctatggaccaagatgggtgacctatatttttggaattggtggattgactttgcttgtgtttggggccttcaacttcttgaacaagcttcagtgtgctcatgaagatagagcaggagttagatctgagggaacagaacgtcagagagcccctttgcttcctcacaaagatgatgatctttcaagttggggttcatcgtatgagtccttgccacaagatgagaaggatcttggctttcttccaggaggccccattgatgggaagactttagttgatggtgaaaccagtaataacacacggcatctttgtgctatttgctttgatgctccgagggactgcttcttccttccatgtggacactgtgtggcttgctttgcttgtggaactaggatagccgaggcagctggtacttgccctgtttgtcgtaggaacatgaagaaggttaggaagattttcactgtttgatcagtgcacttcctagtgtagagattaaatgagtagtcaccagaatcatagaataccttttatgtactcaactatacattattttcttgccaatcattaacaatgatcaagcaaatggtgtctgctgatgagggtcgtattggccattgcagcattgcctactgtaatagtgactagatgaatagccaccggaatcatagattactttttatgtattcaactacacattattttcttgccaatcaacaacaataatc

SEQ ID NO: 7305 - protein, 446 aa, Glycine max
  peptide (1)..(446): Ceres Seq. ID no. 15174876
  misc_feature (395)..(433): Pfam Name: RING finger Pfam Description: Zinc finger, C3HC4 type
  misc_feature (60)..(446): NCBI GI NO: 30679266 NR Description: expressed protein [Arabidopsis thaliana]
  misc_feature (108)..(446): NCBI GI NO: 11357966 NR Description: hypothetical protein T10O8
  misc_feature (60)..(236): NCBI GI NO: 29648951 NR Description: hypothetical protein [Arabidopsis thaliana]
  misc_feature (315)..(446): NCBI GI NO: 15224462 NR Description: zinc finger
  misc_feature (190)..(324): NCBI GI NO: 15224464 NR Description: hypothetical protein [Arabidopsis thaliana]
  misc_feature (384)..(445): NCBI GI NO: 29648940 NR Description: hypothetical protein [Arabidopsis thaliana]
  misc_feature (60)..(203): NCBI GI NO: 15224468 NR Description: hypothetical protein [Arabidopsis thaliana]
  misc_feature (54)..(150): NCBI GI NO: 18404666 NR Description: expressed protein [Arabidopsis thaliana]
  misc_feature (207)..(316): NCBI GI NO: 15224468 NR Description: hypothetical protein [Arabidopsis thaliana]
  misc_feature (232)..(398): NCBI GI NO: 29648940 NR Description: hypothetical protein [Arabidopsis thaliana]
TLVSLSSMAEPHSTAAILPPSTARLEETPSGSSQTPLRSGRGGWSIVDGSFAIVRDNTCSCFVVVFSLWFFVSMTMILGVYGSMTIVLGPKSSIVFQPSPVFVQSVKVENLKANPGPGPILYGTYRYPPLDVVTTWGESINVSLPSGSYKEWKYYLNCGSSINISYHVSSKSSSVFLIIAEGDVSLTRWLEDPTEPNTTLSWNVIHGTGMITQDIFWSSSYYVALGNLDEDVEVALNLSIRASLHNTTNAFYKCDLANGPCSLNLLFSDGSAAVLVTPGPQQNASNEWYVKLSYGPRWVTYIFGIGGLTLLVFGAFNFLNKLQCAHEDRAGVRSEGTERQRAPLLPHKDDDLSSWGSSYESLPQDEKDLGFLPGGPIDGKTLVDGETSNNTRHLCAICFDAPRDCFFLPCGHCVACFACGTRIAEAAGTCPVCRRNMKKVRKIFTV

SEQ ID NO: 7306 - protein, 439 aa, Glycine max
  peptide (1)..(439): Ceres Seq. ID no. 15174877
  misc_feature (388)..(426): Pfam Name: RING finger Pfam Description: Zinc finger, C3HC4 type
  misc_feature (53)..(439): NCBI GI NO: 30679266 NR Description: expressed protein [Arabidopsis thaliana]
  misc_feature (101)..(439): NCBI GI NO: 11357966 NR Description: hypothetical protein T10O8
  misc_feature (53)..(229): NCBI GI NO: 29648951 NR Description: hypothetical protein [Arabidopsis thaliana]
  misc_feature (308)..(439): NCBI GI NO: 15224462 NR Description: zinc finger
  misc_feature (183)..(317): NCBI GI NO: 15224464 NR Description: hypothetical protein [Arabidopsis thaliana]
  misc_feature (377)..(438): NCBI GI NO: 29648940 NR Description: hypothetical protein [Arabidopsis thaliana]
  misc_feature (53)..(196): NCBI GI NO: 15224468 NR Description: hypothetical protein [Arabidopsis thaliana]
  misc_feature (47)..(143): NCBI GI NO: 18404666 NR Description: expressed protein [Arabidopsis thaliana]
  misc_feature (200)..(309): NCBI GI NO: 15224468 NR Description: hypothetical protein [Arabidopsis thaliana]
  misc_feature (225)..(391): NCBI GI NO: 29648940 NR Description: hypothetical protein [Arabidopsis thaliana]
MAEPHSTAAILPPSTARLEETPSGSSQTPLRSGRGGWSIVDGSFAIVRDNTCSCFVVVFSLWFFVSMTMILGVYGSMTIVLGPKSSIVFQPSPVFVQSVKVENLKANPGPGPILYGTYRYPPLDVVTTWGESINVSLPSGSYKEWKYYLNCGSSINISYHVSSKSSSVFLIIAEGDVSLTRWLEDPTEPNTTLSWNVIHGTGMITQDIFWSSSYYVALGNLDEDVEVALNLSIRASLHNTTNAFYKCDLANGPCSLNLLFSDGSAAVLVTPGPQQNASNEWYVKLSYGPRWVTYIFGIGGLTLLVFGAFNFLNKLQCAHEDRAGVRSEGTERQRAPLLPHKDDDLSSWGSSYESLPQDEKDLGFLPGGPIDGKTLVDGETSNNTRHLCAICFDAPRDCFFLPCGHCVACFACGTRIAEAAGTCPVCRRNMKKVRKIFTV

SEQ ID NO: 7307 - protein, 373 aa, Glycine max
  peptide (1)..(373): Ceres Seq. ID no. 15174878
  misc_feature (322)..(360): Pfam Name: RING finger Pfam Description: Zinc finger, C3HC4 type
  misc_feature (1)..(373): NCBI GI NO: 30679266 NR Description: expressed protein [Arabidopsis thaliana]
  misc_feature (35)..(373): NCBI GI NO: 11357966 NR Description: hypothetical protein T10O8
  misc_feature (1)..(163): NCBI GI NO: 29648951 NR Description: hypothetical protein [Arabidopsis thaliana]
  misc_feature (242)..(373): NCBI GI NO: 15224462 NR Description: zinc finger
  misc_feature (117)..(251): NCBI GI NO: 15224464 NR Description: hypothetical protein [Arabidopsis thaliana]
  misc_feature (311)..(372): NCBI GI NO: 29648940 NR Description: hypothetical protein [Arabidopsis thaliana]
  misc_feature (1)..(130): NCBI GI NO: 15224468 NR Description: hypothetical protein [Arabidopsis thaliana]
  misc_feature (1)..(77): NCBI GI NO: 18404666 NR Description: expressed protein [Arabidopsis thaliana]
  misc_feature (134)..(243): NCBI GI NO: 15224468 NR Description: hypothetical protein [Arabidopsis thaliana]
  misc_feature (159)..(325): NCBI GI NO: 29648940 NR Description: hypothetical protein [Arabidopsis thaliana]
MTMILGVYGSMTIVLGPKSSIVFQPSPVFVQSVKVENLKANPGPGPILYGTYRYPPLDVVTTWGESINVSLPSGSYKEWKYYLNCGSSINISYHVSSKSSSVFLIIAEGDVSLTRWLEDPTEPNTTLSWNVIHGTGMITQDIFWSSSYYVALGNLDEDVEVALNLSIRASLHNTTNAFYKCDLANGPCSLNLLFSDGSAAVLVTPGPQQNASNEWYVKLSYGPRWVTYIFGIGGLTLLVFGAFNFLNKLQCAHEDRAGVRSEGTERQRAPLLPHKDDDLSSWGSSYESLPQDEKDLGFLPGGPIDGKTLVDGETSNNTRHLCAICFDAPRDCFFLPCGHCVACFACGTRIAEAAGTCPVCRRNMKKVRKIFTV

SEQ ID NO: 7308 - DNA, 744 bp, Glycine max
  misc_feature (1)..(744): Ceres Seq. ID no. 13582293
aacatcctaatcgaaaaatctttttcaacaaccttatcaacaatgcaagagcttcatgaagcggcaattgcttattacaacaacggctccacggatcaacagactttggcatggcagtttttctgttcaatggacggtgacggtaatggccgtgtcagctttcgagagtataccgacttcttgtgtagaaccaccggtttcgcttgggtccatagcgagatgtttcaggagctcgaccggaatagagacggccagcttgacttctgggaggtcttgacgctttactatgtggctcggacgcggaccattggctgccgcacgtgcctccagcctctcattggtttgtactttacgtgtgtaacgtgctttgaatcgcaatgtgttggcgacacgtttgatctctgcgtcaagtgttatatgcggcggaattataatcatccgcatcgtgtcttcctggatagttttgttttattacgatctaagcgtagccaccctcctatgttgcaggagccgcctggcgaccaaaacatgcccgaacaacatcctgggatgatgggatggtgcaccgcgttgtcagcaatggaagctgcatttgctgtgggatcttttgctggcttttgcactattatgtaaaaatcatgttctatctcattgttgtttttgttcttaaatatttagccaataaacgcactataagtttaaatggcagactacaagataagagagtaatactacaaccttgat

SEQ ID NO: 7309 - protein, 210 aa, Glycine max
  peptide (1)..(210): Ceres Seq. ID no. 13582294
  misc_feature (70)..(98): Pfam Name: Pfam Description:  EF hand
  misc_feature (15)..(166): NCBI GI NO: 15235705 NR Description: calcium-binding EF-hand family protein
NILIEKSFSTTLSTMQELHEAAIAYYNNGSTDQQTLAWQFFCSMDGDGNGRVSFREYTDFLCRTTGFAWVHSEMFQELDRNRDGQLDFWEVLTLYYVARTRTIGCRTCLQPLIGLYFTCVTCFESQCVGDTFDLCVKCYMRRNYNHPHRVFLDSFVLLRSKRSHPPMLQEPPGDQNMPEQHPGMMGWCTALSAMEAAFAVGSFAGFCTIM

SEQ ID NO: 7310 - protein, 196 aa, Glycine max
  peptide (1)..(196): Ceres Seq. ID no. 13582295
  misc_feature (56)..(84): Pfam Name: Pfam Description:  EF hand
  misc_feature (1)..(152): NCBI GI NO: 15235705 NR Description: calcium-binding EF-hand family protein
MQELHEAAIAYYNNGSTDQQTLAWQFFCSMDGDGNGRVSFREYTDFLCRTTGFAWVHSEMFQELDRNRDGQLDFWEVLTLYYVARTRTIGCRTCLQPLIGLYFTCVTCFESQCVGDTFDLCVKCYMRRNYNHPHRVFLDSFVLLRSKRSHPPMLQEPPGDQNMPEQHPGMMGWCTALSAMEAAFAVGSFAGFCTIM

SEQ ID NO: 7311 - protein, 167 aa, Glycine max
  peptide (1)..(167): Ceres Seq. ID no. 13582296
  misc_feature (27)..(55): Pfam Name: Pfam Description:  EF hand
  misc_feature (1)..(123): NCBI GI NO: 15235705 NR Description: calcium-binding EF-hand family protein
MDGDGNGRVSFREYTDFLCRTTGFAWVHSEMFQELDRNRDGQLDFWEVLTLYYVARTRTIGCRTCLQPLIGLYFTCVTCFESQCVGDTFDLCVKCYMRRNYNHPHRVFLDSFVLLRSKRSHPPMLQEPPGDQNMPEQHPGMMGWCTALSAMEAAFAVGSFAGFCTIM

SEQ ID NO: 7312 - DNA, 1137 bp, Glycine max
  misc_feature (1)..(1137): Ceres Seq. ID no. 14304231
gactcctttcgcctcctcctcctcctcctctggattgcggcgcgacggcggccgtgagcgagcggtgctcctactcctcctccacgccctcgcgcccagatccgctccccaatggcgcggaacccggcctccagcgtctacgtaggcaacttggatgagaaggtgcctgaaagagtcttgtatgagattcttattcaggctggtcatgtagtagacctgcacataccatgtgacaaagaaactgggcgtcccaaaggttttgcttttgctgagtatgagacagacgcaattgctcagtatgctgttagacttttttcaggacttgttaggcttaatggtaaaacacttaaatttgcgctttctggacaagacaagccctcatcaaatggcaataatccagtaatgcctaaactcaaccctataccattaccaaagcagcctcagtttgtgcattctagtgatacgcttgtgtcgcataaaccagcatatccggtggtaaatggtgggattccacataatgttttttcacaaggctatcatccttacaatgttcaccctcaagcattaccaactcgacccgtgcatgagcaccgagagtttgtccatggtacgtatggttacaacagtcatgtatatggttctgttctgaatgctagctatggaggttatgttgtgaatgctgttggtcatcgagctgtgaggcaaccaatcatttacccatcctactaggttgtaggcaccaaattgcgggatctggtattcagagtaggcaggttaatcgtagcttcttggtccctcaaattctcagtagcatctttgttgtacccttgtacttcaattccctgcatgtaaatagggctggtatatccattttatcaacggtaagttggcaacggaaagctctgcccactacattgtacacctttgtacttgtctagcctggtacatcttttctctttcttggaattggaaaataaagaaatgcaacatcgtgggctgttttgcccccccactgactcggattatttgagctattcctaaagctccttttcatgtactcgaatgatcattgctgttacttacacagaagatgttgatgtctcagctccggggcctcatataattataaattcaagc

SEQ ID NO: 7313 - protein, 205 aa, Glycine max
  peptide (1)..(205): Ceres Seq. ID no. 14304232
  misc_feature (9)..(81): Pfam Name: a.k.a. RRM, RBD, or RNP domain Pfam Description: RNA recognition motif.
  misc_feature (1)..(163): NCBI GI NO: 34907328 NR Description: P0698A10.26
  misc_feature (8)..(95): NCBI GI NO: 30681329 NR Description: RNA recognition motif (RRM)-containing protein
  misc_feature (27)..(95): NCBI GI NO: 7486312 NR Description: hypothetical protein F28M11
  misc_feature (3)..(104): NCBI GI NO: 19114913 NR Description: spliceosome associated protein 49; RNA binding
  misc_feature (1)..(103): NCBI GI NO: 34858075 NR Description: similar to Sf3b4 protein [Rattus norvegicus]
  misc_feature (3)..(103): NCBI GI NO: 37535012 NR Description: putative spliceosomal protein
  misc_feature (3)..(103): NCBI GI NO: 28374170 NR Description: Similar to splicing factor 3b, subunit 4, 49kD
  misc_feature (3)..(103): NCBI GI NO: 38512254 NR Description: Spx-prov protein [Silurana tropicalis]
  misc_feature (3)..(103): NCBI GI NO: 24119253 NR Description: splicing factor 3b, subunit 4 [Danio rerio]
  misc_feature (3)..(103): NCBI GI NO: 34193906 NR Description: Splicing factor 3b, subunit 4 [Danio rerio]
MARNPASSVYVGNLDEKVPERVLYEILIQAGHVVDLHIPCDKETGRPKGFAFAEYETDAIAQYAVRLFSGLVRLNGKTLKFALSGQDKPSSNGNNPVMPKLNPIPLPKQPQFVHSSDTLVSHKPAYPVVNGGIPHNVFSQGYHPYNVHPQALPTRPVHEHREFVHGTYGYNSHVYGSVLNASYGGYVVNAVGHRAVRQPIIYPSY

SEQ ID NO: 7314 - protein, 108 aa, Glycine max
  peptide (1)..(108): Ceres Seq. ID no. 14304233
  misc_feature (1)..(66): NCBI GI NO: 34907328 NR Description: P0698A10.26
  misc_feature (1)..(27): NCBI GI NO: 16769726 NR Description: LP01585p [Drosophila melanogaster]
  misc_feature (1)..(27): NCBI GI NO: 20129123 NR Description: CG11454-PA [Drosophila melanogaster]
  misc_feature (1)..(49): NCBI GI NO: 21426833 NR Description: RNA binding motif protein 11 [Homo sapiens]
  misc_feature (1)..(55): NCBI GI NO: 26333183 NR Description: unnamed protein product [Mus musculus]
  misc_feature (1)..(55): NCBI GI NO: 39930581 NR Description: RNA binding motif protein 11 [Mus musculus]
MPKLNPIPLPKQPQFVHSSDTLVSHKPAYPVVNGGIPHNVFSQGYHPYNVHPQALPTRPVHEHREFVHGTYGYNSHVYGSVLNASYGGYVVNAVGHRAVRQPIIYPSY

SEQ ID NO: 7315 - DNA, 783 bp, Glycine max
  misc_feature (1)..(783): Ceres Seq. ID no. 14304132
atcctctctctcatcagaagaagaagggacgaaagaagaagtatctttgttttcgctctcttctctctcctttcgatctttgacgattagaaaacgaaagtgatggctgcagttaatgggtaccaaggaaacactccggcggcgtcaaagcaatctgctcctctgactaagactgttgatagccaatctgttctcaaaaggctgcaatctgaactaatgggcttgatgatgggtggtgacccggggatatctgctttcccagaggaagacaacatattctgttggaaagggacaataacaggaagcaaagatactgtgtttgaaggaactgagtacagactctcactctctttctccaatgactatcctttcaagcctcctaagatcaagttccacactggttgcttccaccccaatgttgatgtctatggcaatatctgtttggacattcttcaggataaatggtcatctgcatatgatgtgaggacaatactactatcgattcagagccttttgggagaaccgaacatcagctcaccattgaacactcaagcagcgcagctctggagcaaccaagaagagtataggaagatggttgagaagctctacaagccccccagtgcatgataacttcaggatgtgtcattcctttgctctataatttgtttctgatcatcaacagttttatctgtaacattttacctagccttttgacctgagccaaatattgatattgatgtgagcttttcaaaaattaatcagaatgatatacacattcttctt

SEQ ID NO: 7316 - protein, 174 aa, Glycine max
  peptide (1)..(174): Ceres Seq. ID no. 14304133
  misc_feature (1)..(174): NCBI GI NO: 18403097 NR Description: ubiquitin-conjugating enzyme (UBC20)
  misc_feature (1)..(174): NCBI GI NO: 21618179 NR Description: E2, ubiquitin-conjugating enzyme, putative
  misc_feature (1)..(174): NCBI GI NO: 18402475 NR Description: ubiquitin-conjugating enzyme (UBC19)
  misc_feature (15)..(174): NCBI GI NO: 25293673 NR Description: hypothetical protein F17J6.3
  misc_feature (30)..(174): NCBI GI NO: 9454557 NR Description: Putative ubiquitin carrier protein
  misc_feature (9)..(171): NCBI GI NO: 34903234 NR Description: unnamed protein product
  misc_feature (8)..(170): NCBI GI NO: 3915196 NR Description: Ubiquitin-conjugating enzyme E2-C
  misc_feature (21)..(170): NCBI GI NO: 4388942 NR Description: E2-C
  misc_feature (4)..(170): NCBI GI NO: 31216813 NR Description: ENSANGP00000020629 [Anopheles gambiae]
  misc_feature (15)..(170): NCBI GI NO: 24663332 NR Description: vihar CG10682-PA [Drosophila melanogaster]
MAAVNGYQGNTPAASKQSAPLTKTVDSQSVLKRLQSELMGLMMGGDPGISAFPEEDNIFCWKGTITGSKDTVFEGTEYRLSLSFSNDYPFKPPKIKFHTGCFHPNVDVYGNICLDILQDKWSSAYDVRTILLSIQSLLGEPNISSPLNTQAAQLWSNQEEYRKMVEKLYKPPSA

SEQ ID NO: 7317 - protein, 136 aa, Glycine max
  peptide (1)..(136): Ceres Seq. ID no. 14304134
  misc_feature (1)..(136): NCBI GI NO: 18403097 NR Description: ubiquitin-conjugating enzyme (UBC20)
  misc_feature (1)..(136): NCBI GI NO: 21618179 NR Description: E2, ubiquitin-conjugating enzyme, putative
  misc_feature (1)..(136): NCBI GI NO: 18402475 NR Description: ubiquitin-conjugating enzyme (UBC19)
  misc_feature (1)..(136): NCBI GI NO: 25293673 NR Description: hypothetical protein F17J6.3
  misc_feature (1)..(136): NCBI GI NO: 9454557 NR Description: Putative ubiquitin carrier protein
  misc_feature (1)..(133): NCBI GI NO: 34903234 NR Description: unnamed protein product
  misc_feature (1)..(132): NCBI GI NO: 3915196 NR Description: Ubiquitin-conjugating enzyme E2-C
  misc_feature (1)..(132): NCBI GI NO: 4388942 NR Description: E2-C
  misc_feature (1)..(132): NCBI GI NO: 31216813 NR Description: ENSANGP00000020629 [Anopheles gambiae]
  misc_feature (1)..(132): NCBI GI NO: 24663332 NR Description: vihar CG10682-PA [Drosophila melanogaster]
MGLMMGGDPGISAFPEEDNIFCWKGTITGSKDTVFEGTEYRLSLSFSNDYPFKPPKIKFHTGCFHPNVDVYGNICLDILQDKWSSAYDVRTILLSIQSLLGEPNISSPLNTQAAQLWSNQEEYRKMVEKLYKPPSA

SEQ ID NO: 7318 - protein, 133 aa, Glycine max
  peptide (1)..(133): Ceres Seq. ID no. 14304135
  misc_feature (1)..(133): NCBI GI NO: 18403097 NR Description: ubiquitin-conjugating enzyme (UBC20)
  misc_feature (1)..(133): NCBI GI NO: 21618179 NR Description: E2, ubiquitin-conjugating enzyme, putative
  misc_feature (1)..(133): NCBI GI NO: 18402475 NR Description: ubiquitin-conjugating enzyme (UBC19)
  misc_feature (1)..(133): NCBI GI NO: 25293673 NR Description: hypothetical protein F17J6.3
  misc_feature (1)..(133): NCBI GI NO: 9454557 NR Description: Putative ubiquitin carrier protein
  misc_feature (1)..(130): NCBI GI NO: 34903234 NR Description: unnamed protein product
  misc_feature (1)..(129): NCBI GI NO: 3915196 NR Description: Ubiquitin-conjugating enzyme E2-C
  misc_feature (1)..(129): NCBI GI NO: 4388942 NR Description: E2-C
  misc_feature (1)..(129): NCBI GI NO: 31216813 NR Description: ENSANGP00000020629 [Anopheles gambiae]
  misc_feature (1)..(129): NCBI GI NO: 24663332 NR Description: vihar CG10682-PA [Drosophila melanogaster]
MMGGDPGISAFPEEDNIFCWKGTITGSKDTVFEGTEYRLSLSFSNDYPFKPPKIKFHTGCFHPNVDVYGNICLDILQDKWSSAYDVRTILLSIQSLLGEPNISSPLNTQAAQLWSNQEEYRKMVEKLYKPPSA

SEQ ID NO: 7319 - DNA, 1209 bp, Glycine max
  misc_feature (1)..(1209): Ceres Seq. ID no. 14304198
acacactctgcagtgaaacaccctgctccaaactccttcgatggaaaacatccagcacagtcacgtggaagttaagggactaaagctccatgttgctgagattggaagtggtcaaaaggcactggttttcttacatggattcccagaaatatggtatacatggaggcaccagatgattgctgcagcaaatgctggctaccgggctattgcctttgatttcagaggctatggactttctgagcatcctgcggagccagaaaaagcaaacttacttgaccttgttgatgatgtcgtgggtctgttggattcattaagcattaccaaggctgtgcttgttggtaaggactttggtgcctttccagcgtatattgttgccgctctccatccagacaaagtagattcagtcataatgttaggtgttccattcatgcttccaggtccctctgctattcagaacctcccaaaaggctcctacgttattaagtggcaggagcctgggagggcagaagcagattttggccgctttgatgttaagtcagttataaggaacatctacacactcttctctggaagtgagataccaatagcaggtgataatcaggaaatcatggatttgtatgacccaactactcccctgccaccatggttctctgaggaagacctggcaacctatgcatcactatacgaaaaatctggcttcagatttgcattgcaggttccatacaggactcttggagtggatagtggcataagtgatcctaaaatcacagttccggcactgctgatcatgggtgagaaagactatgtcttcaagtgttttggaatggaggactacatccgaagtggcgcagtgaaacattttgtgccagacttggaaatcatatatattccagaaggaagccattttgtgcatgaacaatttcctgagaaggtgaaccagctcatcattgaattccttaacaaacaaagcatttgattgtctgatctgaagctcagagtaggatgcaatattgtataagaagcaactctctgtggcgggatgatttttaaggaatcacttatttccaaataaggcaataagtaacttgaatgagtacttattcgatagaactttgatctacactctacagacattttgataaatactatgtaattcgtatagaattgcttttgctctatcctcaacattaatgatcaatcatctcattg

SEQ ID NO: 7320 - protein, 311 aa, Glycine max
  peptide (1)..(311): Ceres Seq. ID no. 14304199
  misc_feature (53)..(303): Pfam Name: Pfam Description:  alpha/beta hydrolase fold
  misc_feature (1)..(308): NCBI GI NO: 1354849 NR Description: epoxide hydrolase [Nicotiana tabacum]
  misc_feature (1)..(311): NCBI GI NO: 37535732 NR Description: putative epoxide hydrolase
  misc_feature (1)..(311): NCBI GI NO: 37535728 NR Description: putative epoxide hydrolase
  misc_feature (2)..(311): NCBI GI NO: 37535724 NR Description: putative epoxide hydrolase
  misc_feature (2)..(310): NCBI GI NO: 37535722 NR Description: putative epoxide hydrolase
  misc_feature (1)..(308): NCBI GI NO: 7488671 NR Description: epoxide hydrolase homolog - soybean
  misc_feature (1)..(308): NCBI GI NO: 2764806 NR Description: epoxide hydrolase [Glycine max]
  misc_feature (1)..(308): NCBI GI NO: 18411917 NR Description: epoxide hydrolase, putative [Arabidopsis thaliana]
  misc_feature (151)..(306): NCBI GI NO: 37535730 NR Description: putative epoxide hydrolase
  misc_feature (1)..(221): NCBI GI NO: 29826681 NR Description: putative epoxide hydrolase
MENIQHSHVEVKGLKLHVAEIGSGQKALVFLHGFPEIWYTWRHQMIAAANAGYRAIAFDFRGYGLSEHPAEPEKANLLDLVDDVVGLLDSLSITKAVLVGKDFGAFPAYIVAALHPDKVDSVIMLGVPFMLPGPSAIQNLPKGSYVIKWQEPGRAEADFGRFDVKSVIRNIYTLFSGSEIPIAGDNQEIMDLYDPTTPLPPWFSEEDLATYASLYEKSGFRFALQVPYRTLGVDSGISDPKITVPALLIMGEKDYVFKCFGMEDYIRSGAVKHFVPDLEIIYIPEGSHFVHEQFPEKVNQLIIEFLNKQSI

SEQ ID NO: 7321 - protein, 267 aa, Glycine max
  peptide (1)..(267): Ceres Seq. ID no. 14304200
  misc_feature (9)..(259): Pfam Name: Pfam Description:  alpha/beta hydrolase fold
  misc_feature (1)..(264): NCBI GI NO: 1354849 NR Description: epoxide hydrolase [Nicotiana tabacum]
  misc_feature (1)..(267): NCBI GI NO: 37535732 NR Description: putative epoxide hydrolase
  misc_feature (1)..(267): NCBI GI NO: 37535728 NR Description: putative epoxide hydrolase
  misc_feature (1)..(267): NCBI GI NO: 37535724 NR Description: putative epoxide hydrolase
  misc_feature (1)..(266): NCBI GI NO: 37535722 NR Description: putative epoxide hydrolase
  misc_feature (1)..(264): NCBI GI NO: 7488671 NR Description: epoxide hydrolase homolog - soybean
  misc_feature (1)..(264): NCBI GI NO: 2764806 NR Description: epoxide hydrolase [Glycine max]
  misc_feature (1)..(264): NCBI GI NO: 18411917 NR Description: epoxide hydrolase, putative [Arabidopsis thaliana]
  misc_feature (107)..(262): NCBI GI NO: 37535730 NR Description: putative epoxide hydrolase
  misc_feature (1)..(177): NCBI GI NO: 29826681 NR Description: putative epoxide hydrolase
MIAAANAGYRAIAFDFRGYGLSEHPAEPEKANLLDLVDDVVGLLDSLSITKAVLVGKDFGAFPAYIVAALHPDKVDSVIMLGVPFMLPGPSAIQNLPKGSYVIKWQEPGRAEADFGRFDVKSVIRNIYTLFSGSEIPIAGDNQEIMDLYDPTTPLPPWFSEEDLATYASLYEKSGFRFALQVPYRTLGVDSGISDPKITVPALLIMGEKDYVFKCFGMEDYIRSGAVKHFVPDLEIIYIPEGSHFVHEQFPEKVNQLIIEFLNKQSI

SEQ ID NO: 7322 - protein, 188 aa, Glycine max
  peptide (1)..(188): Ceres Seq. ID no. 14304201
  misc_feature (1)..(180): Pfam Name: Pfam Description:  alpha/beta hydrolase fold
  misc_feature (1)..(185): NCBI GI NO: 1354849 NR Description: epoxide hydrolase [Nicotiana tabacum]
  misc_feature (1)..(188): NCBI GI NO: 37535732 NR Description: putative epoxide hydrolase
  misc_feature (1)..(188): NCBI GI NO: 37535728 NR Description: putative epoxide hydrolase
  misc_feature (1)..(188): NCBI GI NO: 37535724 NR Description: putative epoxide hydrolase
  misc_feature (1)..(187): NCBI GI NO: 37535722 NR Description: putative epoxide hydrolase
  misc_feature (1)..(185): NCBI GI NO: 7488671 NR Description: epoxide hydrolase homolog - soybean
  misc_feature (1)..(185): NCBI GI NO: 2764806 NR Description: epoxide hydrolase [Glycine max]
  misc_feature (1)..(185): NCBI GI NO: 18411917 NR Description: epoxide hydrolase, putative [Arabidopsis thaliana]
  misc_feature (28)..(183): NCBI GI NO: 37535730 NR Description: putative epoxide hydrolase
  misc_feature (1)..(98): NCBI GI NO: 29826681 NR Description: putative epoxide hydrolase
MLGVPFMLPGPSAIQNLPKGSYVIKWQEPGRAEADFGRFDVKSVIRNIYTLFSGSEIPIAGDNQEIMDLYDPTTPLPPWFSEEDLATYASLYEKSGFRFALQVPYRTLGVDSGISDPKITVPALLIMGEKDYVFKCFGMEDYIRSGAVKHFVPDLEIIYIPEGSHFVHEQFPEKVNQLIIEFLNKQSI

SEQ ID NO: 7323 - DNA, 1148 bp, Glycine max
  misc_feature (1)..(1148): Ceres Seq. ID no. 14311253
acttgttccccgaagcttctcgtcccctcccctcccctcccctcctctcgcaccgccgggccggagggaggcgcctcgccgtctcctcgccgccgctcgtcgttggtggttcctggcgcgtgagtgacgcccagccggcatggcggccaacgtgggggagtccacgagcgggagcagcagcgtggccggcgacggcgggggcagcttcgagtgcaacatatgcttcgagctgccgcaggagcccatcgtcacgctctgcggccacctcttctgctggccctgcctctacaagtggctgcacatccactcgcactcccccgagtgccccgtctgcaaggccgtcgtcgaggaggacaagctcgtcccgctctatggccgcggcaaggaccgcgtcgaccccaggtccaagggcgtgccgtccggggccgagatccccaaccggccgaccgggcagcggcctgccaccgccccgcaggccgaccccaacaaccacttccccaacgccaaccctaacccctggttcatgggtggagggggcgtccctttggccaacgcgcggtgggggaactacaccttctcggccgcgtttggcggcctgttcccgctgctgagcttccaggtacatggattcccggacgcgaccgcgtacgggcagcctgccgggtttccctatgggtacggacatggacatggccacggccacgggcatgctttccatggtgggaacgcccacgccgccgccccccggcacgcgccgccagggcagcagcagcagcaggcggacgtgtacctcaaggcgctgctcatcctggtcggcttcctcgtgatcgcaagcctcatcacattctaggtttgtcggctcccactattgtcatttgtcaccgtcataataagagaaacgattgtcgtgatacttgtcagatgttgtgtgcattaccttggccccccatacaaagccctggtctagatctgagtggtgcgttttgagcgaaagcgttcatagaactgctgtatatatgtgctatttagacgcggtcctgtggggggcgcctgtgtaccgtagtggtttcgcgctgattcgcgagtgatttggaaacctctcttcggggtggatgtaccagaccaattatatatcatgtgtaattttg

SEQ ID NO: 7324 - protein, 236 aa, Glycine max
  peptide (1)..(236): Ceres Seq. ID no. 14311254
  misc_feature (25)..(65): Pfam Name: RING finger Pfam Description: Zinc finger, C3HC4 type
  misc_feature (1)..(236): NCBI GI NO: 29150403 NR Description: unknown protein
  misc_feature (1)..(236): NCBI GI NO: 34909840 NR Description: P0403C05.28
  misc_feature (3)..(233): NCBI GI NO: 18394721 NR Description: zinc finger
  misc_feature (3)..(234): NCBI GI NO: 15224062 NR Description: zinc finger
  misc_feature (3)..(234): NCBI GI NO: 21553849 NR Description: putative RING zinc finger protein
  misc_feature (18)..(118): NCBI GI NO: 15222064 NR Description: zinc finger
  misc_feature (7)..(234): NCBI GI NO: 17554742 NR Description: RiNg Finger protein (24.9 kD) (rnf-5)
  misc_feature (12)..(163): NCBI GI NO: 21912604 NR Description: putative ubiquitin ligase [Taenia solium]
  misc_feature (7)..(230): NCBI GI NO: 39581891 NR Description: Hypothetical protein CBG20152
  misc_feature (7)..(124): NCBI GI NO: 22795037 NR Description: putative RING protein [Populus x canescens]
MAANVGESTSGSSSVAGDGGGSFECNICFELPQEPIVTLCGHLFCWPCLYKWLHIHSHSPECPVCKAVVEEDKLVPLYGRGKDRVDPRSKGVPSGAEIPNRPTGQRPATAPQADPNNHFPNANPNPWFMGGGGVPLANARWGNYTFSAAFGGLFPLLSFQVHGFPDATAYGQPAGFPYGYGHGHGHGHGHAFHGGNAHAAAPRHAPPGQQQQQADVYLKALLILVGFLVIASLITF

SEQ ID NO: 7325 - protein, 202 aa, Glycine max
  peptide (1)..(202): Ceres Seq. ID no. 14311255
  misc_feature (56)..(202): Pfam Name: Pfam Description:  Glycoprotein GG/GX
  misc_feature (20)..(202): NCBI GI NO: 32699068 NR Description: hypothetical protein FLJ35107 [Homo sapiens]
  misc_feature (56)..(202): NCBI GI NO: 11359723 NR Description: proteophosphoglycan, membrane-associated
  misc_feature (3)..(202): NCBI GI NO: 31232507 NR Description: ENSANGP00000004655 [Anopheles gambiae]
  misc_feature (3)..(202): NCBI GI NO: 27375632 NR Description: blr0521 [Bradyrhizobium japonicum]
  misc_feature (49)..(202): NCBI GI NO: 13592175 NR Description: ppg3 [Leishmania major]
  misc_feature (3)..(202): NCBI GI NO: 13592175 NR Description: ppg3 [Leishmania major]
  misc_feature (69)..(202): NCBI GI NO: 11359723 NR Description: proteophosphoglycan, membrane-associated
  misc_feature (26)..(202): NCBI GI NO: 31232507 NR Description: ENSANGP00000004655 [Anopheles gambiae]
  misc_feature (41)..(202): NCBI GI NO: 19113482 NR Description: hypothetical serine-rich secreted protein
  misc_feature (49)..(202): NCBI GI NO: 13592175 NR Description: ppg3 [Leishmania major]
LFPEASRPLPSPPLLSHRRAGGRRLAVSSPPLVVGGSWRVSDAQPAWRPTWGSPRAGAAAWPATAGAASSATYASSCRRSPSSRSAATSSAGPASTSGCTSTRTPPSAPSARPSSRRTSSSRSMAAARTASTPGPRACRPGPRSPTGRPGSGLPPPRRPTPTTTSPTPTLTPGSWVEGASLWPTRGGGTTPSRPRLAACSRC

SEQ ID NO: 7326 - DNA, 1347 bp, Glycine max
  misc_feature (1)..(1347): Ceres Seq. ID no. 13582297
atccaatcttcactcactctctaatttactacagaaaaaaaaaaaagatgagtagtgttttttcagaacacaaattccaacttcaaccctctcaccaacttctctccctcaagaaatccctgagggacatagacatcccagtcccaccaaggaagctcctcacccgccgctccgccgccgtccacgacgtctccggcgacatgttttccgatgacaccctccggcacaagtaccttccccacaatggctccaccgactcctccgacgatgactccggcgacccctacgcctccgatcaattccgcatgtttgagttcaaggtccggcgctgtactcgcagccggagccatgactggacagactgtccatttgtacatcccggcgagaaggcccgccgtcgggaccctcgccggtttcattactctgcaacagtctgtccagagtttcgccgcggtcagtgtgaccgtggcgatgcatgtgagttttctcatggggtgtttgagtgctggttacacccttctaggtatagaaccgaggcttgcaaggatggtaggaattgcaagcgaaaagtttgcttctttgctcacacccctcgccaactcagggttttgcattccaatgaaaatagcaacaagaaaaagtgcaccaatatgagccctcataacaacaacaacaacaccaacaattgttgtttggtttgccattgctcttcttctactcgttcaccaacttcaaccttgttcggcatgtctcatttttctcctccattgtcaccaccttctccttcttccccttctaggtttgagaccaaccatcatcatggtgttgtgaaatataataaggatgtgctctctgagcttatgtgttccatggagggtttgaattttggtgaggcttcacttttgtctgctgcttctaagcctcacaacaatttgtcttcttggcttgatgtttctgaggatcacaatcaaaaacagttcagtactctttcaccaaccatcactgcttgtggaagcttttccaacaacggaaatgggagatttttgagagaagaaagtggggttgttgatgatgttatttccccagatctcgcatgggtgaatgaattactgatgtagattatatgcatttgaagatgatgatgacaaaaagtggttcgtggtgggaattgtgatgaggatttaccaagtgtaaatacatgttggagctagcaacatatattacatccttggcttcttttcttattattgttttaagaattttattgctttctgaatttgttttaagatttgtcaaattaaattctgtaatttttatgtccattaattagatttgatcttttattcc

SEQ ID NO: 7327 - protein, 371 aa, Glycine max
  peptide (1)..(371): Ceres Seq. ID no. 13582298
  misc_feature (175)..(197): Pfam Name: and similar Pfam Description: Zinc finger C-x8-C-x5-C-x3-H type
  misc_feature (16)..(307): NCBI GI NO: 15219557 NR Description: expressed protein [Arabidopsis thaliana]
  misc_feature (16)..(307): NCBI GI NO: 26449538 NR Description: unknown protein [Arabidopsis thaliana]
  misc_feature (45)..(307): NCBI GI NO: 15241451 NR Description: expressed protein [Arabidopsis thaliana]
  misc_feature (93)..(264): NCBI GI NO: 34906436 NR Description: putative zinc finger transcription factor
  misc_feature (76)..(203): NCBI GI NO: 15225213 NR Description: CCCH-type zinc finger protein -related
  misc_feature (76)..(211): NCBI GI NO: 15224852 NR Description: CCCH-type zinc finger protein -related
  misc_feature (76)..(203): NCBI GI NO: 21593538 NR Description: putative CCCH-type zinc finger protein
  misc_feature (76)..(205): NCBI GI NO: 15233491 NR Description: expressed protein [Arabidopsis thaliana]
  misc_feature (86)..(265): NCBI GI NO: 18405834 NR Description: CCCH-type zinc finger protein -related
  misc_feature (86)..(265): NCBI GI NO: 25408764 NR Description: probable CCCH-type zinc finger protein
PIFTHSLIYYRKKKKMSSVFSEHKFQLQPSHQLLSLKKSLRDIDIPVPPRKLLTRRSAAVHDVSGDMFSDDTLRHKYLPHNGSTDSSDDDSGDPYASDQFRMFEFKVRRCTRSRSHDWTDCPFVHPGEKARRRDPRRFHYSATVCPEFRRGQCDRGDACEFSHGVFECWLHPSRYRTEACKDGRNCKRKVCFFAHTPRQLRVLHSNENSNKKKCTNMSPHNNNNNTNNCCLVCHCSSSTRSPTSTLFGMSHFSPPLSPPSPSSPSRFETNHHHGVVKYNKDVLSELMCSMEGLNFGEASLLSAASKPHNNLSSWLDVSEDHNQKQFSTLSPTITACGSFSNNGNGRFLREESGVVDDVISPDLAWVNELLM

SEQ ID NO: 7328 - protein, 356 aa, Glycine max
  peptide (1)..(356): Ceres Seq. ID no. 13582299
  misc_feature (160)..(182): Pfam Name: and similar Pfam Description: Zinc finger C-x8-C-x5-C-x3-H type
  misc_feature (1)..(292): NCBI GI NO: 15219557 NR Description: expressed protein [Arabidopsis thaliana]
  misc_feature (1)..(292): NCBI GI NO: 26449538 NR Description: unknown protein [Arabidopsis thaliana]
  misc_feature (30)..(292): NCBI GI NO: 15241451 NR Description: expressed protein [Arabidopsis thaliana]
  misc_feature (78)..(249): NCBI GI NO: 34906436 NR Description: putative zinc finger transcription factor
  misc_feature (61)..(188): NCBI GI NO: 15225213 NR Description: CCCH-type zinc finger protein -related
  misc_feature (61)..(196): NCBI GI NO: 15224852 NR Description: CCCH-type zinc finger protein -related
  misc_feature (61)..(188): NCBI GI NO: 21593538 NR Description: putative CCCH-type zinc finger protein
  misc_feature (61)..(190): NCBI GI NO: 15233491 NR Description: expressed protein [Arabidopsis thaliana]
  misc_feature (71)..(250): NCBI GI NO: 18405834 NR Description: CCCH-type zinc finger protein -related
  misc_feature (71)..(250): NCBI GI NO: 25408764 NR Description: probable CCCH-type zinc finger protein
MSSVFSEHKFQLQPSHQLLSLKKSLRDIDIPVPPRKLLTRRSAAVHDVSGDMFSDDTLRHKYLPHNGSTDSSDDDSGDPYASDQFRMFEFKVRRCTRSRSHDWTDCPFVHPGEKARRRDPRRFHYSATVCPEFRRGQCDRGDACEFSHGVFECWLHPSRYRTEACKDGRNCKRKVCFFAHTPRQLRVLHSNENSNKKKCTNMSPHNNNNNTNNCCLVCHCSSSTRSPTSTLFGMSHFSPPLSPPSPSSPSRFETNHHHGVVKYNKDVLSELMCSMEGLNFGEASLLSAASKPHNNLSSWLDVSEDHNQKQFSTLSPTITACGSFSNNGNGRFLREESGVVDDVISPDLAWVNELLM

SEQ ID NO: 7329 - protein, 305 aa, Glycine max
  peptide (1)..(305): Ceres Seq. ID no. 13582300
  misc_feature (109)..(131): Pfam Name: and similar Pfam Description: Zinc finger C-x8-C-x5-C-x3-H type
  misc_feature (1)..(241): NCBI GI NO: 15219557 NR Description: expressed protein [Arabidopsis thaliana]
  misc_feature (1)..(241): NCBI GI NO: 26449538 NR Description: unknown protein [Arabidopsis thaliana]
  misc_feature (1)..(241): NCBI GI NO: 15241451 NR Description: expressed protein [Arabidopsis thaliana]
  misc_feature (27)..(198): NCBI GI NO: 34906436 NR Description: putative zinc finger transcription factor
  misc_feature (10)..(137): NCBI GI NO: 15225213 NR Description: CCCH-type zinc finger protein -related
  misc_feature (10)..(145): NCBI GI NO: 15224852 NR Description: CCCH-type zinc finger protein -related
  misc_feature (10)..(137): NCBI GI NO: 21593538 NR Description: putative CCCH-type zinc finger protein
  misc_feature (10)..(139): NCBI GI NO: 15233491 NR Description: expressed protein [Arabidopsis thaliana]
  misc_feature (20)..(199): NCBI GI NO: 18405834 NR Description: CCCH-type zinc finger protein -related
  misc_feature (20)..(199): NCBI GI NO: 25408764 NR Description: probable CCCH-type zinc finger protein
MFSDDTLRHKYLPHNGSTDSSDDDSGDPYASDQFRMFEFKVRRCTRSRSHDWTDCPFVHPGEKARRRDPRRFHYSATVCPEFRRGQCDRGDACEFSHGVFECWLHPSRYRTEACKDGRNCKRKVCFFAHTPRQLRVLHSNENSNKKKCTNMSPHNNNNNTNNCCLVCHCSSSTRSPTSTLFGMSHFSPPLSPPSPSSPSRFETNHHHGVVKYNKDVLSELMCSMEGLNFGEASLLSAASKPHNNLSSWLDVSEDHNQKQFSTLSPTITACGSFSNNGNGRFLREESGVVDDVISPDLAWVNELLM

SEQ ID NO: 7330 - DNA, 1350 bp, Glycine max
  misc_feature (1)..(1350): Ceres Seq. ID no. 13595438
acgttagcgagaggtaaaaatccgactgcccaggggacgaaccggaacaagggttccgggcccgtctcttcttcgtttcgtttccatccacagctcgtcctccccccaaaccttaccccatgtccgacggcggcggcgagcccggggccggcggctcggcgccggtgtgcaacttcgttcagaagccgccgaagaatattcggaagcgtcccgccgcctccgtcggctctgatgacgaagaaggtagcggcggcgacgattccggggccatcgcggcggcgcgatctaagaagccgccgcctactaccagcaagctcttcttctcctccgccgacaactcacacgagccccgccgtttccagttcgagtcgtcccggactattcagtcctctaccgacaaccgcgccactgcgacgcttgagacggagacggcgtacgaccgtgatgcgcgcgccatccgcgagcgacagctcaagcaggctgaggaatccctcaagaagaacccctctgcctcctcctcctccggggagctctacaaggggatccacggctacacggatcacaaggccggcttccggcgggagcacacggtttccggagagaaggccggcggcgctcacggccccctgcgggcgtcagcgcacatacgcctctccacgcggttcgactaccaacccgacatctgcaaggattataaggagaccggctattgtggctatggcgattcctgcaagttcatgcacgacagaggtgactacaagtccggatggcagctcgagagggagtgggacgaggccgagaaagcccgcaaacggcgcatagcgatgcgtgagttgggtggtagtgatggcgaggcagaggaggaagacagcgacgacgaggaggcactgccctttgcctgcttcatatgcagggagccctttgttgacccggtggtcacaaagtgtaagcattatttctgcgagcattgcgcattaaagcatcactcgaagaacaagaagtgctttgtctgcaataaaccgacgcttggcatcttcaatgcagcgcaggagatccggaagaagattgcccaggacaagaagcagcaggacctttgatgactgctgcacaatgtagcttgtatcatggaggattacttctcttctgtaattgtattgtttgaaaatgagggggaaatgtccaggaatcagttttgtttctttagctctgtactagctcctacttaccattagccattttgccgcaacttaaaaggactacaaggaaggattgtaggagtttttgagaaaatcaacaacgaaagaactagcttattgtggacctatggaaaaatatctcaaaacttgaagg

SEQ ID NO: 7331 - protein, 325 aa, Glycine max
  peptide (1)..(325): Ceres Seq. ID no. 13595439
  misc_feature (261)..(298): Pfam Name: RING finger Pfam Description: Zinc finger, C3HC4 type
  misc_feature (1)..(324): NCBI GI NO: 15223384 NR Description: expressed protein [Arabidopsis thaliana]
  misc_feature (1)..(324): NCBI GI NO: 26451788 NR Description: unknown protein [Arabidopsis thaliana]
  misc_feature (13)..(324): NCBI GI NO: 15240037 NR Description: expressed protein [Arabidopsis thaliana]
  misc_feature (13)..(324): NCBI GI NO: 22531136 NR Description: putative protein [Arabidopsis thaliana]
  misc_feature (1)..(287): NCBI GI NO: 25406720 NR Description: probable zinc finger protein
  misc_feature (8)..(324): NCBI GI NO: 27715515 NR Description: similar to RIKEN cDNA 2810428C21
  misc_feature (71)..(312): NCBI GI NO: 27374394 NR Description: CG4973-PA [Drosophila willistoni]
  misc_feature (93)..(316): NCBI GI NO: 27374308 NR Description: CG4973-PA [Drosophila pseudoobscura]
  misc_feature (16)..(323): NCBI GI NO: 21313494 NR Description: RIKEN cDNA 2310020H19 [Mus musculus]
  misc_feature (11)..(323): NCBI GI NO: 34935361 NR Description: similar to RIKEN cDNA 2310020H19
MSDGGGEPGAGGSAPVCNFVQKPPKNIRKRPAASVGSDDEEGSGGDDSGAIAAARSKKPPPTTSKLFFSSADNSHEPRRFQFESSRTIQSSTDNRATATLETETAYDRDARAIRERQLKQAEESLKKNPSASSSSGELYKGIHGYTDHKAGFRREHTVSGEKAGGAHGPLRASAHIRLSTRFDYQPDICKDYKETGYCGYGDSCKFMHDRGDYKSGWQLEREWDEAEKARKRRIAMRELGGSDGEAEEEDSDDEEALPFACFICREPFVDPVVTKCKHYFCEHCALKHHSKNKKCFVCNKPTLGIFNAAQEIRKKIAQDKKQQDL

SEQ ID NO: 7332 - protein, 273 aa, Glycine max
  peptide (1)..(273): Ceres Seq. ID no. 13595440
  misc_feature (97)..(213): Pfam Name: Pfam Description:  Cupin
  misc_feature (69)..(273): NCBI GI NO: 2136504 NR Description: gastric mucin (clone PGM-2A) - pig (fragment)
  misc_feature (6)..(273): NCBI GI NO: 5420387 NR Description: proteophosphoglycan [Leishmania major]
TLARGKNPTAQGTNRNKGSGPVSSSFRFHPQLVLPPNLTPCPTAAASPGPAARRRCATSFRSRRRIFGSVPPPPSALMTKKVAAATIPGPSRRRDLRSRRLLPASSSSPPPTTHTSPAVSSSSRPGLFSPLPTTAPLRRLRRRRRTTVMRAPSASDSSSRLRNPSRRTPLPPPPPGSSTRGSTATRITRPASGGSTRFPERRPAALTAPCGRQRTYASPRGSTTNPTSARIIRRPAIVAMAIPASSCTTEVTTSPDGSSRGSGTRPRKPANGA

SEQ ID NO: 7333 - protein, 196 aa, Glycine max
  peptide (1)..(196): Ceres Seq. ID no. 13595441
  misc_feature (20)..(136): Pfam Name: Pfam Description:  Cupin
  misc_feature (1)..(196): NCBI GI NO: 2136504 NR Description: gastric mucin (clone PGM-2A) - pig (fragment)
  misc_feature (1)..(196): NCBI GI NO: 5420387 NR Description: proteophosphoglycan [Leishmania major]
MTKKVAAATIPGPSRRRDLRSRRLLPASSSSPPPTTHTSPAVSSSSRPGLFSPLPTTAPLRRLRRRRRTTVMRAPSASDSSSRLRNPSRRTPLPPPPPGSSTRGSTATRITRPASGGSTRFPERRPAALTAPCGRQRTYASPRGSTTNPTSARIIRRPAIVAMAIPASSCTTEVTTSPDGSSRGSGTRPRKPANGA

SEQ ID NO: 7334 - DNA, 982 bp, Glycine max
  misc_feature (1)..(982): Ceres Seq. ID no. 14304159
tcaaaaaaaaaactttcaaatccctagaaagatgtcgacggaggaagaaaccaaggtggttgtcgagtcaggagacgccgaagcgacggtgacggagaagaagcctgctgcgaaaggcggcgctaaagctaagaagacgccggcgaagaagaagcctgctgctgctccgaggaagagaaccacttcgtctcaccctccttacgaagagatgatcaaagacgcgatcgtgacgctgaaggagagaaccggatctagccaatacgcgattcagaagttcatcgaggagaagcagaagtcgcttcctccaactttcaggaagcttctcctcgtcaatctcaggagactcgtcgcttccgggaagctagtcaaagtcaaagcctctttcaagattccgtctgcggctaaaccggcggctacgactaaaccggttaacaagaaaccagctgctgctgttactaaaccgaagggtaaagctcctgctaaggccaaaccggctgctaaaggagccaagaaacctgctgctgctgctaagcctaaggcaaagacaacagcaacaactaaagccgctgcgaagcccaaacctaagacgaagagtgtagctgctgtttcaaagaccaaggcggttgctgcgaagcctaaggcgaaggagagacctgttaaagcgtcgaggacttcgactaggacgtctccagggaagaaggcagcagctccggctaagaaagctgctgctgctgcgactaagaaggctccggctaagagtgtgaaggttaaatctccagcgaagagggcttcgacgaggaagaagtgattggttttagcttctcttagggttaaagtctttgtataattgaatcgtctatgaagggggcttgttttttcttcttccaaagtttatctttgtcttggtttcttctcgaaacccttttatcttgtaatttttggtttgtttgaaaattcaatagctatatgtgatggggtttgc

SEQ ID NO: 7335 - protein, 268 aa, Glycine max
  peptide (1)..(268): Ceres Seq. ID no. 14304160
  misc_feature (63)..(132): Pfam Name: Pfam Description:  linker histone H1 and H5 family
  misc_feature (11)..(267): NCBI GI NO: 15224536 NR Description: histone H1 [Arabidopsis thaliana]
  misc_feature (14)..(268): NCBI GI NO: 15222199 NR Description: histone H1, putative [Arabidopsis thaliana]
  misc_feature (37)..(268): NCBI GI NO: 16314 NR Description: histone H1-1 [Arabidopsis thaliana]
  misc_feature (11)..(267): NCBI GI NO: 585241 NR Description: HISTONE H1
  misc_feature (11)..(267): NCBI GI NO: 6681423 NR Description: histone H1 [Nicotiana tabacum]
  misc_feature (11)..(267): NCBI GI NO: 1084419 NR Description: histone H1 - common tobacco
  misc_feature (11)..(268): NCBI GI NO: 29469895 NR Description: histone H1 subtype 5 [Pisum sativum]
  misc_feature (11)..(268): NCBI GI NO: 28301619 NR Description: histone H1 [Pisum sativum]
  misc_feature (13)..(268): NCBI GI NO: 13540401 NR Description: histone H1 [Lens culinaris]
  misc_feature (11)..(267): NCBI GI NO: 121953 NR Description: HISTONE H1
QKKNFQIPRKMSTEEETKVVVESGDAEATVTEKKPAAKGGAKAKKTPAKKKPAAAPRKRTTSSHPPYEEMIKDAIVTLKERTGSSQYAIQKFIEEKQKSLPPTFRKLLLVNLRRLVASGKLVKVKASFKIPSAAKPAATTKPVNKKPAAAVTKPKGKAPAKAKPAAKGAKKPAAAAKPKAKTTATTKAAAKPKPKTKSVAAVSKTKAVAAKPKAKERPVKASRTSTRTSPGKKAAAPAKKAAAAATKKAPAKSVKVKSPAKRASTRKK

SEQ ID NO: 7336 - protein, 258 aa, Glycine max
  peptide (1)..(258): Ceres Seq. ID no. 14304161
  misc_feature (53)..(122): Pfam Name: Pfam Description:  linker histone H1 and H5 family
  misc_feature (1)..(257): NCBI GI NO: 15224536 NR Description: histone H1 [Arabidopsis thaliana]
  misc_feature (4)..(258): NCBI GI NO: 15222199 NR Description: histone H1, putative [Arabidopsis thaliana]
  misc_feature (27)..(258): NCBI GI NO: 16314 NR Description: histone H1-1 [Arabidopsis thaliana]
  misc_feature (1)..(257): NCBI GI NO: 585241 NR Description: HISTONE H1
  misc_feature (1)..(257): NCBI GI NO: 6681423 NR Description: histone H1 [Nicotiana tabacum]
  misc_feature (1)..(257): NCBI GI NO: 1084419 NR Description: histone H1 - common tobacco
  misc_feature (1)..(258): NCBI GI NO: 29469895 NR Description: histone H1 subtype 5 [Pisum sativum]
  misc_feature (1)..(258): NCBI GI NO: 28301619 NR Description: histone H1 [Pisum sativum]
  misc_feature (3)..(258): NCBI GI NO: 13540401 NR Description: histone H1 [Lens culinaris]
  misc_feature (1)..(257): NCBI GI NO: 121953 NR Description: HISTONE H1
MSTEEETKVVVESGDAEATVTEKKPAAKGGAKAKKTPAKKKPAAAPRKRTTSSHPPYEEMIKDAIVTLKERTGSSQYAIQKFIEEKQKSLPPTFRKLLLVNLRRLVASGKLVKVKASFKIPSAAKPAATTKPVNKKPAAAVTKPKGKAPAKAKPAAKGAKKPAAAAKPKAKTTATTKAAAKPKPKTKSVAAVSKTKAVAAKPKAKERPVKASRTSTRTSPGKKAAAPAKKAAAAATKKAPAKSVKVKSPAKRASTRKK

SEQ ID NO: 7337 - protein, 199 aa, Glycine max
  peptide (1)..(199): Ceres Seq. ID no. 14304162
  misc_feature (1)..(63): Pfam Name: Pfam Description:  linker histone H1 and H5 family
  misc_feature (1)..(198): NCBI GI NO: 15224536 NR Description: histone H1 [Arabidopsis thaliana]
  misc_feature (1)..(199): NCBI GI NO: 15222199 NR Description: histone H1, putative [Arabidopsis thaliana]
  misc_feature (1)..(199): NCBI GI NO: 16314 NR Description: histone H1-1 [Arabidopsis thaliana]
  misc_feature (1)..(198): NCBI GI NO: 585241 NR Description: HISTONE H1
  misc_feature (1)..(198): NCBI GI NO: 6681423 NR Description: histone H1 [Nicotiana tabacum]
  misc_feature (1)..(198): NCBI GI NO: 1084419 NR Description: histone H1 - common tobacco
  misc_feature (1)..(199): NCBI GI NO: 29469895 NR Description: histone H1 subtype 5 [Pisum sativum]
  misc_feature (1)..(199): NCBI GI NO: 28301619 NR Description: histone H1 [Pisum sativum]
  misc_feature (1)..(199): NCBI GI NO: 13540401 NR Description: histone H1 [Lens culinaris]
  misc_feature (1)..(198): NCBI GI NO: 121953 NR Description: HISTONE H1
MIKDAIVTLKERTGSSQYAIQKFIEEKQKSLPPTFRKLLLVNLRRLVASGKLVKVKASFKIPSAAKPAATTKPVNKKPAAAVTKPKGKAPAKAKPAAKGAKKPAAAAKPKAKTTATTKAAAKPKPKTKSVAAVSKTKAVAAKPKAKERPVKASRTSTRTSPGKKAAAPAKKAAAAATKKAPAKSVKVKSPAKRASTRKK

SEQ ID NO: 7338 - DNA, 904 bp, Glycine max
  misc_feature (1)..(904): Ceres Seq. ID no. 13639267
attctctgttttcttttaacatccgataaggatcggatctagctctcttcttattcgattcctctgtctcgtcgatcgaggaactaagcagtgatgggtgctggccggagatgggccgtcgatttctccgatcaatctaccgtcccatcttcccgggacatcctagatccacctggcttctctcgtgtttctcccgagcaggatgactcagcaacgagccgccaaaagaaagacgctgaagctaactggaaacttcagaaagcgtgggaagtagcgcagtcaccatttaagaatttgatgatgatgggtttcatgatgtggatggctggaaacactgttcatctctttagcattggtatcactttctctgctctttggcagcctctcagcgccctccagagcgttggaaaggtttttgagccattcaaggataacaaggtggaactacttatgcccaagctggtgtttcttgcccttaaccttggagggttagctttgggtatttggaagctcaacactttggggcttcttccaactcatgcatcagattgggtttcatctctaccccctcctcaggaggttgaacactctggcggaggatttgctttccactgatgagcatgtgtctctttgagataattacgaaagatacttaagtgatttgttcaatcctatatcatgaggggaagattcatgtggaccttctcatctcgtgatcttcttgtagcattttcaaaactctgaaaccatagcttttttcacttatggtgtgatgttcattgctcatcataactttgaattgtattattggcactgaaggaactttcccagcttttttatagacaggaatggataatgttacagactgaagtttggttcttaatttgcttgaaccatgactctg

SEQ ID NO: 7339 - protein, 173 aa, Glycine max
  peptide (1)..(173): Ceres Seq. ID no. 13639268
  misc_feature (1)..(173): NCBI GI NO: 18416375 NR Description: expressed protein [Arabidopsis thaliana]
  misc_feature (1)..(161): NCBI GI NO: 11358300 NR Description: hypothetical protein T30N20_50 - Arabidopsisthaliana
  misc_feature (1)..(169): NCBI GI NO: 37590930 NR Description: Unknown (protein for MGC:75691)
  misc_feature (1)..(169): NCBI GI NO: 7705997 NR Description: hypothetical protein LOC51234 [Homo sapiens]
  misc_feature (1)..(169): NCBI GI NO: 12834476 NR Description: unnamed protein product [Mus musculus]
  misc_feature (1)..(169): NCBI GI NO: 13386014 NR Description: RIKEN cDNA 2610318K02 [Mus musculus]
  misc_feature (6)..(166): NCBI GI NO: 39588364 NR Description: Hypothetical protein CBG19952
  misc_feature (5)..(168): NCBI GI NO: 28829924 NR Description: similar to ZK616.6.p
  misc_feature (6)..(171): NCBI GI NO: 31211131 NR Description: ENSANGP00000016305 [Anopheles gambiae]
  misc_feature (7)..(166): NCBI GI NO: 17544614 NR Description: Putative protein of eukaryotic origin
MGAGRRWAVDFSDQSTVPSSRDILDPPGFSRVSPEQDDSATSRQKKDAEANWKLQKAWEVAQSPFKNLMMMGFMMWMAGNTVHLFSIGITFSALWQPLSALQSVGKVFEPFKDNKVELLMPKLVFLALNLGGLALGIWKLNTLGLLPTHASDWVSSLPPPQEVEHSGGGFAFH

SEQ ID NO: 7340 - protein, 105 aa, Glycine max
  peptide (1)..(105): Ceres Seq. ID no. 13639269
  misc_feature (1)..(105): NCBI GI NO: 18416375 NR Description: expressed protein [Arabidopsis thaliana]
  misc_feature (1)..(93): NCBI GI NO: 11358300 NR Description: hypothetical protein T30N20_50 - Arabidopsisthaliana
  misc_feature (1)..(101): NCBI GI NO: 37590930 NR Description: Unknown (protein for MGC:75691)
  misc_feature (1)..(101): NCBI GI NO: 7705997 NR Description: hypothetical protein LOC51234 [Homo sapiens]
  misc_feature (1)..(101): NCBI GI NO: 12834476 NR Description: unnamed protein product [Mus musculus]
  misc_feature (1)..(101): NCBI GI NO: 13386014 NR Description: RIKEN cDNA 2610318K02 [Mus musculus]
  misc_feature (1)..(98): NCBI GI NO: 39588364 NR Description: Hypothetical protein CBG19952
  misc_feature (1)..(100): NCBI GI NO: 28829924 NR Description: similar to ZK616.6.p
  misc_feature (1)..(103): NCBI GI NO: 31211131 NR Description: ENSANGP00000016305 [Anopheles gambiae]
  misc_feature (1)..(98): NCBI GI NO: 17544614 NR Description: Putative protein of eukaryotic origin
MMMGFMMWMAGNTVHLFSIGITFSALWQPLSALQSVGKVFEPFKDNKVELLMPKLVFLALNLGGLALGIWKLNTLGLLPTHASDWVSSLPPPQEVEHSGGGFAFH

SEQ ID NO: 7341 - protein, 104 aa, Glycine max
  peptide (1)..(104): Ceres Seq. ID no. 13639270
  misc_feature (1)..(104): NCBI GI NO: 18416375 NR Description: expressed protein [Arabidopsis thaliana]
  misc_feature (1)..(92): NCBI GI NO: 11358300 NR Description: hypothetical protein T30N20_50 - Arabidopsisthaliana
  misc_feature (1)..(100): NCBI GI NO: 37590930 NR Description: Unknown (protein for MGC:75691)
  misc_feature (1)..(100): NCBI GI NO: 7705997 NR Description: hypothetical protein LOC51234 [Homo sapiens]
  misc_feature (1)..(100): NCBI GI NO: 13386014 NR Description: RIKEN cDNA 2610318K02 [Mus musculus]
  misc_feature (1)..(100): NCBI GI NO: 12834476 NR Description: unnamed protein product [Mus musculus]
  misc_feature (1)..(97): NCBI GI NO: 39588364 NR Description: Hypothetical protein CBG19952
  misc_feature (1)..(99): NCBI GI NO: 28829924 NR Description: similar to ZK616.6.p
  misc_feature (1)..(102): NCBI GI NO: 31211131 NR Description: ENSANGP00000016305 [Anopheles gambiae]
  misc_feature (1)..(97): NCBI GI NO: 17544614 NR Description: Putative protein of eukaryotic origin
MMGFMMWMAGNTVHLFSIGITFSALWQPLSALQSVGKVFEPFKDNKVELLMPKLVFLALNLGGLALGIWKLNTLGLLPTHASDWVSSLPPPQEVEHSGGGFAFH

SEQ ID NO: 7342 - DNA, 1200 bp, Glycine max
  misc_feature (1)..(1200): Ceres Seq. ID no. 14311163
agtccagagcgccgtgtccgccgaccaccacttcaactcctccactgcagcctgcaggaagctactagctagaacccgaataatctgcacctagccatggtgaagctagccacggcgcgggactgccgcgcgtacagcctcggcgccacgggcggcgagacgtcgcgcaaccggcggtgggagtacatcaacgcaggggtgtacgtcttcgccgccgtcctcctcgtcgttggcttcttggcgcagctgtggccgtgggcggtgtccaccaaggccggcctcgcggtggccgtcgtcgggctgctgggcgtgctgggagcgaacgcgcacgacctgctggcgcacgtcgccggcgtcgactacaaccttggcctggccgggctcgacacccagttcgtgctcgtcgagctcgccgcccccgccgtgcagctcgccggcgccgcgctcaccttggtcgcgctcatcttgttcgagatccagatggagagaggtcaccggcgtggcctggagaagcacggcctgaacctgctcatcgccgggccagcgctgtggtgcctcgggtccatacacaacatgtgccaagtctacgagcgagccaacgggcacgtccagatcctccagaagagcgtgcagatcccgtttctgctcggcagcaccctcttcttcatcggcggcgtcgtcaaccggaacgacgtccacggccactcctcccacagcttcaccctactggggaggagctgggcgtggtactgcctgttcgggagcctgctgttcttggcgggagggctgctgaacctgctcaaggtgttcaagatgcagcagatgggcgggcgggggctggagaagctgcgcggcggcgcgcaggagcggcttagcagggagagggagggcaaggtgcctctcatcctggaggagggacggagggggaagcacggaggcaatgtaggggacacctgggcgccgccggcgccgcggcacgagccgagggctccgccagtcccgccgccgccggagggttcttacaaggacgctgtcgtgagcggcggcaactagtgtgatcttgccgtccacggcggtaacgaataataagagaggacgtgacaaggcagctggtagaggcgaagcattggcttagggcgacgccatcctgtattttcctatctgtacacgatgtcatgtgaattatatcgacttgctgcc

SEQ ID NO: 7343 - protein, 318 aa, Glycine max
  peptide (1)..(318): Ceres Seq. ID no. 14311164
  misc_feature (1)..(315): NCBI GI NO: 15237898 NR Description: expressed protein [Arabidopsis thaliana]
MVKLATARDCRAYSLGATGGETSRNRRWEYINAGVYVFAAVLLVVGFLAQLWPWAVSTKAGLAVAVVGLLGVLGANAHDLLAHVAGVDYNLGLAGLDTQFVLVELAAPAVQLAGAALTLVALILFEIQMERGHRRGLEKHGLNLLIAGPALWCLGSIHNMCQVYERANGHVQILQKSVQIPFLLGSTLFFIGGVVNRNDVHGHSSHSFTLLGRSWAWYCLFGSLLFLAGGLLNLLKVFKMQQMGGRGLEKLRGGAQERLSREREGKVPLILEEGRRGKHGGNVGDTWAPPAPRHEPRAPPVPPPPEGSYKDAVVSGGN

SEQ ID NO: 7344 - protein, 190 aa, Glycine max
  peptide (1)..(190): Ceres Seq. ID no. 14311165
  misc_feature (1)..(187): NCBI GI NO: 15237898 NR Description: expressed protein [Arabidopsis thaliana]
MERGHRRGLEKHGLNLLIAGPALWCLGSIHNMCQVYERANGHVQILQKSVQIPFLLGSTLFFIGGVVNRNDVHGHSSHSFTLLGRSWAWYCLFGSLLFLAGGLLNLLKVFKMQQMGGRGLEKLRGGAQERLSREREGKVPLILEEGRRGKHGGNVGDTWAPPAPRHEPRAPPVPPPPEGSYKDAVVSGGN

SEQ ID NO: 7345 - protein, 159 aa, Glycine max
  peptide (1)..(159): Ceres Seq. ID no. 14311166
  misc_feature (1)..(156): NCBI GI NO: 15237898 NR Description: expressed protein [Arabidopsis thaliana]
MCQVYERANGHVQILQKSVQIPFLLGSTLFFIGGVVNRNDVHGHSSHSFTLLGRSWAWYCLFGSLLFLAGGLLNLLKVFKMQQMGGRGLEKLRGGAQERLSREREGKVPLILEEGRRGKHGGNVGDTWAPPAPRHEPRAPPVPPPPEGSYKDAVVSGGN

SEQ ID NO: 7346 - DNA, 1311 bp, Glycine max
  misc_feature (1)..(1311): Ceres Seq. ID no. 13595454
atcttaaagacgaaccaaaatgagagagagaattattcatgatatgttttgttcttaattggaaaattgtaatgcatgcacactctcttgaagggtaagtttctgagaattttctgtcactttctcggcaaaaaattatgtcttccctctccaatcttgaacgctttctcctacgcgtcactccagatgttccgtcactcactcttcagagctgctgtagtgatctaaatgcacaatggctacctcctggcaaagacacaatcgaatatttcactctgaaagatctttgggactgctactatgaatggagtgcctttggtgctggcattcctatgatattggaaaatggtgacactctggtgcaatactatgctccatatctgtctgctacccaaatctatatcagtaaatctaggattcggaaagagtacggtgaaggagttgaagttgaatgtgattccttgagcgaggacagtgcaagtgataacctttctagatcacccagtaacaattctagcaaagcatgggatgatgcttctttggattcaggctctgaccaagtgggttcatgcacaacaaaggatatgcttggcgctctttacttacaatactctgagaactctccaccttaccagcgggttccattttctgagaagataaccgagttagctaaaagccatccaggattgatgaggttgaagagtgtggatatttcccccacaagttggatggctgtttcatggtatcccatttattccgtaccatgccacaaaaataaaagggaccaaacaagcttcctcactttccattcactttcatctttccaagactgtgcaagcaaatatgacgaaattcacacagggaataacaaaagttgtttaattgattggcgaagtattgtgggagagaaatgcaagaaaaaagagaggggttgcatgtctctctctccttttgggttagccacgtacaaaatgaggaaaaacatatggttaaatccctataacaataaccaagtggtgaccgatctatacaacgctgcagactggtggttgaagcatatcaacgctgaccaccctgacttcaacttcttcacacgccaacctaccttgtagattggtttgtgttgtgttcatcaccaccagctcaatgcccctttgctcagtttgctactctcatttcggtatcagaatttgcttagtttggtactctgaccttcaccctaggtccaactctgagaacattaataaataaaatgtaaagtttagtttaatgggttcatgtaaagtgatatttatcttagcttctttaccc

SEQ ID NO: 7347 - protein, 324 aa, Glycine max
  peptide (1)..(324): Ceres Seq. ID no. 13595455
  misc_feature (5)..(318): Pfam Name: DUF789 Pfam Description: Protein of unknown function
  misc_feature (5)..(324): NCBI GI NO: 18394539 NR Description: expressed protein [Arabidopsis thaliana]
  misc_feature (5)..(324): NCBI GI NO: 21593308 NR Description: unknown [Arabidopsis thaliana]
  misc_feature (5)..(318): NCBI GI NO: 27754726 NR Description: unknown protein [Arabidopsis thaliana]
  misc_feature (5)..(324): NCBI GI NO: 25373431 NR Description: hypothetical protein AT4g03420
  misc_feature (5)..(318): NCBI GI NO: 15219407 NR Description: expressed protein [Arabidopsis thaliana]
  misc_feature (5)..(320): NCBI GI NO: 22328289 NR Description: expressed protein [Arabidopsis thaliana]
  misc_feature (5)..(318): NCBI GI NO: 9280648 NR Description: F21B7.22 [Arabidopsis thaliana]
  misc_feature (5)..(318): NCBI GI NO: 18379117 NR Description: expressed protein [Arabidopsis thaliana]
  misc_feature (5)..(318): NCBI GI NO: 18958013 NR Description: At1g03610/F21B7_13 [Arabidopsis thaliana]
  misc_feature (5)..(202): NCBI GI NO: 7485906 NR Description: hypothetical protein F21B7
MSSLSNLERFLLRVTPDVPSLTLQSCCSDLNAQWLPPGKDTIEYFTLKDLWDCYYEWSAFGAGIPMILENGDTLVQYYAPYLSATQIYISKSRIRKEYGEGVEVECDSLSEDSASDNLSRSPSNNSSKAWDDASLDSGSDQVGSCTTKDMLGALYLQYSENSPPYQRVPFSEKITELAKSHPGLMRLKSVDISPTSWMAVSWYPIYSVPCHKNKRDQTSFLTFHSLSSFQDCASKYDEIHTGNNKSCLIDWRSIVGEKCKKKERGCMSLSPFGLATYKMRKNIWLNPYNNNQVVTDLYNAADWWLKHINADHPDFNFFTRQPTL

SEQ ID NO: 7348 - protein, 259 aa, Glycine max
  peptide (1)..(259): Ceres Seq. ID no. 13595456
  misc_feature (1)..(253): Pfam Name: DUF789 Pfam Description: Protein of unknown function
  misc_feature (1)..(259): NCBI GI NO: 18394539 NR Description: expressed protein [Arabidopsis thaliana]
  misc_feature (1)..(259): NCBI GI NO: 21593308 NR Description: unknown [Arabidopsis thaliana]
  misc_feature (1)..(253): NCBI GI NO: 27754726 NR Description: unknown protein [Arabidopsis thaliana]
  misc_feature (1)..(259): NCBI GI NO: 25373431 NR Description: hypothetical protein AT4g03420
  misc_feature (1)..(253): NCBI GI NO: 15219407 NR Description: expressed protein [Arabidopsis thaliana]
  misc_feature (1)..(255): NCBI GI NO: 22328289 NR Description: expressed protein [Arabidopsis thaliana]
  misc_feature (1)..(253): NCBI GI NO: 9280648 NR Description: F21B7.22 [Arabidopsis thaliana]
  misc_feature (1)..(253): NCBI GI NO: 18379117 NR Description: expressed protein [Arabidopsis thaliana]
  misc_feature (1)..(253): NCBI GI NO: 18958013 NR Description: At1g03610/F21B7_13 [Arabidopsis thaliana]
  misc_feature (1)..(137): NCBI GI NO: 7485906 NR Description: hypothetical protein F21B7
MILENGDTLVQYYAPYLSATQIYISKSRIRKEYGEGVEVECDSLSEDSASDNLSRSPSNNSSKAWDDASLDSGSDQVGSCTTKDMLGALYLQYSENSPPYQRVPFSEKITELAKSHPGLMRLKSVDISPTSWMAVSWYPIYSVPCHKNKRDQTSFLTFHSLSSFQDCASKYDEIHTGNNKSCLIDWRSIVGEKCKKKERGCMSLSPFGLATYKMRKNIWLNPYNNNQVVTDLYNAADWWLKHINADHPDFNFFTRQPTL

SEQ ID NO: 7349 - protein, 175 aa, Glycine max
  peptide (1)..(175): Ceres Seq. ID no. 13595457
  misc_feature (1)..(169): Pfam Name: DUF789 Pfam Description: Protein of unknown function
  misc_feature (1)..(175): NCBI GI NO: 18394539 NR Description: expressed protein [Arabidopsis thaliana]
  misc_feature (1)..(175): NCBI GI NO: 21593308 NR Description: unknown [Arabidopsis thaliana]
  misc_feature (1)..(169): NCBI GI NO: 27754726 NR Description: unknown protein [Arabidopsis thaliana]
  misc_feature (1)..(175): NCBI GI NO: 25373431 NR Description: hypothetical protein AT4g03420
  misc_feature (1)..(169): NCBI GI NO: 15219407 NR Description: expressed protein [Arabidopsis thaliana]
  misc_feature (1)..(171): NCBI GI NO: 22328289 NR Description: expressed protein [Arabidopsis thaliana]
  misc_feature (1)..(169): NCBI GI NO: 9280648 NR Description: F21B7.22 [Arabidopsis thaliana]
  misc_feature (1)..(169): NCBI GI NO: 18379117 NR Description: expressed protein [Arabidopsis thaliana]
  misc_feature (1)..(169): NCBI GI NO: 18958013 NR Description: At1g03610/F21B7_13 [Arabidopsis thaliana]
  misc_feature (1)..(53): NCBI GI NO: 7485906 NR Description: hypothetical protein F21B7
MLGALYLQYSENSPPYQRVPFSEKITELAKSHPGLMRLKSVDISPTSWMAVSWYPIYSVPCHKNKRDQTSFLTFHSLSSFQDCASKYDEIHTGNNKSCLIDWRSIVGEKCKKKERGCMSLSPFGLATYKMRKNIWLNPYNNNQVVTDLYNAADWWLKHINADHPDFNFFTRQPTL

SEQ ID NO: 7350 - DNA, 1032 bp, Glycine max
  misc_feature (1)..(1032): Ceres Seq. ID no. 13639317
taaccgcatcattcctcctcatccgtcggcgatcggcataaggcagcgctccaccccgttggcatacccagactaactcatcgcgtgccggatcagctccagccatggcgtcgatgcaggctcccgcgccggggccgtcagggtacccgccgcacggcggccaggccgcgcgcccgcagtccacggccgtcgccgtcacggcggccagcaacggcgccggaaacccctacgtgcaggtcaccccggccagcgcgtccccctccacctgccagtccatcatgaaggcgctggggcggtacggcaagctgctggaggacggcacccgcaaggccgccgacaccaccggcaacatctggaaccacctccggacggcgccgaacatggcggacgcggcggtggcgcggctggcgcaggggaccaaggtgtacgcggagggcgggcacgagagggtgttccatcaggtgttcggcgccgtgcccggggagcagctccgcaaggcctacgcctgctacctctccacctcatccggccccgtcatcggcacgctctacctctccacggggcgcctcgccttctgcagcgactcccccgtctcctaccacgccccctccggcagccagccgccggagcccatgtactacaaggtggtgcttccgctgaaccaggtgaggacggtgagcccgtccgccagcatgtggaggccgtcggagcggtacatccaggtggccaccaccgacaaccacgagttctggttcatgggcttcgtctcctacgacaaggcgctcaagcacctctccgacgccctgcagcgccgtccctgaccgatccccgtccgtccgtccgtctgcaccatcgcagctgctaggagtataagctccagttcttcggcagtggcactatcctgtcactgactgatcagtgtttgtactcttcattcctgtaccgcaactcgccccatcagcagttcttgctctggaataatttataagacaccaataaagctccgttgcctgccgtcggtatcaccaacct

SEQ ID NO: 7351 - protein, 238 aa, Glycine max
  peptide (1)..(238): Ceres Seq. ID no. 13639318
  misc_feature (1)..(237): NCBI GI NO: 29788871 NR Description: putative ABA-responsive protein
  misc_feature (1)..(235): NCBI GI NO: 15217869 NR Description: GRAM domain-containing protein
  misc_feature (1)..(235): NCBI GI NO: 34902414 NR Description: Putative FH protein interacting protein FIP1
  misc_feature (33)..(235): NCBI GI NO: 18399985 NR Description: GRAM domain-containing protein
  misc_feature (33)..(235): NCBI GI NO: 21592789 NR Description: unknown [Arabidopsis thaliana]
  misc_feature (33)..(235): NCBI GI NO: 26452129 NR Description: unknown protein [Arabidopsis thaliana]
  misc_feature (56)..(235): NCBI GI NO: 34906818 NR Description: contains EST C91668
  misc_feature (26)..(234): NCBI GI NO: 15234255 NR Description: ABA-repsonsiveprotein -related
  misc_feature (22)..(230): NCBI GI NO: 15240044 NR Description: GRAM domain-containing protein
  misc_feature (98)..(235): NCBI GI NO: 33146631 NR Description: putative FH protein interacting protein FIP1
MASMQAPAPGPSGYPPHGGQAARPQSTAVAVTAASNGAGNPYVQVTPASASPSTCQSIMKALGRYGKLLEDGTRKAADTTGNIWNHLRTAPNMADAAVARLAQGTKVYAEGGHERVFHQVFGAVPGEQLRKAYACYLSTSSGPVIGTLYLSTGRLAFCSDSPVSYHAPSGSQPPEPMYYKVVLPLNQVRTVSPSASMWRPSERYIQVATTDNHEFWFMGFVSYDKALKHLSDALQRRP

SEQ ID NO: 7352 - protein, 235 aa, Glycine max
  peptide (1)..(235): Ceres Seq. ID no. 13639319
  misc_feature (1)..(234): NCBI GI NO: 29788871 NR Description: putative ABA-responsive protein
  misc_feature (1)..(232): NCBI GI NO: 15217869 NR Description: GRAM domain-containing protein
  misc_feature (1)..(232): NCBI GI NO: 34902414 NR Description: Putative FH protein interacting protein FIP1
  misc_feature (30)..(232): NCBI GI NO: 18399985 NR Description: GRAM domain-containing protein
  misc_feature (30)..(232): NCBI GI NO: 21592789 NR Description: unknown [Arabidopsis thaliana]
  misc_feature (30)..(232): NCBI GI NO: 26452129 NR Description: unknown protein [Arabidopsis thaliana]
  misc_feature (53)..(232): NCBI GI NO: 34906818 NR Description: contains EST C91668
  misc_feature (23)..(231): NCBI GI NO: 15234255 NR Description: ABA-repsonsiveprotein -related
  misc_feature (19)..(227): NCBI GI NO: 15240044 NR Description: GRAM domain-containing protein
  misc_feature (95)..(232): NCBI GI NO: 33146631 NR Description: putative FH protein interacting protein FIP1
MQAPAPGPSGYPPHGGQAARPQSTAVAVTAASNGAGNPYVQVTPASASPSTCQSIMKALGRYGKLLEDGTRKAADTTGNIWNHLRTAPNMADAAVARLAQGTKVYAEGGHERVFHQVFGAVPGEQLRKAYACYLSTSSGPVIGTLYLSTGRLAFCSDSPVSYHAPSGSQPPEPMYYKVVLPLNQVRTVSPSASMWRPSERYIQVATTDNHEFWFMGFVSYDKALKHLSDALQRRP

SEQ ID NO: 7353 - protein, 180 aa, Glycine max
  peptide (1)..(180): Ceres Seq. ID no. 13639320
  misc_feature (1)..(179): NCBI GI NO: 29788871 NR Description: putative ABA-responsive protein
  misc_feature (1)..(177): NCBI GI NO: 15217869 NR Description: GRAM domain-containing protein
  misc_feature (1)..(177): NCBI GI NO: 34902414 NR Description: Putative FH protein interacting protein FIP1
  misc_feature (1)..(177): NCBI GI NO: 18399985 NR Description: GRAM domain-containing protein
  misc_feature (1)..(177): NCBI GI NO: 21592789 NR Description: unknown [Arabidopsis thaliana]
  misc_feature (1)..(177): NCBI GI NO: 26452129 NR Description: unknown protein [Arabidopsis thaliana]
  misc_feature (1)..(177): NCBI GI NO: 34906818 NR Description: contains EST C91668
  misc_feature (1)..(176): NCBI GI NO: 15234255 NR Description: ABA-repsonsiveprotein -related
  misc_feature (1)..(172): NCBI GI NO: 15240044 NR Description: GRAM domain-containing protein
  misc_feature (40)..(177): NCBI GI NO: 33146631 NR Description: putative FH protein interacting protein FIP1
MKALGRYGKLLEDGTRKAADTTGNIWNHLRTAPNMADAAVARLAQGTKVYAEGGHERVFHQVFGAVPGEQLRKAYACYLSTSSGPVIGTLYLSTGRLAFCSDSPVSYHAPSGSQPPEPMYYKVVLPLNQVRTVSPSASMWRPSERYIQVATTDNHEFWFMGFVSYDKALKHLSDALQRRP

SEQ ID NO: 7354 - DNA, 673 bp, Glycine max
  misc_feature (1)..(673): Ceres Seq. ID no. 12783386
acatcgattccttcctgccactccttcctcgcatgccccctgagttcctgcaccgagactgctagctagctataatctcctcggcttctttctccgtcccctcggccggcctgccacccgatcgttcctgatgtccggcaccgtgtgctccatgtgcggcgacgtcggcttccaggacaagctcttccgctgcgcccgttgccgctgccgcttccaacactcctattgcacgaactactacggcgacgcggccccggctgacgcgggcgccggcgtgtgcgactggtgcctcagcgacgaccccctcgtgaagaacaggcgcccttcggcgccgccggccatgcagcaccgcggtccgccgaccgggatgggctgcggcaaggtcaaggtgaccggcggcggcgagcaggagggcggccggagagtggccaaggcggccgtccgcaggtacaagctcctcaaagacgtccttgctagctagctggtgcatgcatggtcctgggtcaccgcactcctttccttagatcgggacctcgtcatcatgtgtactaaaaaacgatgctgtttaattaagtagtcgatagtcgttgtacctagctagctggcgaggttctgcttccatatcgatccttgtgtgcaaatgtcggcatgtcacaatgagatctacttctgt

SEQ ID NO: 7355 - protein, 116 aa, Glycine max
  peptide (1)..(116): Ceres Seq. ID no. 12783387
  misc_feature (2)..(114): NCBI GI NO: 38345466 NR Description: OSJNBa0010H02.4
  misc_feature (2)..(107): NCBI GI NO: 21742342 NR Description: OSJNBb0034G17.21
  misc_feature (5)..(62): NCBI GI NO: 18378917 NR Description: hypothetical protein    predicted by genefinder
  misc_feature (8)..(62): NCBI GI NO: 21553800 NR Description: unknown [Arabidopsis thaliana]
  misc_feature (5)..(53): NCBI GI NO: 15232353 NR Description: putative protein; protein id: At3g60520
  misc_feature (8)..(63): NCBI GI NO: 21554245 NR Description: unknown [Arabidopsis thaliana]
  misc_feature (2)..(58): NCBI GI NO: 21740708 NR Description: OSJNBa0086B14.1
MSGTVCSMCGDVGFQDKLFRCARCRCRFQHSYCTNYYGDAAPADAGAGVCDWCLSDDPLVKNRRPSAPPAMQHRGPPTGMGCGKVKVTGGGEQEGGRRVAKAAVRRYKLLKDVLAS

SEQ ID NO: 7356 - protein, 109 aa, Glycine max
  peptide (1)..(109): Ceres Seq. ID no. 12783388
  misc_feature (1)..(107): NCBI GI NO: 38345466 NR Description: OSJNBa0010H02.4
  misc_feature (1)..(100): NCBI GI NO: 21742342 NR Description: OSJNBb0034G17.21
  misc_feature (1)..(55): NCBI GI NO: 18378917 NR Description: hypothetical protein    predicted by genefinder
  misc_feature (1)..(55): NCBI GI NO: 21553800 NR Description: unknown [Arabidopsis thaliana]
  misc_feature (1)..(46): NCBI GI NO: 15232353 NR Description: putative protein; protein id: At3g60520
  misc_feature (1)..(56): NCBI GI NO: 21554245 NR Description: unknown [Arabidopsis thaliana]
  misc_feature (1)..(51): NCBI GI NO: 21740708 NR Description: OSJNBa0086B14.1
MCGDVGFQDKLFRCARCRCRFQHSYCTNYYGDAAPADAGAGVCDWCLSDDPLVKNRRPSAPPAMQHRGPPTGMGCGKVKVTGGGEQEGGRRVAKAAVRRYKLLKDVLAS

SEQ ID NO: 7357 - DNA, 1365 bp, Glycine max
  misc_feature (1)..(1365): Ceres Seq. ID no. 13582301
agagattagaaactaattactcttgtgatattctctcacaagggtgtgtaattaaggcatagaaaatatggcatcctttgccagcaataattatcctttggtgtttttctttgttctcttttcactggccatgcgcttagctcatgggactaattatgcaccaacattattcatatttggagactcaacttttgatgttggaaccaacaactttcttaattctaaagcaaaggccaacttcccctacaatggcattgatttttatcctccatttcccacaggaaggtttagtaatggcttcaacactgctgaccaaattgcgagacaattcggttataagcagagcccaccaccatttttaactttggagaaagaccaatacagcctaaagaagaacattctgaagggtgtaaattttgcttcagggggatctggaattcttagagaaacagggcactcagaatggggagaagtggttttctttgaaaggcaggtggaacaatttgcatcggttggtggaaacatcagtgagatgttgggacatgcacaagctgctaaatttgtttccaaggctttgtttctcattagcgttggaagcaacgacatcttcgattatgcacgtaacgacagtggctccattcatttgggcgcagaagaatacttagctgttgtacaactcacatattactctcatataaagaaactatatgagttgggggcaaggaaatttggcatcataagcgttgcaaccgtaggttgctgtcctgctgtaagctctctcaatggagggaagtgcgtggaaccactgaatgattttgcagttgcattttatttagctacacaagctcttctgcaaaagttgagttcagaattgaaagggttcaagtactcacttggcaactcttttgaaatgacctcgaccttgttaaagagtccatcgtccttcgggttgaagtatacacagtcagcatgctgcggaattggatatctgaatgggcaaggtggatgcataaaagcccaaaacgccaatctttgcacaaatcgcaatgagttcttgttttgggattggtttcatcccactgagatagcttctttgttggcagctaagacattatttgaaggagacaaagagtttgtaactccagtgaatttacgtcagctagcttattcctattgatcatgtctaagccataacataagtaaccaattactataatttgaagtgaaataacgtagctggcatctctcactagtgccggttttaggctctttttttcttttgttgagaaaaattctcatgcataatctaatgatatgctaataagagttgctatttataaaaaaaaaaaaaaaaaagcttatcga

SEQ ID NO: 7358 - protein, 369 aa, Glycine max
  peptide (1)..(369): Ceres Seq. ID no. 13582302
  misc_feature (34)..(342): Pfam Name: Pfam Description:  GDSL-like Lipase/Acylhydrolase
  misc_feature (9)..(366): NCBI GI NO: 38345853 NR Description: OSJNBa0084K11.17
  misc_feature (5)..(366): NCBI GI NO: 29837765 NR Description: putative GDSL-like lipase/acylhydrolase
  misc_feature (6)..(365): NCBI GI NO: 15240452 NR Description: GDSL-motif lipase/hydrolase protein
  misc_feature (33)..(365): NCBI GI NO: 15238210 NR Description: GDSL-motif lipase/hydrolase protein
  misc_feature (10)..(366): NCBI GI NO: 34909504 NR Description: putative GDSL-motif lipase/hydrolase-like protein
  misc_feature (27)..(366): NCBI GI NO: 18409881 NR Description: GDSL-motif lipase/hydrolase protein
  misc_feature (11)..(366): NCBI GI NO: 15242458 NR Description: GDSL-motif lipase/hydrolase protein
  misc_feature (11)..(366): NCBI GI NO: 21553940 NR Description: GDSL-motif lipase/hydrolase-like protein
  misc_feature (15)..(362): NCBI GI NO: 15242808 NR Description: GDSL-motif lipase/hydrolase protein
  misc_feature (19)..(366): NCBI GI NO: 7485419 NR Description: hypothetical protein F13C5
MASFASNNYPLVFFFVLFSLAMRLAHGTNYAPTLFIFGDSTFDVGTNNFLNSKAKANFPYNGIDFYPPFPTGRFSNGFNTADQIARQFGYKQSPPPFLTLEKDQYSLKKNILKGVNFASGGSGILRETGHSEWGEVVFFERQVEQFASVGGNISEMLGHAQAAKFVSKALFLISVGSNDIFDYARNDSGSIHLGAEEYLAVVQLTYYSHIKKLYELGARKFGIISVATVGCCPAVSSLNGGKCVEPLNDFAVAFYLATQALLQKLSSELKGFKYSLGNSFEMTSTLLKSPSSFGLKYTQSACCGIGYLNGQGGCIKAQNANLCTNRNEFLFWDWFHPTEIASLLAAKTLFEGDKEFVTPVNLRQLAYSY

SEQ ID NO: 7359 - protein, 348 aa, Glycine max
  peptide (1)..(348): Ceres Seq. ID no. 13582303
  misc_feature (13)..(321): Pfam Name: Pfam Description:  GDSL-like Lipase/Acylhydrolase
  misc_feature (1)..(345): NCBI GI NO: 38345853 NR Description: OSJNBa0084K11.17
  misc_feature (1)..(345): NCBI GI NO: 29837765 NR Description: putative GDSL-like lipase/acylhydrolase
  misc_feature (1)..(344): NCBI GI NO: 15240452 NR Description: GDSL-motif lipase/hydrolase protein
  misc_feature (12)..(344): NCBI GI NO: 15238210 NR Description: GDSL-motif lipase/hydrolase protein
  misc_feature (1)..(345): NCBI GI NO: 34909504 NR Description: putative GDSL-motif lipase/hydrolase-like protein
  misc_feature (6)..(345): NCBI GI NO: 18409881 NR Description: GDSL-motif lipase/hydrolase protein
  misc_feature (1)..(345): NCBI GI NO: 15242458 NR Description: GDSL-motif lipase/hydrolase protein
  misc_feature (1)..(345): NCBI GI NO: 21553940 NR Description: GDSL-motif lipase/hydrolase-like protein
  misc_feature (1)..(341): NCBI GI NO: 15242808 NR Description: GDSL-motif lipase/hydrolase protein
  misc_feature (1)..(345): NCBI GI NO: 7485419 NR Description: hypothetical protein F13C5
MRLAHGTNYAPTLFIFGDSTFDVGTNNFLNSKAKANFPYNGIDFYPPFPTGRFSNGFNTADQIARQFGYKQSPPPFLTLEKDQYSLKKNILKGVNFASGGSGILRETGHSEWGEVVFFERQVEQFASVGGNISEMLGHAQAAKFVSKALFLISVGSNDIFDYARNDSGSIHLGAEEYLAVVQLTYYSHIKKLYELGARKFGIISVATVGCCPAVSSLNGGKCVEPLNDFAVAFYLATQALLQKLSSELKGFKYSLGNSFEMTSTLLKSPSSFGLKYTQSACCGIGYLNGQGGCIKAQNANLCTNRNEFLFWDWFHPTEIASLLAAKTLFEGDKEFVTPVNLRQLAYSY

SEQ ID NO: 7360 - protein, 214 aa, Glycine max
  peptide (1)..(214): Ceres Seq. ID no. 13582304
  misc_feature (1)..(187): Pfam Name: Pfam Description:  GDSL-like Lipase/Acylhydrolase
  misc_feature (1)..(211): NCBI GI NO: 38345853 NR Description: OSJNBa0084K11.17
  misc_feature (1)..(211): NCBI GI NO: 29837765 NR Description: putative GDSL-like lipase/acylhydrolase
  misc_feature (1)..(210): NCBI GI NO: 15240452 NR Description: GDSL-motif lipase/hydrolase protein
  misc_feature (1)..(210): NCBI GI NO: 15238210 NR Description: GDSL-motif lipase/hydrolase protein
  misc_feature (1)..(211): NCBI GI NO: 34909504 NR Description: putative GDSL-motif lipase/hydrolase-like protein
  misc_feature (1)..(211): NCBI GI NO: 18409881 NR Description: GDSL-motif lipase/hydrolase protein
  misc_feature (1)..(211): NCBI GI NO: 15242458 NR Description: GDSL-motif lipase/hydrolase protein
  misc_feature (1)..(211): NCBI GI NO: 21553940 NR Description: GDSL-motif lipase/hydrolase-like protein
  misc_feature (1)..(207): NCBI GI NO: 15242808 NR Description: GDSL-motif lipase/hydrolase protein
  misc_feature (1)..(211): NCBI GI NO: 7485419 NR Description: hypothetical protein F13C5
MLGHAQAAKFVSKALFLISVGSNDIFDYARNDSGSIHLGAEEYLAVVQLTYYSHIKKLYELGARKFGIISVATVGCCPAVSSLNGGKCVEPLNDFAVAFYLATQALLQKLSSELKGFKYSLGNSFEMTSTLLKSPSSFGLKYTQSACCGIGYLNGQGGCIKAQNANLCTNRNEFLFWDWFHPTEIASLLAAKTLFEGDKEFVTPVNLRQLAYSY

SEQ ID NO: 7361 - DNA, 808 bp, Glycine max
  misc_feature (1)..(808): Ceres Seq. ID no. 12583465
agaaagattagatagcgtgtgggaaatcaagagcagagctgaaacttcttctcttcacttgaaactgtgtttgaaaaagaaaaaaaacatggccacactattctcacctttgtctctgcactctgctcgcccctcttcttcttccttttcttcttcttcttcttcttcttcatcttctcccttctttgccttttgcagcttccctttgcgctctcgcatttcatctttgaaggcacaaacaattcttcttcagaagatgaagcgcgtggtaaaggcagtggaagaagagacccagcaagaactcaccgctgtggatgagtctgaacaaccatcaacctccgaagcaccacccgttgtggttcccgtttccccatcagatactctcaccatgttctttcaggcagagggaacagtgagtgaaacagctattccagctttaaccaaagctttagaggagacagatggtgttactgatttgaagtttcagcttgccgagggacttgcaattttagagttgaagaagcagacaacagtccaagctacaggagtggcttctggtcttttagaaaccatacaaggttcaggctttaaactacagacattaaatctgagttttgaggatgaagaagttgcagttgcctagactaaatgtgctggtgttataacaatagtttgagggagtaaaaaaaaaatttaaagaacatgcctttcacacattcctgactagagcctcgaacaatcattttggtttgtatagggctgactgaggatattggttattattattattgttgttcttgttatcatt

SEQ ID NO: 7362 - protein, 213 aa, Glycine max
  peptide (1)..(213): Ceres Seq. ID no. 12583466
  misc_feature (99)..(212): NCBI GI NO: 18417512 NR Description: putative protein; protein id: At5g14910
  misc_feature (99)..(212): NCBI GI NO: 11346179 NR Description: hypothetical protein F2G14_30 - Arabidopsisthaliana
ERLDSVWEIKSRAETSSLHLKLCLKKKKNMATLFSPLSLHSARPSSSSFSSSSSSSSSSPFFAFCSFPLRSRISSLKAQTILLQKMKRVVKAVEEETQQELTAVDESEQPSTSEAPPVVVPVSPSDTLTMFFQAEGTVSETAIPALTKALEETDGVTDLKFQLAEGLAILELKKQTTVQATGVASGLLETIQGSGFKLQTLNLSFEDEEVAVA

SEQ ID NO: 7363 - protein, 184 aa, Glycine max
  peptide (1)..(184): Ceres Seq. ID no. 12583467
  misc_feature (70)..(183): NCBI GI NO: 18417512 NR Description: putative protein; protein id: At5g14910
  misc_feature (70)..(183): NCBI GI NO: 11346179 NR Description: hypothetical protein F2G14_30 - Arabidopsisthaliana
MATLFSPLSLHSARPSSSSFSSSSSSSSSSPFFAFCSFPLRSRISSLKAQTILLQKMKRVVKAVEEETQQELTAVDESEQPSTSEAPPVVVPVSPSDTLTMFFQAEGTVSETAIPALTKALEETDGVTDLKFQLAEGLAILELKKQTTVQATGVASGLLETIQGSGFKLQTLNLSFEDEEVAVA

SEQ ID NO: 7364 - protein, 128 aa, Glycine max
  peptide (1)..(128): Ceres Seq. ID no. 12583468
  misc_feature (14)..(127): NCBI GI NO: 18417512 NR Description: putative protein; protein id: At5g14910
  misc_feature (14)..(127): NCBI GI NO: 11346179 NR Description: hypothetical protein F2G14_30 - Arabidopsisthaliana
MKRVVKAVEEETQQELTAVDESEQPSTSEAPPVVVPVSPSDTLTMFFQAEGTVSETAIPALTKALEETDGVTDLKFQLAEGLAILELKKQTTVQATGVASGLLETIQGSGFKLQTLNLSFEDEEVAVA

SEQ ID NO: 7365 - DNA, 551 bp, Glycine max
  misc_feature (1)..(551): Ceres Seq. ID no. 13595787
acacaaacacaaaacccacaagaccagaaaaaaaaaaacagagagtaaacatgagatctctcttcttactagccttgttcctagttcttgcttttcaccatggtgaagcagccgtgacttgcaacaacgtggttggtgatctttacccttgcctctcctacgtgatgcaaggcggaaacgctccatcaactaactgctgcaacggtgtcagaacgctcaacagtcaggctcaaaccactgcggatcgtcagagtgtttgtcgttgcatcaaaaatgctattggaggagcctcttactcttcaagcaaccttaacaatgctctgtctttgcctgctaagtgtggtgttaatctccctttcagtatcagcccttccaccaactgcaacagtatccactgaaataagcagaagatcctgaaggaagctactactactactacactactacaagaacttaggacatggcctggtagtagtaactacgttgttcagtgatgtatcttcatctctatgttcttcaaggttctaataaaaattacaacatgctatgag

SEQ ID NO: 7366 - protein, 131 aa, Glycine max
  peptide (1)..(131): Ceres Seq. ID no. 13595788
  misc_feature (40)..(127): Pfam Name: Pfam Description:  Protease inhibitor/seed storage/LTP family
  misc_feature (17)..(130): NCBI GI NO: 15231964 NR Description: lipid transfer protein 6 (ltp6)
  misc_feature (17)..(130): NCBI GI NO: 15241086 NR Description: lipid transfer protein, putative
  misc_feature (36)..(130): NCBI GI NO: 2497753 NR Description: NONSPECIFIC LIPID-TRANSFER PROTEIN 3 PRECURSOR
  misc_feature (27)..(130): NCBI GI NO: 16903206 NR Description: lipid transfer protein precursor
  misc_feature (14)..(131): NCBI GI NO: 2497746 NR Description: NONSPECIFIC LIPID-TRANSFER PROTEIN 2 PRECURSOR
  misc_feature (15)..(130): NCBI GI NO: 16930759 NR Description: lipid transfer protein-like protein
  misc_feature (14)..(131): NCBI GI NO: 7438275 NR Description: lipid transfer protein LPT II - rice
  misc_feature (23)..(130): NCBI GI NO: 14423814 NR Description: Nonspecific lipid-transfer protein precursor
  misc_feature (11)..(131): NCBI GI NO: 128388 NR Description: Nonspecific lipid-transfer protein precursor
  misc_feature (14)..(130): NCBI GI NO: 6782436 NR Description: lipid-transfer protein [Nicotiana glauca]
TNTKPTRPEKKKQRVNMRSLFLLALFLVLAFHHGEAAVTCNNVVGDLYPCLSYVMQGGNAPSTNCCNGVRTLNSQAQTTADRQSVCRCIKNAIGGASYSSSNLNNALSLPAKCGVNLPFSISPSTNCNSIH

SEQ ID NO: 7367 - protein, 115 aa, Glycine max
  peptide (1)..(115): Ceres Seq. ID no. 13595789
  misc_feature (24)..(111): Pfam Name: Pfam Description:  Protease inhibitor/seed storage/LTP family
  misc_feature (1)..(114): NCBI GI NO: 15231964 NR Description: lipid transfer protein 6 (ltp6)
  misc_feature (1)..(114): NCBI GI NO: 15241086 NR Description: lipid transfer protein, putative
  misc_feature (20)..(114): NCBI GI NO: 2497753 NR Description: NONSPECIFIC LIPID-TRANSFER PROTEIN 3 PRECURSOR
  misc_feature (11)..(114): NCBI GI NO: 16903206 NR Description: lipid transfer protein precursor
  misc_feature (1)..(115): NCBI GI NO: 2497746 NR Description: NONSPECIFIC LIPID-TRANSFER PROTEIN 2 PRECURSOR
  misc_feature (1)..(114): NCBI GI NO: 16930759 NR Description: lipid transfer protein-like protein
  misc_feature (1)..(115): NCBI GI NO: 7438275 NR Description: lipid transfer protein LPT II - rice
  misc_feature (7)..(114): NCBI GI NO: 14423814 NR Description: Nonspecific lipid-transfer protein precursor
  misc_feature (1)..(115): NCBI GI NO: 128388 NR Description: Nonspecific lipid-transfer protein precursor
  misc_feature (1)..(114): NCBI GI NO: 6782436 NR Description: lipid-transfer protein [Nicotiana glauca]
MRSLFLLALFLVLAFHHGEAAVTCNNVVGDLYPCLSYVMQGGNAPSTNCCNGVRTLNSQAQTTADRQSVCRCIKNAIGGASYSSSNLNNALSLPAKCGVNLPFSISPSTNCNSIH

SEQ ID NO: 7368 - protein, 77 aa, Glycine max
  peptide (1)..(77): Ceres Seq. ID no. 13595790
  misc_feature (1)..(73): Pfam Name: Pfam Description:  Protease inhibitor/seed storage/LTP family
  misc_feature (1)..(76): NCBI GI NO: 15231964 NR Description: lipid transfer protein 6 (ltp6)
  misc_feature (1)..(76): NCBI GI NO: 15241086 NR Description: lipid transfer protein, putative
  misc_feature (1)..(76): NCBI GI NO: 2497753 NR Description: NONSPECIFIC LIPID-TRANSFER PROTEIN 3 PRECURSOR
  misc_feature (1)..(76): NCBI GI NO: 16903206 NR Description: lipid transfer protein precursor
  misc_feature (1)..(77): NCBI GI NO: 2497746 NR Description: NONSPECIFIC LIPID-TRANSFER PROTEIN 2 PRECURSOR
  misc_feature (1)..(76): NCBI GI NO: 16930759 NR Description: lipid transfer protein-like protein
  misc_feature (1)..(77): NCBI GI NO: 7438275 NR Description: lipid transfer protein LPT II - rice
  misc_feature (1)..(76): NCBI GI NO: 14423814 NR Description: Nonspecific lipid-transfer protein precursor
  misc_feature (1)..(77): NCBI GI NO: 128388 NR Description: Nonspecific lipid-transfer protein precursor
  misc_feature (1)..(76): NCBI GI NO: 6782436 NR Description: lipid-transfer protein [Nicotiana glauca]
MQGGNAPSTNCCNGVRTLNSQAQTTADRQSVCRCIKNAIGGASYSSSNLNNALSLPAKCGVNLPFSISPSTNCNSIH

SEQ ID NO: 7369 - DNA, 1368 bp, Glycine max
  misc_feature (1)..(1368): Ceres Seq. ID no. 12583425
gagattttatctgttaggaagaggtccttttgcttctgaatgagagtgtccaatgaaagtttggtccttgatgcataattaaattgttctattgagtggtggcaagtcaaaaaggtctcggctttttcgtaagagaatattgttttttttagtaagattatatatggtgttgttgctatatttaaattaaagaacctgcaaggccctgtgtgcttcttgtttcagcattgccataatcttcttcttcttcttcttctttttcttcttgttcttcttctcatggctcttatgttaggctatgatccttgttcccatttaagtagggccttttcccattttccttctgtttcttcctctgaggctaacagaaacgttggattcactcttaaagcctgttttgatgccaatagcggtgataatgccaatagggtctttgtgaaggaaaagaaaaaacccaatggttttgcatgtgttcctcaccctcccttgttaggtggtttagagaagggtattgatgttgaagatagatctttgggtggaagtcccaccaaacccttttgtttctctgatcaacaattgccccagaaacttgttgttgctgttgatgttgatgaagtattaggaaactttgtgtcagctctgaacaagttcatagcagatcgatactcatcaaattgttcagtttctgagtatcacgtgtatgagttcttcaagatatggaactgctcacgtgacgaagcaaatacccgtgttcatgagttttttgagacaccatacttcaagtcagggatccaacctatcccaggtgctcagacatccctgcagaagttatcaacattttgtagcctatcagttgtaacatctcggcaaaatgtaatcaaggatcatacacttgagtggatagagaagcatttttcaggattgtttcaggagattcactttggaaaccactttgcccttgatgggatgtctagaccaaagtcggagatttgtaggtctataaatgctacggttctcattgatgataacccaagatacgccatagagtgcgctgaagccggaattagagtcctactttttgattatgaaaactcgtacccttggtccaagaccaattcagctgatgagcatcccctggtgatcaaagttaagaactgggaagaagttgaacaacaattgatgtcattggtagctttgtagttactaaaatcctgcagcaaggatttgttaaaagcactcttattagattaagtagtggatagtttcttatgcctgaaatatctaattaagacaccataaaggtgaaattaggggaagtaactgcaagaagttatagtcctgtttggaaaaatataaaattacctgatt

SEQ ID NO: 7370 - protein, 306 aa, Glycine max
  peptide (1)..(306): Ceres Seq. ID no. 12583426
  misc_feature (33)..(303): NCBI GI NO: 18418156 NR Description: expressed protein; protein id: At4g33140
  misc_feature (98)..(304): NCBI GI NO: 18092343 NR Description: unknown [Zea mays]
  misc_feature (91)..(304): NCBI GI NO: 17082482 NR Description: unknown [Zea mays]
  misc_feature (190)..(303): NCBI GI NO: 7486452 NR Description: hypothetical protein F4I10
MALMLGYDPCSHLSRAFSHFPSVSSSEANRNVGFTLKACFDANSGDNANRVFVKEKKKPNGFACVPHPPLLGGLEKGIDVEDRSLGGSPTKPFCFSDQQLPQKLVVAVDVDEVLGNFVSALNKFIADRYSSNCSVSEYHVYEFFKIWNCSRDEANTRVHEFFETPYFKSGIQPIPGAQTSLQKLSTFCSLSVVTSRQNVIKDHTLEWIEKHFSGLFQEIHFGNHFALDGMSRPKSEICRSINATVLIDDNPRYAIECAEAGIRVLLFDYENSYPWSKTNSADEHPLVIKVKNWEEVEQQLMSLVAL

SEQ ID NO: 7371 - protein, 303 aa, Glycine max
  peptide (1)..(303): Ceres Seq. ID no. 12583427
  misc_feature (30)..(300): NCBI GI NO: 18418156 NR Description: expressed protein; protein id: At4g33140
  misc_feature (95)..(301): NCBI GI NO: 18092343 NR Description: unknown [Zea mays]
  misc_feature (88)..(301): NCBI GI NO: 17082482 NR Description: unknown [Zea mays]
  misc_feature (187)..(300): NCBI GI NO: 7486452 NR Description: hypothetical protein F4I10
MLGYDPCSHLSRAFSHFPSVSSSEANRNVGFTLKACFDANSGDNANRVFVKEKKKPNGFACVPHPPLLGGLEKGIDVEDRSLGGSPTKPFCFSDQQLPQKLVVAVDVDEVLGNFVSALNKFIADRYSSNCSVSEYHVYEFFKIWNCSRDEANTRVHEFFETPYFKSGIQPIPGAQTSLQKLSTFCSLSVVTSRQNVIKDHTLEWIEKHFSGLFQEIHFGNHFALDGMSRPKSEICRSINATVLIDDNPRYAIECAEAGIRVLLFDYENSYPWSKTNSADEHPLVIKVKNWEEVEQQLMSLVAL

SEQ ID NO: 7372 - DNA, 1412 bp, Glycine max
  misc_feature (1)..(1412): Ceres Seq. ID no. 13582619
agtcacttctcaccgtcactttagtcttctcttgcggtggcacaaactatatcacgtttcgaaagagtaacttggtgaccggtgaggtgttcctagttaccatacgaaagaggattttggtgtaggatgggatcgatagagaacgcttccaaaccaaggaaggaaaatccgaaatttgaattgccagcgggttttagatttcatccaacagatgaagaactcataaatcaatacctcacaaagaaggttgttgacaactgtttctgtgctatagccattggtgaggttgatttgaacaagtgtgagccatgggatttgcctgggttggctaaaatgggtgaaactgagtggtattttttctgtgtgagggacagaaaattcccaactggtataaggactaatagggccactgatattggttattggaaagccacaggaaaagacaaggagataataatggagaatgcactcattgggatgaagaaaaccttggttttctacaagggaagagctcctaaaggtgaaaagacaaactgggttatgcatgaatataggttggaagggaaacataatcaacccaaacctggaaagagtgaatgggtgatttgtagagtctttgagaagagtcgttgtgggaagaaaatgcatgttccaaagtgtgggaggttcaacaacccctttggagaggaaccatcatcaggtgcttctctattgcctcctttgatggattcttctccatacaacagtgaaacaagaaccaccactgctggggagttgtctcaggtgacatgcttctctgatccaaatcaaactgaggatcagaacaacacacatgatgacattgttgatagcatggaaactcctattttgaacttctcacccttttcaaggcctgatgatgcatccactttggccaaagcaaccctttcttcagcctcaaaccaatcagcacagattgcacaccaaattggggaatcacagttcccagattattgttatgcgcctcaagaaccgtccatgttgaggatgctgatggaaaaccatgaaccctgtgcgaagcaaactcagaaagaagagtttcctgagggaagagactttgatggagatatctcatctatgatatacagcagtgacatgataaacagaatgtttgggaatcaagaacattcttcatcagcttctgcagggcctgtggacactgatttcctatggaattactgaaggttaaggaatattatttagtgttaagacagaaaatatgttaattatatttatattcatatgatacatacaggttggttacctgcaacttcatgaacttattgtaggaattatgggaaatgcatgaaattgaatttcccccctctggttgataactttgataaaaactagtgatgaatagtccatatgtt

SEQ ID NO: 7373 - protein, 364 aa, Glycine max
  peptide (1)..(364): Ceres Seq. ID no. 13582620
  misc_feature (19)..(145): Pfam Name: NAM Pfam Description: No apical meristem
  misc_feature (11)..(249): NCBI GI NO: 15240252 NR Description: NAM, no apical meristem, - like protein
  misc_feature (18)..(249): NCBI GI NO: 21537315 NR Description: NAM, no apical meristem,-like protein
  misc_feature (12)..(364): NCBI GI NO: 22597158 NR Description: no apical meristem-like protein [Glycine max]
  misc_feature (11)..(256): NCBI GI NO: 30682048 NR Description: NAM (no apical meristem)-related protein
  misc_feature (18)..(256): NCBI GI NO: 30682054 NR Description: NAM (no apical meristem)-related protein
  misc_feature (28)..(245): NCBI GI NO: 21105757 NR Description: nam-like protein 14 [Petunia x hybrida]
  misc_feature (12)..(237): NCBI GI NO: 15241819 NR Description: NAM / CUC2 - like protein [Arabidopsis thaliana]
  misc_feature (12)..(237): NCBI GI NO: 21536866 NR Description: NAM / CUC2-like protein [Arabidopsis thaliana]
  misc_feature (12)..(285): NCBI GI NO: 15228570 NR Description: hypothetical protein; protein id: At3g29035
  misc_feature (19)..(264): NCBI GI NO: 1279640 NR Description: NAM [Petunia x hybrida]
MGSIENASKPRKENPKFELPAGFRFHPTDEELINQYLTKKVVDNCFCAIAIGEVDLNKCEPWDLPGLAKMGETEWYFFCVRDRKFPTGIRTNRATDIGYWKATGKDKEIIMENALIGMKKTLVFYKGRAPKGEKTNWVMHEYRLEGKHNQPKPGKSEWVICRVFEKSRCGKKMHVPKCGRFNNPFGEEPSSGASLLPPLMDSSPYNSETRTTTAGELSQVTCFSDPNQTEDQNNTHDDIVDSMETPILNFSPFSRPDDASTLAKATLSSASNQSAQIAHQIGESQFPDYCYAPQEPSMLRMLMENHEPCAKQTQKEEFPEGRDFDGDISSMIYSSDMINRMFGNQEHSSSASAGPVDTDFLWNY

SEQ ID NO: 7374 - protein, 295 aa, Glycine max
  peptide (1)..(295): Ceres Seq. ID no. 13582621
  misc_feature (1)..(76): Pfam Name: NAM Pfam Description: No apical meristem
  misc_feature (1)..(180): NCBI GI NO: 15240252 NR Description: NAM, no apical meristem, - like protein
  misc_feature (1)..(180): NCBI GI NO: 21537315 NR Description: NAM, no apical meristem,-like protein
  misc_feature (1)..(295): NCBI GI NO: 22597158 NR Description: no apical meristem-like protein [Glycine max]
  misc_feature (1)..(187): NCBI GI NO: 30682048 NR Description: NAM (no apical meristem)-related protein
  misc_feature (1)..(187): NCBI GI NO: 30682054 NR Description: NAM (no apical meristem)-related protein
  misc_feature (1)..(176): NCBI GI NO: 21105757 NR Description: nam-like protein 14 [Petunia x hybrida]
  misc_feature (1)..(168): NCBI GI NO: 15241819 NR Description: NAM / CUC2 - like protein [Arabidopsis thaliana]
  misc_feature (1)..(168): NCBI GI NO: 21536866 NR Description: NAM / CUC2-like protein [Arabidopsis thaliana]
  misc_feature (1)..(216): NCBI GI NO: 15228570 NR Description: hypothetical protein; protein id: At3g29035
  misc_feature (1)..(195): NCBI GI NO: 1279640 NR Description: NAM [Petunia x hybrida]
MGETEWYFFCVRDRKFPTGIRTNRATDIGYWKATGKDKEIIMENALIGMKKTLVFYKGRAPKGEKTNWVMHEYRLEGKHNQPKPGKSEWVICRVFEKSRCGKKMHVPKCGRFNNPFGEEPSSGASLLPPLMDSSPYNSETRTTTAGELSQVTCFSDPNQTEDQNNTHDDIVDSMETPILNFSPFSRPDDASTLAKATLSSASNQSAQIAHQIGESQFPDYCYAPQEPSMLRMLMENHEPCAKQTQKEEFPEGRDFDGDISSMIYSSDMINRMFGNQEHSSSASAGPVDTDFLWNY

SEQ ID NO: 7375 - protein, 254 aa, Glycine max
  peptide (1)..(254): Ceres Seq. ID no. 13582622
  misc_feature (1)..(139): NCBI GI NO: 15240252 NR Description: NAM, no apical meristem, - like protein
  misc_feature (1)..(139): NCBI GI NO: 21537315 NR Description: NAM, no apical meristem,-like protein
  misc_feature (1)..(254): NCBI GI NO: 22597158 NR Description: no apical meristem-like protein [Glycine max]
  misc_feature (1)..(146): NCBI GI NO: 30682048 NR Description: NAM (no apical meristem)-related protein
  misc_feature (1)..(146): NCBI GI NO: 30682054 NR Description: NAM (no apical meristem)-related protein
  misc_feature (1)..(135): NCBI GI NO: 21105757 NR Description: nam-like protein 14 [Petunia x hybrida]
  misc_feature (1)..(127): NCBI GI NO: 15241819 NR Description: NAM / CUC2 - like protein [Arabidopsis thaliana]
  misc_feature (1)..(127): NCBI GI NO: 21536866 NR Description: NAM / CUC2-like protein [Arabidopsis thaliana]
  misc_feature (1)..(175): NCBI GI NO: 15228570 NR Description: hypothetical protein; protein id: At3g29035
  misc_feature (1)..(154): NCBI GI NO: 1279640 NR Description: NAM [Petunia x hybrida]
MENALIGMKKTLVFYKGRAPKGEKTNWVMHEYRLEGKHNQPKPGKSEWVICRVFEKSRCGKKMHVPKCGRFNNPFGEEPSSGASLLPPLMDSSPYNSETRTTTAGELSQVTCFSDPNQTEDQNNTHDDIVDSMETPILNFSPFSRPDDASTLAKATLSSASNQSAQIAHQIGESQFPDYCYAPQEPSMLRMLMENHEPCAKQTQKEEFPEGRDFDGDISSMIYSSDMINRMFGNQEHSSSASAGPVDTDFLWNY

SEQ ID NO: 7376 - DNA, 972 bp, Glycine max
  misc_feature (1)..(972): Ceres Seq. ID no. 14302529
accctctcggtctctagggttttgggactttagcctcctgcgccgccgccgccgccgcccagcgaattcgacaagcccccgagctcgccggatccgatggccgtcacgttctccgacctccacaccgccgacgggctcaaggccctcgaggcgcacctcgccggcaagacctacatctccggcgatgggatcaccaaggacgacgtcaaggtgttcgcggcggtgcccgtgaagcccagcgccgagttcccgaacgctgcccgctggtacgacaccgtcgccgcggctgttgcttcaaggttccctggccagtcctctggggtgagtgcatcatcggctcctgctgcagctgctcctgccgcttccaaggatgaagatgacgatgatgacatggatctgtttggcgatgagaccgaggaggacaagaaagctgcagctgagcgtgaggctgccaagcctgcaaagaagaaagaaagtggcaaatcctccgtcctcatggacatcaagccatgggacgatgagactgacatgaagaagttggaggaggctgtccgcagtgttcaaatggagggtctcacctggggtgcatataagcttatgcctgtgggttatggcatcaagaagctccagatcatgctgacgatcatcgatgaccttgtgtccgtcgacactcttattgaggaagtgctttgcgaggcgcccatcaacgaatatgtccagtcgtgtgacatcgttgccttcaacaagatctagaatctttgttctcccacctgctggattcttggtactgggattggtcgatctggaaaacattatgtcgtcccatttagttacccctcttacagaaatgctactggttttgtttttgagtgatgccctggtcttgaatgtctgctacctttaaatagttgaactgctgagcggtttgtaatggcgaaacatctatcatgtggagtaaaatcagtctttgat

SEQ ID NO: 7377 - protein, 218 aa, Glycine max
  peptide (1)..(218): Ceres Seq. ID no. 14302530
  misc_feature (129)..(218): Pfam Name: Pfam Description:  EF-1 guanine nucleotide exchange domain
  misc_feature (1)..(218): NCBI GI NO: 232033 NR Description: ELONGATION FACTOR 1-BETA' (EF-1-BETA')
  misc_feature (1)..(218): NCBI GI NO: 38175744 NR Description: putative translation elongation factor eEF-1 beta'chain
  misc_feature (1)..(218): NCBI GI NO: 232031 NR Description: ELONGATION FACTOR 1-BETA' (EF-1-BETA')
  misc_feature (1)..(218): NCBI GI NO: 34899162 NR Description: putative translation elongation factor eEF-1 beta'chain
  misc_feature (1)..(218): NCBI GI NO: 30687350 NR Description: elongation factor 1B alpha-subunit
  misc_feature (1)..(218): NCBI GI NO: 15239877 NR Description: elongation factor 1B alpha-subunit (emb|CAB64729
  misc_feature (1)..(218): NCBI GI NO: 6015063 NR Description: ELONGATION FACTOR 1-BETA (EF-1-BETA)
  misc_feature (20)..(218): NCBI GI NO: 27754711 NR Description: putative elongation factor 1B alpha-subunit
  misc_feature (1)..(218): NCBI GI NO: 38232568 NR Description: translational elongation factor 1 subunit Bbeta
  misc_feature (1)..(218): NCBI GI NO: 3894214 NR Description: elongation factor 1 beta 2
MAVTFSDLHTADGLKALEAHLAGKTYISGDGITKDDVKVFAAVPVKPSAEFPNAARWYDTVAAAVASRFPGQSSGVSASSAPAAAAPAASKDEDDDDDMDLFGDETEEDKKAAAEREAAKPAKKKESGKSSVLMDIKPWDDETDMKKLEEAVRSVQMEGLTWGAYKLMPVGYGIKKLQIMLTIIDDLVSVDTLIEEVLCEAPINEYVQSCDIVAFNKI

SEQ ID NO: 7378 - protein, 120 aa, Glycine max
  peptide (1)..(120): Ceres Seq. ID no. 14302531
  misc_feature (31)..(120): Pfam Name: Pfam Description:  EF-1 guanine nucleotide exchange domain
  misc_feature (1)..(120): NCBI GI NO: 232033 NR Description: ELONGATION FACTOR 1-BETA' (EF-1-BETA')
  misc_feature (1)..(120): NCBI GI NO: 38175744 NR Description: putative translation elongation factor eEF-1 beta'chain
  misc_feature (1)..(120): NCBI GI NO: 232031 NR Description: ELONGATION FACTOR 1-BETA' (EF-1-BETA')
  misc_feature (1)..(120): NCBI GI NO: 34899162 NR Description: putative translation elongation factor eEF-1 beta'chain
  misc_feature (1)..(120): NCBI GI NO: 30687350 NR Description: elongation factor 1B alpha-subunit
  misc_feature (1)..(120): NCBI GI NO: 15239877 NR Description: elongation factor 1B alpha-subunit (emb|CAB64729
  misc_feature (1)..(120): NCBI GI NO: 6015063 NR Description: ELONGATION FACTOR 1-BETA (EF-1-BETA)
  misc_feature (1)..(120): NCBI GI NO: 27754711 NR Description: putative elongation factor 1B alpha-subunit
  misc_feature (1)..(120): NCBI GI NO: 38232568 NR Description: translational elongation factor 1 subunit Bbeta
  misc_feature (1)..(120): NCBI GI NO: 3894214 NR Description: elongation factor 1 beta 2
MDLFGDETEEDKKAAAEREAAKPAKKKESGKSSVLMDIKPWDDETDMKKLEEAVRSVQMEGLTWGAYKLMPVGYGIKKLQIMLTIIDDLVSVDTLIEEVLCEAPINEYVQSCDIVAFNKI

SEQ ID NO: 7379 - DNA, 939 bp, Glycine max
  misc_feature (1)..(939): Ceres Seq. ID no. 13595821
ccrtttaamcwagaacatcctaatcgaaaagtcttgtaaagaaatctaaagctcatctcttagctcctctgtactcctcctccacacttccttccctccaacgagttccaaaacgcgagtagccatgtcgctcacgatcccgacgaacctcgttctcaacccgagatccaacaaatctctcactcaatccttgcctaaatccaccgcgagattcgtttgctccgatgacaaatccgcgacgcagcaacagtccatgaaggctttctccgccgcagtcgctctctcttccatcctcctatcagctccgatgccagccgtcgctgatatctcggggttgacaccttgcaaggagtcgaaacagttcgccaagagggagaagcaacagatcaagaagcttcaatcatctcttaagctctacgctcctgaaagtgctcctgctcttgctcttaacgctcagatcgagaagaccaaacgcaggttcgacaactacggcaagtatggacttctctgtggcgcagacggtctaccccacctgatagtgaacggagaccagcggcattggggagagttcataactccaggccttctcttcctttacattgctggatggatcgggtgggttggacgaagctacttgatagcaatcagcgatgagaagaaaccagcaatgaaagagatcatcattgatgttccattggctagtcgcctcatcttccgtggtttcatttggcctgttgctgcttacagagcgttactcaatggcgatctcattgccaaggatgtctagaaaaacaaaaacaaatctatatttgttgttttggtttgcttctctctctttctctctatctcatgttttccagtgtatgtattgatatctctaattaactcttcctttcaaagaaaaaaaaaaaaaaaaaagcttatcgataccgtcgacct

SEQ ID NO: 7380 - protein, 220 aa, Glycine max
  peptide (1)..(220): Ceres Seq. ID no. 15221669
  misc_feature (46)..(220): Pfam Name: Pfam Description:  Photosystem I reaction centre subunit III
  misc_feature (1)..(220): NCBI GI NO: 5734518 NR Description: photosystem I subunit III precursor
  misc_feature (1)..(220): NCBI GI NO: 15221681 NR Description: photosystem I subunit III precursor -related
  misc_feature (1)..(220): NCBI GI NO: 15450361 NR Description: At1g31330/T19E23_1 [Arabidopsis thaliana]
  misc_feature (1)..(220): NCBI GI NO: 8954295 NR Description: photosystem I reaction center subunit III
  misc_feature (1)..(216): NCBI GI NO: 30013659 NR Description: putative photosystem I subunit III precursor
  misc_feature (1)..(216): NCBI GI NO: 1172664 NR Description: Photosystem I reaction centre subunit III
  misc_feature (1)..(216): NCBI GI NO: 131187 NR Description: Photosystem I reaction centre subunit III
  misc_feature (1)..(219): NCBI GI NO: 548604 NR Description: Photosystem I reaction centre subunit III
  misc_feature (43)..(219): NCBI GI NO: 3885892 NR Description: photosystem-1 F subunit precursor [Oryza sativa]
  misc_feature (39)..(215): NCBI GI NO: 37522301 NR Description: photosystem I subunit III [Gloeobacter violaceus]
MSLTIPTNLVLNPRSNKSLTQSLPKSTARFVCSDDKSATQQQSMKAFSAAVALSSILLSAPMPAVADISGLTPCKESKQFAKREKQQIKKLQSSLKLYAPESAPALALNAQIEKTKRRFDNYGKYGLLCGADGLPHLIVNGDQRHWGEFITPGLLFLYIAGWIGWVGRSYLIAISDEKKPAMKEIIIDVPLASRLIFRGFIWPVAAYRALLNGDLIAKDV

SEQ ID NO: 7381 - protein, 177 aa, Glycine max
  peptide (1)..(177): Ceres Seq. ID no. 15221670
  misc_feature (3)..(177): Pfam Name: Pfam Description:  Photosystem I reaction centre subunit III
  misc_feature (1)..(177): NCBI GI NO: 5734518 NR Description: photosystem I subunit III precursor
  misc_feature (1)..(177): NCBI GI NO: 15221681 NR Description: photosystem I subunit III precursor -related
  misc_feature (1)..(177): NCBI GI NO: 15450361 NR Description: At1g31330/T19E23_1 [Arabidopsis thaliana]
  misc_feature (1)..(177): NCBI GI NO: 8954295 NR Description: photosystem I reaction center subunit III
  misc_feature (1)..(173): NCBI GI NO: 30013659 NR Description: putative photosystem I subunit III precursor
  misc_feature (1)..(173): NCBI GI NO: 1172664 NR Description: Photosystem I reaction centre subunit III
  misc_feature (1)..(173): NCBI GI NO: 131187 NR Description: Photosystem I reaction centre subunit III
  misc_feature (1)..(176): NCBI GI NO: 548604 NR Description: Photosystem I reaction centre subunit III
  misc_feature (1)..(176): NCBI GI NO: 3885892 NR Description: photosystem-1 F subunit precursor [Oryza sativa]
  misc_feature (1)..(172): NCBI GI NO: 37522301 NR Description: photosystem I subunit III [Gloeobacter violaceus]
MKAFSAAVALSSILLSAPMPAVADISGLTPCKESKQFAKREKQQIKKLQSSLKLYAPESAPALALNAQIEKTKRRFDNYGKYGLLCGADGLPHLIVNGDQRHWGEFITPGLLFLYIAGWIGWVGRSYLIAISDEKKPAMKEIIIDVPLASRLIFRGFIWPVAAYRALLNGDLIAKDV

SEQ ID NO: 7382 - protein, 159 aa, Glycine max
  peptide (1)..(159): Ceres Seq. ID no. 15221671
  misc_feature (1)..(159): Pfam Name: Pfam Description:  Photosystem I reaction centre subunit III
  misc_feature (1)..(159): NCBI GI NO: 5734518 NR Description: photosystem I subunit III precursor
  misc_feature (1)..(159): NCBI GI NO: 15221681 NR Description: photosystem I subunit III precursor -related
  misc_feature (1)..(159): NCBI GI NO: 15450361 NR Description: At1g31330/T19E23_1 [Arabidopsis thaliana]
  misc_feature (1)..(159): NCBI GI NO: 8954295 NR Description: photosystem I reaction center subunit III
  misc_feature (1)..(155): NCBI GI NO: 30013659 NR Description: putative photosystem I subunit III precursor
  misc_feature (1)..(155): NCBI GI NO: 1172664 NR Description: Photosystem I reaction centre subunit III
  misc_feature (1)..(155): NCBI GI NO: 131187 NR Description: Photosystem I reaction centre subunit III
  misc_feature (1)..(158): NCBI GI NO: 548604 NR Description: Photosystem I reaction centre subunit III
  misc_feature (1)..(158): NCBI GI NO: 3885892 NR Description: photosystem-1 F subunit precursor [Oryza sativa]
  misc_feature (1)..(154): NCBI GI NO: 37522301 NR Description: photosystem I subunit III [Gloeobacter violaceus]
MPAVADISGLTPCKESKQFAKREKQQIKKLQSSLKLYAPESAPALALNAQIEKTKRRFDNYGKYGLLCGADGLPHLIVNGDQRHWGEFITPGLLFLYIAGWIGWVGRSYLIAISDEKKPAMKEIIIDVPLASRLIFRGFIWPVAAYRALLNGDLIAKDV

SEQ ID NO: 7383 - DNA, 722 bp, Glycine max
  misc_feature (1)..(722): Ceres Seq. ID no. 13595411
acacccaaacacgtagtgcaccacttccgctaaaagatcatcagcattcagcagagctacactagctccaagccaccgagagaaaatggccggcttctcgtacacgagccacgttgcagttgcactggtttcggtgctgctgctgagcctcgcgcacggctcactggggctgggggccaggaggctcatggagctgtacaagccggaccccagcgagctcctcacgtaccacaacggcgccgtgctgcagggcgccatcccggtctccgtgctctggtacggccgcttcacgcccgcgcagaaggccgtcgtctccgacttcctcctctcgctcaccaccgcctcgccggcgctgaccccgtccgtctctcagtggtggaacaccatccaccagctctacctctccaaggccaagggcgccaacggccaagcgcgcgacgcaggtggcgctcgccgggcaggtctccgacgagcggtgctcgctcgggaagagcctcaagctaccccagctcgcggcgctggcggcgagcgccaagccccggaagggcgggatcgcgctggtgctcaccgcggaggacgtggccgtggagggcttctgccggagccggtgcggcctgcacggctccgacgccgcggcccgcaccgcgtacgtgtgggtcggcaactccgcctcgcagtgccccgtgttaaacacaataaagtgggaactggaggggggaaag

SEQ ID NO: 7384 - protein, 212 aa, Glycine max
  peptide (1)..(212): Ceres Seq. ID no. 13595412
  misc_feature (46)..(100): Pfam Name: Pfam Description:  Phosphate-induced protein 1 conserved region
  misc_feature (9)..(135): NCBI GI NO: 37533672 NR Description: putative phosphate-induced protein
  misc_feature (7)..(100): NCBI GI NO: 31074969 NR Description: erg-1 [Solanum tuberosum]
  misc_feature (18)..(100): NCBI GI NO: 15237656 NR Description: phi-1-related protein [Arabidopsis thaliana]
  misc_feature (48)..(105): NCBI GI NO: 11762144 NR Description: At1g35140 [Arabidopsis thaliana]
  misc_feature (48)..(105): NCBI GI NO: 15219504 NR Description: phosphate-induced (phi-1) protein -related
  misc_feature (54)..(100): NCBI GI NO: 15242420 NR Description: expressed protein [Arabidopsis thaliana]
  misc_feature (46)..(113): NCBI GI NO: 18403760 NR Description: expressed protein [Arabidopsis thaliana]
  misc_feature (7)..(110): NCBI GI NO: 3759184 NR Description: phi-1 [Nicotiana tabacum]
  misc_feature (46)..(113): NCBI GI NO: 25408357 NR Description: hypothetical protein At2g35150
  misc_feature (13)..(105): NCBI GI NO: 21593043 NR Description: putative phi-1-like phosphate-induced protein
MAGFSYTSHVAVALVSVLLLSLAHGSLGLGARRLMELYKPDPSELLTYHNGAVLQGAIPVSVLWYGRFTPAQKAVVSDFLLSLTTASPALTPSVSQWWNTIHQLYLSKAKGANGQARDAGGARRAGLRRAVLAREEPQATPARGAGGERQAPEGRDRAGAHRGGRGRGGLLPEPVRPARLRRRGPHRVRVGRQLRLAVPRVKHNKVGTGGGK

SEQ ID NO: 7385 - protein, 178 aa, Glycine max
  peptide (1)..(178): Ceres Seq. ID no. 13595413
  misc_feature (12)..(66): Pfam Name: Pfam Description:  Phosphate-induced protein 1 conserved region
  misc_feature (1)..(101): NCBI GI NO: 37533672 NR Description: putative phosphate-induced protein
  misc_feature (1)..(66): NCBI GI NO: 31074969 NR Description: erg-1 [Solanum tuberosum]
  misc_feature (1)..(66): NCBI GI NO: 15237656 NR Description: phi-1-related protein [Arabidopsis thaliana]
  misc_feature (14)..(71): NCBI GI NO: 11762144 NR Description: At1g35140 [Arabidopsis thaliana]
  misc_feature (14)..(71): NCBI GI NO: 15219504 NR Description: phosphate-induced (phi-1) protein -related
  misc_feature (20)..(66): NCBI GI NO: 15242420 NR Description: expressed protein [Arabidopsis thaliana]
  misc_feature (12)..(79): NCBI GI NO: 18403760 NR Description: expressed protein [Arabidopsis thaliana]
  misc_feature (1)..(76): NCBI GI NO: 3759184 NR Description: phi-1 [Nicotiana tabacum]
  misc_feature (12)..(79): NCBI GI NO: 25408357 NR Description: hypothetical protein At2g35150
  misc_feature (1)..(71): NCBI GI NO: 21593043 NR Description: putative phi-1-like phosphate-induced protein
MELYKPDPSELLTYHNGAVLQGAIPVSVLWYGRFTPAQKAVVSDFLLSLTTASPALTPSVSQWWNTIHQLYLSKAKGANGQARDAGGARRAGLRRAVLAREEPQATPARGAGGERQAPEGRDRAGAHRGGRGRGGLLPEPVRPARLRRRGPHRVRVGRQLRLAVPRVKHNKVGTGGGK

SEQ ID NO: 7386 - DNA, 1000 bp, Glycine max
  misc_feature (1)..(1000): Ceres Seq. ID no. 13595464
agttttaccgttgttgttggcaatgaaaaaatcatcatcagcttcaaaaggtgcagcagccaatgatggagttattaagggaggaagcatagattgggagctaagacctggtggcatgcttgttcagaagagacaaccccttgattcctcttctagttccatgatcaaaatcaaggtctctcatggttcttaccaccatgaggtcactgttcctgcacaatccacttttgggcatctaaaaatggtgcttacatccgagactggtcttgagcctaaagagcaaaggttactatttagagggaaagagaaagaggatgaggaatgcttgcatatggtgggagtgaaagacatgtctaaggttatattgctagaggatccagccagcaaagagagaaagcttgaggagatgcataagagtgaagatatctcaaaggcatgtgaagccatctccaaagtcagaacagaagttgacaagctatatcaaaaggtggttgctttggagacaactgtttgtggtggtgctaaggttgaagacaaagaatttgctatcttgacagaattgctaatggttcaattgcttaaactggattccattgctgctgagggagaagccaaagggcagagaagagttgaggttcgtcgtgtacagagttatgtggacacaattgacaacctgaaggcaagaaattttgctgcatttagcaatgctggtaacaatgcagtccctgtgatttgggaggccttggaatccggagttggaagcttgaagtcaccaacttcatttccaacatctacagtgattactcaaaactgggagcactttgaataaatacaagttaatccttccactttatttatagaagaggcttctatgatgacacttggttttttgtaatgacaagctgtttttggtagggaagggttatgcttgtacaaaattaatacatgtacatgttacttctctatgtccaaataaacactgattttgccttgtgtgttc

SEQ ID NO: 7387 - protein, 275 aa, Glycine max
  peptide (1)..(275): Ceres Seq. ID no. 13595465
  misc_feature (145)..(226): Pfam Name: Pfam Description:  BAG domain
  misc_feature (77)..(275): NCBI GI NO: 34907972 NR Description: P0446G04.18
  misc_feature (31)..(85): NCBI GI NO: 34907972 NR Description: P0446G04.18
  misc_feature (31)..(275): NCBI GI NO: 15231035 NR Description: expressed protein [Arabidopsis thaliana]
  misc_feature (31)..(275): NCBI GI NO: 19699283 NR Description: At3g51780/ORF3 [Arabidopsis thaliana]
  misc_feature (31)..(275): NCBI GI NO: 21554254 NR Description: unknown [Arabidopsis thaliana]
  misc_feature (12)..(237): NCBI GI NO: 25553557 NR Description: OSJNBa0038F22.4
  misc_feature (12)..(237): NCBI GI NO: 34898024 NR Description: ESTs AU082174
  misc_feature (8)..(232): NCBI GI NO: 15242267 NR Description: BAG domain containing protein
  misc_feature (24)..(231): NCBI GI NO: 21537107 NR Description: unknown [Arabidopsis thaliana]
  misc_feature (24)..(231): NCBI GI NO: 15240726 NR Description: BAG domain containing protein
VLPLLLAMKKSSSASKGAAANDGVIKGGSIDWELRPGGMLVQKRQPLDSSSSSMIKIKVSHGSYHHEVTVPAQSTFGHLKMVLTSETGLEPKEQRLLFRGKEKEDEECLHMVGVKDMSKVILLEDPASKERKLEEMHKSEDISKACEAISKVRTEVDKLYQKVVALETTVCGGAKVEDKEFAILTELLMVQLLKLDSIAAEGEAKGQRRVEVRRVQSYVDTIDNLKARNFAAFSNAGNNAVPVIWEALESGVGSLKSPTSFPTSTVITQNWEHFE

SEQ ID NO: 7388 - protein, 268 aa, Glycine max
  peptide (1)..(268): Ceres Seq. ID no. 13595466
  misc_feature (138)..(219): Pfam Name: Pfam Description:  BAG domain
  misc_feature (70)..(268): NCBI GI NO: 34907972 NR Description: P0446G04.18
  misc_feature (24)..(78): NCBI GI NO: 34907972 NR Description: P0446G04.18
  misc_feature (24)..(268): NCBI GI NO: 15231035 NR Description: expressed protein [Arabidopsis thaliana]
  misc_feature (24)..(268): NCBI GI NO: 21554254 NR Description: unknown [Arabidopsis thaliana]
  misc_feature (24)..(268): NCBI GI NO: 19699283 NR Description: At3g51780/ORF3 [Arabidopsis thaliana]
  misc_feature (5)..(230): NCBI GI NO: 25553557 NR Description: OSJNBa0038F22.4
  misc_feature (5)..(230): NCBI GI NO: 34898024 NR Description: ESTs AU082174
  misc_feature (1)..(225): NCBI GI NO: 15242267 NR Description: BAG domain containing protein
  misc_feature (17)..(224): NCBI GI NO: 21537107 NR Description: unknown [Arabidopsis thaliana]
  misc_feature (17)..(224): NCBI GI NO: 15240726 NR Description: BAG domain containing protein
MKKSSSASKGAAANDGVIKGGSIDWELRPGGMLVQKRQPLDSSSSSMIKIKVSHGSYHHEVTVPAQSTFGHLKMVLTSETGLEPKEQRLLFRGKEKEDEECLHMVGVKDMSKVILLEDPASKERKLEEMHKSEDISKACEAISKVRTEVDKLYQKVVALETTVCGGAKVEDKEFAILTELLMVQLLKLDSIAAEGEAKGQRRVEVRRVQSYVDTIDNLKARNFAAFSNAGNNAVPVIWEALESGVGSLKSPTSFPTSTVITQNWEHFE

SEQ ID NO: 7389 - protein, 237 aa, Glycine max
  peptide (1)..(237): Ceres Seq. ID no. 13595467
  misc_feature (107)..(188): Pfam Name: Pfam Description:  BAG domain
  misc_feature (39)..(237): NCBI GI NO: 34907972 NR Description: P0446G04.18
  misc_feature (1)..(47): NCBI GI NO: 34907972 NR Description: P0446G04.18
  misc_feature (1)..(237): NCBI GI NO: 15231035 NR Description: expressed protein [Arabidopsis thaliana]
  misc_feature (1)..(237): NCBI GI NO: 19699283 NR Description: At3g51780/ORF3 [Arabidopsis thaliana]
  misc_feature (1)..(237): NCBI GI NO: 21554254 NR Description: unknown [Arabidopsis thaliana]
  misc_feature (1)..(199): NCBI GI NO: 25553557 NR Description: OSJNBa0038F22.4
  misc_feature (1)..(199): NCBI GI NO: 34898024 NR Description: ESTs AU082174
  misc_feature (1)..(194): NCBI GI NO: 15242267 NR Description: BAG domain containing protein
  misc_feature (1)..(193): NCBI GI NO: 21537107 NR Description: unknown [Arabidopsis thaliana]
  misc_feature (1)..(193): NCBI GI NO: 15240726 NR Description: BAG domain containing protein
MLVQKRQPLDSSSSSMIKIKVSHGSYHHEVTVPAQSTFGHLKMVLTSETGLEPKEQRLLFRGKEKEDEECLHMVGVKDMSKVILLEDPASKERKLEEMHKSEDISKACEAISKVRTEVDKLYQKVVALETTVCGGAKVEDKEFAILTELLMVQLLKLDSIAAEGEAKGQRRVEVRRVQSYVDTIDNLKARNFAAFSNAGNNAVPVIWEALESGVGSLKSPTSFPTSTVITQNWEHFE

SEQ ID NO: 7390 - DNA, 890 bp, Glycine max
  misc_feature (1)..(890): Ceres Seq. ID no. 14302532
accgcattcacctgatctagctcgacgccggccagtaaacccaagcagccactcactctcaggttatcactgacacagcaaccaagctcgggacaagggggaaatggaagccgctccggtctcggcgaagcccaccctccgcgtggccgctctcagcggctccctccgcagcaactcgtggcaccacggcctcatccgcgccgccgaggagctgtgcgaggagtgcatcccggggctgcgcatcgaccacgtggacatctccggcctgcccatggccaacccggacctggagaccgacggcggcgacggcttcccgccggccgtggaggccttccgcgacagggtcagcgccgccgactgcttcctcttcgcctcgcccgagtacaactactccgtcaccggctcgctgaagaacgcgctggactgggcgtccaggggcacgcacaaatgctgggccgacaaggcggcggcgatcgtctgcgcgggaggcgacttcggcgggggcagggcgtcgctccacctgcgcgagatcgggatatacctagacctgcacttcatcaacaagccggagctccacatcagggcgtacgaggacccgcccaagttcgacggcgaggggaacctcatcgacgccaaagccagggagcggctcaagaaggtgctcctctcgctgcaggtcttcgcgctcaggctgcaacgcagggagaattgactcgagatcgaataaatttggcaccagagctacctaaataatctgcatttccgctcagatgatcacttttagtttgggctatggccctggtttcgttagtctgagcaattttacttcgtattcgtgtaattgtattttgtacttccgtgaaataaaaagacgatgctgctactgtaac

SEQ ID NO: 7391 - protein, 202 aa, Glycine max
  peptide (1)..(202): Ceres Seq. ID no. 14302533
  misc_feature (12)..(185): Pfam Name: Pfam Description:  NADPH-dependent FMN reductase
  misc_feature (1)..(201): NCBI GI NO: 34906648 NR Description: putative NADPH:quinone oxidoreductase
  misc_feature (7)..(198): NCBI GI NO: 34906652 NR Description: putative NADPH:quinone oxidoreductase
  misc_feature (1)..(198): NCBI GI NO: 15232856 NR Description: NADPH:quinone oxidoreductase (NQR)
  misc_feature (1)..(198): NCBI GI NO: 5002232 NR Description: NADPH:quinone oxidoreductase
  misc_feature (6)..(198): NCBI GI NO: 24745889 NR Description: NAD(P)H:quinone oxidoreductase [Solanum tuberosum]
  misc_feature (12)..(198): NCBI GI NO: 15596401 NR Description: conserved hypothetical protein
  misc_feature (12)..(198): NCBI GI NO: 32041222 NR Description: hypothetical protein
  misc_feature (10)..(187): NCBI GI NO: 22964797 NR Description: hypothetical protein [Rhodopseudomonas palustris]
  misc_feature (11)..(198): NCBI GI NO: 40549313 NR Description: YieF [Salmonella enterica]
  misc_feature (12)..(199): NCBI GI NO: 37520248 NR Description: hypothetical protein glr0679
MEAAPVSAKPTLRVAALSGSLRSNSWHHGLIRAAEELCEECIPGLRIDHVDISGLPMANPDLETDGGDGFPPAVEAFRDRVSAADCFLFASPEYNYSVTGSLKNALDWASRGTHKCWADKAAAIVCAGGDFGGGRASLHLREIGIYLDLHFINKPELHIRAYEDPPKFDGEGNLIDAKARERLKKVLLSLQVFALRLQRREN

SEQ ID NO: 7392 - protein, 146 aa, Glycine max
  peptide (1)..(146): Ceres Seq. ID no. 14302534
  misc_feature (1)..(129): Pfam Name: Pfam Description:  NADPH-dependent FMN reductase
  misc_feature (1)..(145): NCBI GI NO: 34906648 NR Description: putative NADPH:quinone oxidoreductase
  misc_feature (1)..(142): NCBI GI NO: 34906652 NR Description: putative NADPH:quinone oxidoreductase
  misc_feature (1)..(142): NCBI GI NO: 15232856 NR Description: NADPH:quinone oxidoreductase (NQR)
  misc_feature (1)..(142): NCBI GI NO: 5002232 NR Description: NADPH:quinone oxidoreductase
  misc_feature (1)..(142): NCBI GI NO: 24745889 NR Description: NAD(P)H:quinone oxidoreductase [Solanum tuberosum]
  misc_feature (1)..(142): NCBI GI NO: 15596401 NR Description: conserved hypothetical protein
  misc_feature (1)..(142): NCBI GI NO: 32041222 NR Description: hypothetical protein
  misc_feature (1)..(131): NCBI GI NO: 22964797 NR Description: hypothetical protein [Rhodopseudomonas palustris]
  misc_feature (1)..(142): NCBI GI NO: 40549313 NR Description: YieF [Salmonella enterica]
  misc_feature (1)..(143): NCBI GI NO: 37520248 NR Description: hypothetical protein glr0679
MANPDLETDGGDGFPPAVEAFRDRVSAADCFLFASPEYNYSVTGSLKNALDWASRGTHKCWADKAAAIVCAGGDFGGGRASLHLREIGIYLDLHFINKPELHIRAYEDPPKFDGEGNLIDAKARERLKKVLLSLQVFALRLQRREN

SEQ ID NO: 7393 - protein, 101 aa, Glycine max
  peptide (1)..(101): Ceres Seq. ID no. 14302535
  misc_feature (1)..(71): Pfam Name: Pfam Description:  High molecular weight glutenin subunit
MLGRQGGGDRLRGRRLRRGQGVAPPARDRDIPRPALHQQAGAPHQGVRGPAQVRRRGEPHRRQSQGAAQEGAPLAAGLRAQAATQGELTRDRINLAPELPK

SEQ ID NO: 7394 - DNA, 1537 bp, Glycine max
  misc_feature (1)..(1537): Ceres Seq. ID no. 12611314
tatcctccctttctgctttctttcgctcacaagacaaagttgaacgaaatgaagtctttcggttctgtaactggttttgtcttgccagacccaaagaataggttgctcctttggagtgtcctcatcttggtttcattgatttctggtgcttatttcgttggtaatgcattctttgcaaaggaatacaaacaaagattagcacgatgggggctaattcatacaatgccacattcaaaatttaatgcgtgcaagagacaatgcttgccttttggaagtgaggcattgcctgaaggaattattgctagaacatctaacttggaaatgcggcccttatgggactctggtaaagataatagaattttaaaacgcccattgaacttgttggctatggcagtaggacttaagcagaaagaaatagtcaacaaaattgttgaaaagttcttgtcaagtggttttgttgtgatgctttttcattatgatggttttgtggatggatggaagagtttagcctggagcagttgtgccatacatgtatctgctatcaatcaaacaaaatggtggtttgcaaagcggtttttgcatccagacatagttgctgaatacaattatatatttctttgggatgaggatcttcttgttgataattttgacccaaaaaggtatttatctattgttaaagaagaaggacttgagatatcacagccagctctggatcctaccaaatctgaagtacatcatccactgacagtccataaagcagtatcaaaagtgcacagaaggtattataaattaaaaggtagtggaaggtgtgatgacaaaagcactgctcctccttgcattggttgggtggaaatgatggcaccagtgttttctaagaagtcttggcaatgtgtatggcatttgatccagaatgacttaatccatgcatggggcctggataggcagcttggctattgtgcacagggagatcgaatgagaaatgttggtgtggttgattctgagtacatagttcatctgggtctgcctactcttgggggctcaaatggcaatgaggcgccatcagactccccaggagataatagagctaaagttaggatgcagtcatacattgaaatgcaggtttttggtaaaaggtggaaagatgcagcagagaaagacaaatgttggattgatccgtatgaacaggcaaacaagacaagccattagtgtattttgtgaggctttaagtgatcaaaatccaagtacagtgtccatgttcataatcagcttttgttttctagtcttcgttagagcttttgatttgatatctcaggtgtgggatctcgtaagagtttgcaggaacattgcttcctttaccattattttactttcgttttgtcatcaagccattcatttccttaaatattggtgtacatagggtggtatagagttgtttatatggcagcagaaaaatgtgtggcatagattttttttttcatccgtgaagtcaatgtaaagcggttgcttgtatgaaataatctataattttctcggatcc

SEQ ID NO: 7395 - protein, 401 aa, Glycine max
  peptide (1)..(401): Ceres Seq. ID no. 12611315
  misc_feature (83)..(393): Pfam Name: DUF707 Pfam Description: Protein of unknown function
  misc_feature (83)..(393): NCBI GI NO: 19386727 NR Description: P0678F11.16
  misc_feature (93)..(399): NCBI GI NO: 22329488 NR Description: hypothetical protein; protein id: At1g11170
  misc_feature (93)..(391): NCBI GI NO: 15219892 NR Description: hypothetical protein; protein id: At1g61240.1
  misc_feature (93)..(391): NCBI GI NO: 24636978 NR Description: lysine ketoglutarate reductase trans-splicingrelated 1
  misc_feature (95)..(398): NCBI GI NO: 33146749 NR Description: putative lysine ketoglutarate reductase trans-splicing related 1
  misc_feature (220)..(393): NCBI GI NO: 15233917 NR Description: putative protein; protein id: At4g18530.1
  misc_feature (11)..(78): NCBI GI NO: 15233917 NR Description: putative protein; protein id: At4g18530.1
  misc_feature (122)..(152): NCBI GI NO: 15233917 NR Description: putative protein; protein id: At4g18530.1
  misc_feature (106)..(259): NCBI GI NO: 34899756 NR Description: OJ1773_H01.1
  misc_feature (282)..(389): NCBI GI NO: 34899756 NR Description: OJ1773_H01.1
YPPFLLSFAHKTKLNEMKSFGSVTGFVLPDPKNRLLLWSVLILVSLISGAYFVGNAFFAKEYKQRLARWGLIHTMPHSKFNACKRQCLPFGSEALPEGIIARTSNLEMRPLWDSGKDNRILKRPLNLLAMAVGLKQKEIVNKIVEKFLSSGFVVMLFHYDGFVDGWKSLAWSSCAIHVSAINQTKWWFAKRFLHPDIVAEYNYIFLWDEDLLVDNFDPKRYLSIVKEEGLEISQPALDPTKSEVHHPLTVHKAVSKVHRRYYKLKGSGRCDDKSTAPPCIGWVEMMAPVFSKKSWQCVWHLIQNDLIHAWGLDRQLGYCAQGDRMRNVGVVDSEYIVHLGLPTLGGSNGNEAPSDSPGDNRAKVRMQSYIEMQVFGKRWKDAAEKDKCWIDPYEQANKTSH

SEQ ID NO: 7396 - protein, 385 aa, Glycine max
  peptide (1)..(385): Ceres Seq. ID no. 12611316
  misc_feature (67)..(377): Pfam Name: DUF707 Pfam Description: Protein of unknown function
  misc_feature (67)..(377): NCBI GI NO: 19386727 NR Description: P0678F11.16
  misc_feature (77)..(383): NCBI GI NO: 22329488 NR Description: hypothetical protein; protein id: At1g11170
  misc_feature (77)..(375): NCBI GI NO: 15219892 NR Description: hypothetical protein; protein id: At1g61240.1
  misc_feature (77)..(375): NCBI GI NO: 24636978 NR Description: lysine ketoglutarate reductase trans-splicingrelated 1
  misc_feature (79)..(382): NCBI GI NO: 33146749 NR Description: putative lysine ketoglutarate reductase trans-splicing related 1
  misc_feature (204)..(377): NCBI GI NO: 15233917 NR Description: putative protein; protein id: At4g18530.1
  misc_feature (1)..(62): NCBI GI NO: 15233917 NR Description: putative protein; protein id: At4g18530.1
  misc_feature (106)..(136): NCBI GI NO: 15233917 NR Description: putative protein; protein id: At4g18530.1
  misc_feature (90)..(243): NCBI GI NO: 34899756 NR Description: OJ1773_H01.1
  misc_feature (266)..(373): NCBI GI NO: 34899756 NR Description: OJ1773_H01.1
MKSFGSVTGFVLPDPKNRLLLWSVLILVSLISGAYFVGNAFFAKEYKQRLARWGLIHTMPHSKFNACKRQCLPFGSEALPEGIIARTSNLEMRPLWDSGKDNRILKRPLNLLAMAVGLKQKEIVNKIVEKFLSSGFVVMLFHYDGFVDGWKSLAWSSCAIHVSAINQTKWWFAKRFLHPDIVAEYNYIFLWDEDLLVDNFDPKRYLSIVKEEGLEISQPALDPTKSEVHHPLTVHKAVSKVHRRYYKLKGSGRCDDKSTAPPCIGWVEMMAPVFSKKSWQCVWHLIQNDLIHAWGLDRQLGYCAQGDRMRNVGVVDSEYIVHLGLPTLGGSNGNEAPSDSPGDNRAKVRMQSYIEMQVFGKRWKDAAEKDKCWIDPYEQANKTSH

SEQ ID NO: 7397 - protein, 327 aa, Glycine max
  peptide (1)..(327): Ceres Seq. ID no. 12611317
  misc_feature (9)..(319): Pfam Name: DUF707 Pfam Description: Protein of unknown function
  misc_feature (9)..(319): NCBI GI NO: 19386727 NR Description: P0678F11.16
  misc_feature (19)..(325): NCBI GI NO: 22329488 NR Description: hypothetical protein; protein id: At1g11170
  misc_feature (19)..(317): NCBI GI NO: 15219892 NR Description: hypothetical protein; protein id: At1g61240.1
  misc_feature (19)..(317): NCBI GI NO: 24636978 NR Description: lysine ketoglutarate reductase trans-splicingrelated 1
  misc_feature (21)..(324): NCBI GI NO: 33146749 NR Description: putative lysine ketoglutarate reductase trans-splicing related 1
  misc_feature (146)..(319): NCBI GI NO: 15233917 NR Description: putative protein; protein id: At4g18530.1
  misc_feature (48)..(78): NCBI GI NO: 15233917 NR Description: putative protein; protein id: At4g18530.1
  misc_feature (32)..(185): NCBI GI NO: 34899756 NR Description: OJ1773_H01.1
  misc_feature (208)..(315): NCBI GI NO: 34899756 NR Description: OJ1773_H01.1
  misc_feature (48)..(321): NCBI GI NO: 34903420 NR Description: hypothetical protein~similar to Oryza sativachromosome 1
MPHSKFNACKRQCLPFGSEALPEGIIARTSNLEMRPLWDSGKDNRILKRPLNLLAMAVGLKQKEIVNKIVEKFLSSGFVVMLFHYDGFVDGWKSLAWSSCAIHVSAINQTKWWFAKRFLHPDIVAEYNYIFLWDEDLLVDNFDPKRYLSIVKEEGLEISQPALDPTKSEVHHPLTVHKAVSKVHRRYYKLKGSGRCDDKSTAPPCIGWVEMMAPVFSKKSWQCVWHLIQNDLIHAWGLDRQLGYCAQGDRMRNVGVVDSEYIVHLGLPTLGGSNGNEAPSDSPGDNRAKVRMQSYIEMQVFGKRWKDAAEKDKCWIDPYEQANKTSH

SEQ ID NO: 7398 - DNA, 1261 bp, Glycine max
  misc_feature (1)..(1261): Ceres Seq. ID no. 13595414
atattataaactacatctcactctcactaccttctcttcacccgcaaatggcgaccgctcctctctccggcttcttcctcacctctctttctccttctcagccttctctccaaaaacagactcttcgttcttctcccaccgtggcttgccttccctcatcctcttcttcctcctcctcctcctcctcctctcgttccgttccaacacttatccgtaacgagcccgtttttgccgctcctgctcctatcatcaccccttactggagcgaagagatgggtagcgaagcatacgaagaggccattgaagctctcaagaagcttattatcgagaaggaggagctaaagactgttgcggccgctaaggtggagcaggccacggcagcacttcagacaggtacttcctccgacaagaaagctttcgaccccgtcgaaaacattaagcaaggcttcatcactttcaagaaggagaaatacgaaaccaaccctgctttgtacggtgagctcgccaagggtcaaagtcctaagtatatggtgtttgcttgttccgactcgcgtgtgtgtccatcgcacgttctcaactttcagccaggagaggccttcgttgtccgtaacatagccaacatggttcctccttttgacaaggtcaaatacggtggagttggagcagccatcgaatacgctgttttgcaccttaaggtggagaacattgtggtgataggacacagcgcttgtggtgggatcaagggacttatgtcttttcctttggatggaaacaactccactgatttcatagaggactgggtcaaaatctgtttaccagccaagtcaaaagtcatatcagaacttggagattcagcctttgaggaccagtgtggccgatgtgaaagggaggcagtgaatgtttcactagcaaacttgttgacatatccattcgtgagagaaggacttgtgaaaggaacccttgctttgaagggaggttactatgattttataaagggtgcttttgagctttggggacttgagtttggcctctccgaaactagctcagtatgaaccaatccaccatcatcatcatgagcatccatcatcatcatatatctctattccatatgtaatttgtaatgtgctgagttgttttcctatcttcatggtatccaactttcatataaataaaaaagaaaatccagatgaaaaaaaaaaaaaaaaaagcttatcgatacctgtttaaacacaataaagwcctaacgggagggggggcccgg

SEQ ID NO: 7399 - protein, 349 aa, Glycine max
  peptide (1)..(349): Ceres Seq. ID no. 15221574
  misc_feature (16)..(349): NCBI GI NO: 30678350 NR Description: carbonic anhydrase, chloroplast precursor
  misc_feature (16)..(349): NCBI GI NO: 30678353 NR Description: carbonic anhydrase, chloroplast precursor
  misc_feature (91)..(349): NCBI GI NO: 30678347 NR Description: carbonic anhydrase, chloroplast precursor
  misc_feature (16)..(349): NCBI GI NO: 7436820 NR Description: carbonate dehydratase (EC 4
  misc_feature (91)..(349): NCBI GI NO: 21903379 NR Description: Carbonic anhydrase 2 (Carbonate dehydratase 2)
  misc_feature (91)..(349): NCBI GI NO: 30685030 NR Description: CARBONIC ANHYDRASE 2 [Arabidopsis thaliana]
  misc_feature (16)..(349): NCBI GI NO: 7436819 NR Description: carbonate dehydratase (EC 4
  misc_feature (91)..(349): NCBI GI NO: 438449 NR Description: carbonic anhydrase
  misc_feature (16)..(349): NCBI GI NO: 115473 NR Description: CARBONIC ANHYDRASE, CHLOROPLAST PRECURSOR
  misc_feature (16)..(349): NCBI GI NO: 22550386 NR Description: beta-carbonic anhydrase [Nicotiana tabacum]
IINYISLSLPSLHPQMATAPLSGFFLTSLSPSQPSLQKQTLRSSPTVACLPSSSSSSSSSSSSRSVPTLIRNEPVFAAPAPIITPYWSEEMGSEAYEEAIEALKKLIIEKEELKTVAAAKVEQATAALQTGTSSDKKAFDPVENIKQGFITFKKEKYETNPALYGELAKGQSPKYMVFACSDSRVCPSHVLNFQPGEAFVVRNIANMVPPFDKVKYGGVGAAIEYAVLHLKVENIVVIGHSACGGIKGLMSFPLDGNNSTDFIEDWVKICLPAKSKVISELGDSAFEDQCGRCEREAVNVSLANLLTYPFVREGLVKGTLALKGGYYDFIKGAFELWGLEFGLSETSSV

SEQ ID NO: 7400 - protein, 334 aa, Glycine max
  peptide (1)..(334): Ceres Seq. ID no. 15221575
  misc_feature (1)..(334): NCBI GI NO: 30678350 NR Description: carbonic anhydrase, chloroplast precursor
  misc_feature (1)..(334): NCBI GI NO: 30678353 NR Description: carbonic anhydrase, chloroplast precursor
  misc_feature (76)..(334): NCBI GI NO: 30678347 NR Description: carbonic anhydrase, chloroplast precursor
  misc_feature (1)..(334): NCBI GI NO: 7436820 NR Description: carbonate dehydratase (EC 4
  misc_feature (76)..(334): NCBI GI NO: 21903379 NR Description: Carbonic anhydrase 2 (Carbonate dehydratase 2)
  misc_feature (76)..(334): NCBI GI NO: 30685030 NR Description: CARBONIC ANHYDRASE 2 [Arabidopsis thaliana]
  misc_feature (1)..(334): NCBI GI NO: 7436819 NR Description: carbonate dehydratase (EC 4
  misc_feature (76)..(334): NCBI GI NO: 438449 NR Description: carbonic anhydrase
  misc_feature (1)..(334): NCBI GI NO: 115473 NR Description: CARBONIC ANHYDRASE, CHLOROPLAST PRECURSOR
  misc_feature (1)..(334): NCBI GI NO: 22550386 NR Description: beta-carbonic anhydrase [Nicotiana tabacum]
MATAPLSGFFLTSLSPSQPSLQKQTLRSSPTVACLPSSSSSSSSSSSSRSVPTLIRNEPVFAAPAPIITPYWSEEMGSEAYEEAIEALKKLIIEKEELKTVAAAKVEQATAALQTGTSSDKKAFDPVENIKQGFITFKKEKYETNPALYGELAKGQSPKYMVFACSDSRVCPSHVLNFQPGEAFVVRNIANMVPPFDKVKYGGVGAAIEYAVLHLKVENIVVIGHSACGGIKGLMSFPLDGNNSTDFIEDWVKICLPAKSKVISELGDSAFEDQCGRCEREAVNVSLANLLTYPFVREGLVKGTLALKGGYYDFIKGAFELWGLEFGLSETSSV

SEQ ID NO: 7401 - protein, 259 aa, Glycine max
  peptide (1)..(259): Ceres Seq. ID no. 15221576
  misc_feature (1)..(259): NCBI GI NO: 30678350 NR Description: carbonic anhydrase, chloroplast precursor
  misc_feature (1)..(259): NCBI GI NO: 30678353 NR Description: carbonic anhydrase, chloroplast precursor
  misc_feature (1)..(259): NCBI GI NO: 30678347 NR Description: carbonic anhydrase, chloroplast precursor
  misc_feature (1)..(259): NCBI GI NO: 7436820 NR Description: carbonate dehydratase (EC 4
  misc_feature (1)..(259): NCBI GI NO: 21903379 NR Description: Carbonic anhydrase 2 (Carbonate dehydratase 2)
  misc_feature (1)..(259): NCBI GI NO: 30685030 NR Description: CARBONIC ANHYDRASE 2 [Arabidopsis thaliana]
  misc_feature (1)..(259): NCBI GI NO: 7436819 NR Description: carbonate dehydratase (EC 4
  misc_feature (1)..(259): NCBI GI NO: 438449 NR Description: carbonic anhydrase
  misc_feature (1)..(259): NCBI GI NO: 115473 NR Description: CARBONIC ANHYDRASE, CHLOROPLAST PRECURSOR
  misc_feature (1)..(259): NCBI GI NO: 22550386 NR Description: beta-carbonic anhydrase [Nicotiana tabacum]
MGSEAYEEAIEALKKLIIEKEELKTVAAAKVEQATAALQTGTSSDKKAFDPVENIKQGFITFKKEKYETNPALYGELAKGQSPKYMVFACSDSRVCPSHVLNFQPGEAFVVRNIANMVPPFDKVKYGGVGAAIEYAVLHLKVENIVVIGHSACGGIKGLMSFPLDGNNSTDFIEDWVKICLPAKSKVISELGDSAFEDQCGRCEREAVNVSLANLLTYPFVREGLVKGTLALKGGYYDFIKGAFELWGLEFGLSETSSV

SEQ ID NO: 7402 - DNA, 1153 bp, Glycine max
  misc_feature (1)..(1153): Ceres Seq. ID no. 13595812
  misc_feature (1074)..(1074): n is a, c, t, g, unknown, or other
  misc_feature (1075)..(1075): n is a, c, t, g, unknown, or other
cattacctagaacatcctaatcvaaaaaagtcaatcvagtcaatcctaaaatcacaatacccgaccacaaggtcttttttttctctgtggcggcatcattggcaatggttaaaagttaaaacttcaacacacagaatccagattcgtcgagaaagagaaaagagaaaagaagaatgggcgattaccatttcgtgtacaaggatttagaaggggcttctactcaatgggacgatattcaaagaaagctcggaaatttgcctccaaaggcacccgctttcaagcccccacctttcacccctgcctctgatgatcaacccaaagacaaaacatggatcgattccaaaacctccgaggaactcgaagacctcgaagacaacctcgatgatgatcgcttcctccaagaatacaggaagaagaggctggctgagatgcaagaggcagcaaaagtattgaggtttggatctgtgattcccatttcgggatctgatttcgttcgagaggtgtcacaagctccatctgatgtttgggtggttgtcatcctatacaaagaagggattcctgaatgtgggttgttgatgcaaagcattgaagaattggcactaagatatccttcaacaaaatttgtgaagataatatctactgattgcataccgaactacccggatcggaatcttcccactttgttggtgtacaacaatggagcagtcaaaggaaattatgtgggtttgcatagtttcgggcgaagatgcactcctgaaggtgttgcattagtgttgtgccaatcagatcctgtacttaatgatggccataatggaaatgaggctatcattgaaggagtccgcaaacggtttatagagaaagttgttgctgatcatgaagagggtggtgatgatgattactctagcgattaacattttttcttgtatttgttgtgttgctttctttggagggggtatgcttttctaactttcttttggtctcacttttataattttgcctaaaaaaaagagtaacggatctgttattaaatacttaaattatgcgtgtgtgtttmwacacaataaaggcttttcnngttcctagtaattagatggttttatcaggtattatgtktawacamartgattttattgtttaaacacaataaagtggg

SEQ ID NO: 7403 - protein, 245 aa, Glycine max
  peptide (1)..(245): Ceres Seq. ID no. 15221665
  misc_feature (1)..(243): NCBI GI NO: 34906294 NR Description: unnamed protein product
  misc_feature (1)..(245): NCBI GI NO: 21593265 NR Description: unknown [Arabidopsis thaliana]
  misc_feature (1)..(245): NCBI GI NO: 15241349 NR Description: expressed protein [Arabidopsis thaliana]
  misc_feature (14)..(239): NCBI GI NO: 13129044 NR Description: IAP-associated factor VIAF1; phosducin-like 2
  misc_feature (16)..(242): NCBI GI NO: 28574924 NR Description: viral iap associated factor CG18593-PA
  misc_feature (16)..(242): NCBI GI NO: 10716148 NR Description: IAP-associated factor VIAF1
  misc_feature (14)..(240): NCBI GI NO: 9957067 NR Description: IAP-associated factor Viaf1 [Danio rerio]
  misc_feature (14)..(240): NCBI GI NO: 40555753 NR Description: Unknown (protein for MGC:73170) [Danio rerio]
  misc_feature (14)..(241): NCBI GI NO: 34875632 NR Description: similar to IAP-associated factor VIAF1
  misc_feature (14)..(189): NCBI GI NO: 31560120 NR Description: IAP-associated factor VIAF1 [Mus musculus]
MGDYHFVYKDLEGASTQWDDIQRKLGNLPPKAPAFKPPPFTPASDDQPKDKTWIDSKTSEELEDLEDNLDDDRFLQEYRKKRLAEMQEAAKVLRFGSVIPISGSDFVREVSQAPSDVWVVVILYKEGIPECGLLMQSIEELALRYPSTKFVKIISTDCIPNYPDRNLPTLLVYNNGAVKGNYVGLHSFGRRCTPEGVALVLCQSDPVLNDGHNGNEAIIEGVRKRFIEKVVADHEEGGDDDYSSD

SEQ ID NO: 7404 - protein, 160 aa, Glycine max
  peptide (1)..(160): Ceres Seq. ID no. 15221666
  misc_feature (1)..(158): NCBI GI NO: 34906294 NR Description: unnamed protein product
  misc_feature (1)..(160): NCBI GI NO: 21593265 NR Description: unknown [Arabidopsis thaliana]
  misc_feature (1)..(160): NCBI GI NO: 15241349 NR Description: expressed protein [Arabidopsis thaliana]
  misc_feature (1)..(154): NCBI GI NO: 13129044 NR Description: IAP-associated factor VIAF1; phosducin-like 2
  misc_feature (1)..(157): NCBI GI NO: 28574924 NR Description: viral iap associated factor CG18593-PA
  misc_feature (1)..(157): NCBI GI NO: 10716148 NR Description: IAP-associated factor VIAF1
  misc_feature (1)..(155): NCBI GI NO: 9957067 NR Description: IAP-associated factor Viaf1 [Danio rerio]
  misc_feature (1)..(155): NCBI GI NO: 40555753 NR Description: Unknown (protein for MGC:73170) [Danio rerio]
  misc_feature (1)..(156): NCBI GI NO: 34875632 NR Description: similar to IAP-associated factor VIAF1
  misc_feature (1)..(104): NCBI GI NO: 31560120 NR Description: IAP-associated factor VIAF1 [Mus musculus]
MQEAAKVLRFGSVIPISGSDFVREVSQAPSDVWVVVILYKEGIPECGLLMQSIEELALRYPSTKFVKIISTDCIPNYPDRNLPTLLVYNNGAVKGNYVGLHSFGRRCTPEGVALVLCQSDPVLNDGHNGNEAIIEGVRKRFIEKVVADHEEGGDDDYSSD

SEQ ID NO: 7405 - DNA, 921 bp, Glycine max
  misc_feature (1)..(921): Ceres Seq. ID no. 14302561
attttcccaaattctcattatctctctctctctctgtttcgctttcaccgaagaataacttgactttcccgaactccacctgagaaaaagatacccttaattcgcaggcgcgtcttgtgttggacaacaaccacaagatgattaacttcgaagaaaccgagttgcgactcggcctccctggcaacgactcagcactcaagggaagtgctgccaagagaggcttctctgaaactgcttctgttgatttgaagcttaatctttcttcttgcattaacgactctgcctcggattcaccctcatctgtgtctacagagaagcccaaagagaacaagactaccactgctgaacctcctccagctaatgatccagcaaaaccacctgcaaaggcacaagtggtgggttggccaccagttaggtcatttagaaagaacatagttcaaaggaacagcaatgaagaagaggcagagaagagcacgaagaatgctttcgtgaaggtgagcatggatggtgcaccgtatctacgaaaggtggacataaagttgtacaagagctaccaggagctgtcagatgcgctggctaagatgttcagttccttcacgattgaaaagtgtgggtcccaagggatgaaggactttatgaatgagaccaatggctctgactatgtacccacatatgaagacaaggacggagactggatgctcgtcggtgatgtgccctgggagatgttcgttgaatcatgcaagcgtcttcgcataatgaaaggctccgaggcaatcggtcttgcgccaagagccgtggaaaagtgcaagaacagaagctgaagaagtgatttcatctgcgtcacaaggaagcaaattgactcgagcaagatcgagtctaatataggaataagagtttaattatcatgtgcctttgttatct

SEQ ID NO: 7406 - protein, 227 aa, Glycine max
  peptide (1)..(227): Ceres Seq. ID no. 14302562
  misc_feature (2)..(219): Pfam Name: Pfam Description:  AUX/IAA family
  misc_feature (1)..(227): NCBI GI NO: 20385508 NR Description: auxin-regulated protein
  misc_feature (84)..(227): NCBI GI NO: 20269059 NR Description: aux/IAA protein
  misc_feature (1)..(107): NCBI GI NO: 20269059 NR Description: aux/IAA protein
  misc_feature (2)..(227): NCBI GI NO: 114734 NR Description: AUXIN-INDUCED PROTEIN AUX28
  misc_feature (2)..(227): NCBI GI NO: 4887020 NR Description: Nt-iaa28 deduced protein [Nicotiana tabacum]
  misc_feature (1)..(227): NCBI GI NO: 5139697 NR Description: expressed in cucumber hypocotyls [Cucumis sativus]
  misc_feature (1)..(215): NCBI GI NO: 20269061 NR Description: aux/IAA protein
  misc_feature (2)..(227): NCBI GI NO: 22328628 NR Description: auxin-responsive protein, putative
  misc_feature (2)..(227): NCBI GI NO: 15219694 NR Description: auxin-responsive protein IAA17
  misc_feature (2)..(227): NCBI GI NO: 21592887 NR Description: putative auxin-induced protein, IAA17/AXR3-1
MINFEETELRLGLPGNDSALKGSAAKRGFSETASVDLKLNLSSCINDSASDSPSSVSTEKPKENKTTTAEPPPANDPAKPPAKAQVVGWPPVRSFRKNIVQRNSNEEEAEKSTKNAFVKVSMDGAPYLRKVDIKLYKSYQELSDALAKMFSSFTIEKCGSQGMKDFMNETNGSDYVPTYEDKDGDWMLVGDVPWEMFVESCKRLRIMKGSEAIGLAPRAVEKCKNRS

SEQ ID NO: 7407 - DNA, 713 bp, Glycine max
  misc_feature (1)..(713): Ceres Seq. ID no. 13595468
aaaataaaactgcatgttgattgcctttactccgaaaaatgaatttttttataatatttatgttgattattgctatgattttaggggtgagcgaagcaatttggcataaagttgttgcgcctttgtctaagtgtgagaagaaccgagtaattattcgaaatgaacttggtccaggtagaagtctagaatatcattgtcattctaatggtaaagatcaaggcgtccagtttttaaaattcaatgaagaaaggaactttgaatttgtcgatcatttttttggaaaaaaaaataaagtgaattgtgttttgaggcaagggttgtggatgcagagttcttctcgagactttgaagcataccatacaagtaaaagtaatggtaacaattgtggacagactcgtgaatggattgcgagaacagatggaacatactttcaaagaaatcgaattaagccagcagcttttgtgtttgcttggattaataaaaaaccttaaaaaaatctaattgatgtttctgattaagacactcaaaatctttaatcgtttctaattttaattattgttgttcgttttgtaaactttgtcatgattctgctttcgtgtcgaatattaagaaaataaatattgtatctatgtaattatgtatatttttttgtttgtcatctatttataatgtgttttaaataataagtatgcaaaaaaaaattggatttgtgg

SEQ ID NO: 7408 - protein, 150 aa, Glycine max
  peptide (1)..(150): Ceres Seq. ID no. 15221586
  misc_feature (35)..(145): Pfam Name: Pfam Description:  Plant self-incompatibility protein S1
  misc_feature (1)..(148): NCBI GI NO: 30681033 NR Description: expressed protein [Arabidopsis thaliana]
  misc_feature (32)..(148): NCBI GI NO: 10178217 NR Description: gene_id:MLF18.17~unknown protein
  misc_feature (32)..(138): NCBI GI NO: 10177698 NR Description: gb|AAD30637
  misc_feature (1)..(138): NCBI GI NO: 15237693 NR Description: self-incompatibility protein-related
  misc_feature (1)..(145): NCBI GI NO: 25372947 NR Description: hypothetical protein F11M15.10
  misc_feature (1)..(145): NCBI GI NO: 25372948 NR Description: hypothetical protein F11M15.11
  misc_feature (33)..(146): NCBI GI NO: 15231647 NR Description: self-incompatibility protein-related
  misc_feature (32)..(145): NCBI GI NO: 15223787 NR Description: hypothetical protein [Arabidopsis thaliana]
  misc_feature (32)..(145): NCBI GI NO: 15223785 NR Description: hypothetical protein [Arabidopsis thaliana]
MNFFIIFMLIIAMILGVSEAIWHKVVAPLSKCEKNRVIIRNELGPGRSLEYHCHSNGKDQGVQFLKFNEERNFEFVDHFFGKKNKVNCVLRQGLWMQSSSRDFEAYHTSKSNGNNCGQTREWIARTDGTYFQRNRIKPAAFVFAWINKKP

SEQ ID NO: 7409 - protein, 143 aa, Glycine max
  peptide (1)..(143): Ceres Seq. ID no. 15221587
  misc_feature (28)..(138): Pfam Name: Pfam Description:  Plant self-incompatibility protein S1
  misc_feature (1)..(141): NCBI GI NO: 30681033 NR Description: expressed protein [Arabidopsis thaliana]
  misc_feature (25)..(141): NCBI GI NO: 10178217 NR Description: gene_id:MLF18.17~unknown protein
  misc_feature (25)..(131): NCBI GI NO: 10177698 NR Description: gb|AAD30637
  misc_feature (1)..(131): NCBI GI NO: 15237693 NR Description: self-incompatibility protein-related
  misc_feature (1)..(138): NCBI GI NO: 25372947 NR Description: hypothetical protein F11M15.10
  misc_feature (1)..(138): NCBI GI NO: 25372948 NR Description: hypothetical protein F11M15.11
  misc_feature (26)..(139): NCBI GI NO: 15231647 NR Description: self-incompatibility protein-related
  misc_feature (25)..(138): NCBI GI NO: 15223787 NR Description: hypothetical protein [Arabidopsis thaliana]
  misc_feature (25)..(138): NCBI GI NO: 15223785 NR Description: hypothetical protein [Arabidopsis thaliana]
MLIIAMILGVSEAIWHKVVAPLSKCEKNRVIIRNELGPGRSLEYHCHSNGKDQGVQFLKFNEERNFEFVDHFFGKKNKVNCVLRQGLWMQSSSRDFEAYHTSKSNGNNCGQTREWIARTDGTYFQRNRIKPAAFVFAWINKKP

SEQ ID NO: 7410 - protein, 138 aa, Glycine max
  peptide (1)..(138): Ceres Seq. ID no. 15221588
  misc_feature (23)..(133): Pfam Name: Pfam Description:  Plant self-incompatibility protein S1
  misc_feature (1)..(136): NCBI GI NO: 30681033 NR Description: expressed protein [Arabidopsis thaliana]
  misc_feature (20)..(136): NCBI GI NO: 10178217 NR Description: gene_id:MLF18.17~unknown protein
  misc_feature (20)..(126): NCBI GI NO: 10177698 NR Description: gb|AAD30637
  misc_feature (1)..(126): NCBI GI NO: 15237693 NR Description: self-incompatibility protein-related
  misc_feature (1)..(133): NCBI GI NO: 25372947 NR Description: hypothetical protein F11M15.10
  misc_feature (1)..(133): NCBI GI NO: 25372948 NR Description: hypothetical protein F11M15.11
  misc_feature (21)..(134): NCBI GI NO: 15231647 NR Description: self-incompatibility protein-related
  misc_feature (20)..(133): NCBI GI NO: 15223787 NR Description: hypothetical protein [Arabidopsis thaliana]
  misc_feature (20)..(133): NCBI GI NO: 15223785 NR Description: hypothetical protein [Arabidopsis thaliana]
MILGVSEAIWHKVVAPLSKCEKNRVIIRNELGPGRSLEYHCHSNGKDQGVQFLKFNEERNFEFVDHFFGKKNKVNCVLRQGLWMQSSSRDFEAYHTSKSNGNNCGQTREWIARTDGTYFQRNRIKPAAFVFAWINKKP

SEQ ID NO: 7411 - DNA, 742 bp, Glycine max
  misc_feature (1)..(742): Ceres Seq. ID no. 13582260
agcttgggaggaaataatatcatttccgttctcaaaatcataacagtacttcgcgtgccctagctcactccgtcgctcctcacccttccggcagtgcttggtcgtggccgtcacggttcaaacttcaaaagcatttgttgtgttggagtaggctatggatgacttgtttgattcttcgctgaacttggaggacacccattacaaggaaggctatgacgaaggctacagccatggccttgtcactggcaaggaagaagctaggcaggttggcctcaaggttggctttgaggttggcgaggagcttggtttctataggggttgtgtcgaaatctggacttctgcgatccggctcgacccaacctgtttctctccacgggctaaaacatttatttgccagatggaggagttgatccagaaataccctctcatggatccagaaaatgcacaagtgcaagagatcatggatagcctcaggctcaagttcaagatggtttgttcttccttgcatgtcaaacttgagtataatgggtatcccaaatcttctacggaggtcaatgatattcaattctgagctagttatgatattttcagtctttagggatatccatgtgtagggaacctctgagttgggttagttgatgaacaaattacgtgttatcattttacaaacatttgtgcaagtcaatgtatcgaataattattttatattaaaaatgatgatatatacattgtttatgaacgt

SEQ ID NO: 7412 - protein, 138 aa, Glycine max
  peptide (1)..(138): Ceres Seq. ID no. 13582261
  misc_feature (3)..(136): NCBI GI NO: 27261030 NR Description: P0681F05.15
  misc_feature (2)..(119): NCBI GI NO: 25411995 NR Description: hypothetical protein At2g20830
  misc_feature (3)..(138): NCBI GI NO: 23943892 NR Description: oral cancer overexpressed 1 [Homo sapiens]
  misc_feature (3)..(130): NCBI GI NO: 13905220 NR Description: 2210010N10Rik protein [Mus musculus]
  misc_feature (3)..(130): NCBI GI NO: 27448229 NR Description: hypothetical protein [Mus musculus]
  misc_feature (1)..(123): NCBI GI NO: 27661646 NR Description: similar to RIKEN cDNA 2210010N10 gene
  misc_feature (5)..(124): NCBI GI NO: 28829147 NR Description: hypothetical protein [Dictyostelium discoideum]
  misc_feature (1)..(135): NCBI GI NO: 38106997 NR Description: hypothetical protein MG07505.4
MDDLFDSSLNLEDTHYKEGYDEGYSHGLVTGKEEARQVGLKVGFEVGEELGFYRGCVEIWTSAIRLDPTCFSPRAKTFICQMEELIQKYPLMDPENAQVQEIMDSLRLKFKMVCSSLHVKLEYNGYPKSSTEVNDIQF

SEQ ID NO: 7413 - DNA, 1087 bp, Glycine max
  misc_feature (1)..(1087): Ceres Seq. ID no. 12611474
aaaaagtgaagaaaacagaccaaaaatagaaagaaagagaaataccaaaaccttggcgcatcatattctttattccctcacttggatcgttaattccgcgaacgagcttctgcccttcaaattaaccatggagaatattggtgaggagtacggctactggccggagaacgacatgcttttccaaaacgaagaccttggcagctgggcgataatggatgaggcagcgttatcagggtcagggtactatgattcaagctccccggacggtactggtgcttcttcatcggtggcatctaagaacattgtctccgagaggaatagaaggaagaagctcaacgataggctttttgctctaagagcagtggtccccaacattaccaagatggataaggcttctatcattaaggatgctattgagtacatccagcacttgcatgaccaagagaagagaatccaagctgagattttggatcttgaatctgggaataaactcaaaaacccaacctatgaatttgaccaggacctccctattctgctcaggtccaagaagaagagaacagaacagctattcggttctgtcagttcaagaaattctccaattgaaataattgacctgagggtaacatacatgggagagaagacgtttgtggtgagcttgacatgtagcaaaaggacagacacaatggtaaaactgtgtgcggtgttcgaatctttaaagctgaaagtcattacggccaatatcacttctttttcaggcacgcttctgaagacagtcttcatccaggcagatgaagaagagagagactttttgcatataaaaattcagacagcgatttcagctctcaatgatcctctaagcccaatgagtatctgatgaagaaacgagttcagatcgaagctgagattgttctgtttgttgagtttccttttctcactcaatgttaattatctgtagtgaatgagtcttaaactcgaaagttggcaagttttctttttcttttccattttctgtatgttgatgttgatagcctctaacgttgtaagctttacgttattaatgaaatcgcattttcatgttcttcatggt

SEQ ID NO: 7414 - protein, 290 aa, Glycine max
  peptide (1)..(290): Ceres Seq. ID no. 12611475
  misc_feature (98)..(144): Pfam Name: Pfam Description:  Helix-loop-helix DNA-binding domain
  misc_feature (43)..(290): NCBI GI NO: 18423944 NR Description: bHLH protein; protein id: At5g57150
  misc_feature (43)..(290): NCBI GI NO: 21554896 NR Description: unknown [Arabidopsis thaliana]
  misc_feature (43)..(284): NCBI GI NO: 30688496 NR Description: bHLH protein family [Arabidopsis thaliana]
  misc_feature (43)..(261): NCBI GI NO: 8843817 NR Description: contains similarity to unknownprotein~gene_id:MUL3
  misc_feature (43)..(261): NCBI GI NO: 16604348 NR Description: AT5g57150/MUL3_10 [Arabidopsis thaliana]
  misc_feature (199)..(289): NCBI GI NO: 32489775 NR Description: OSJNBb0018A10.6
  misc_feature (74)..(160): NCBI GI NO: 32489775 NR Description: OSJNBb0018A10.6
  misc_feature (199)..(289): NCBI GI NO: 29466635 NR Description: Transcription Factor [Oryza sativa]
  misc_feature (74)..(160): NCBI GI NO: 29466635 NR Description: Transcription Factor [Oryza sativa]
  misc_feature (43)..(205): NCBI GI NO: 7486225 NR Description: hypothetical protein F27B13
KSEENRPKIERKRNTKTLAHHILYSLTWIVNSANELLPFKLTMENIGEEYGYWPENDMLFQNEDLGSWAIMDEAALSGSGYYDSSSPDGTGASSSVASKNIVSERNRRKKLNDRLFALRAVVPNITKMDKASIIKDAIEYIQHLHDQEKRIQAEILDLESGNKLKNPTYEFDQDLPILLRSKKKRTEQLFGSVSSRNSPIEIIDLRVTYMGEKTFVVSLTCSKRTDTMVKLCAVFESLKLKVITANITSFSGTLLKTVFIQADEEERDFLHIKIQTAISALNDPLSPMSI

SEQ ID NO: 7415 - protein, 248 aa, Glycine max
  peptide (1)..(248): Ceres Seq. ID no. 12611476
  misc_feature (56)..(102): Pfam Name: Pfam Description:  Helix-loop-helix DNA-binding domain
  misc_feature (1)..(248): NCBI GI NO: 18423944 NR Description: bHLH protein; protein id: At5g57150
  misc_feature (1)..(248): NCBI GI NO: 21554896 NR Description: unknown [Arabidopsis thaliana]
  misc_feature (1)..(242): NCBI GI NO: 30688496 NR Description: bHLH protein family [Arabidopsis thaliana]
  misc_feature (1)..(219): NCBI GI NO: 8843817 NR Description: contains similarity to unknownprotein~gene_id:MUL3
  misc_feature (1)..(219): NCBI GI NO: 16604348 NR Description: AT5g57150/MUL3_10 [Arabidopsis thaliana]
  misc_feature (157)..(247): NCBI GI NO: 32489775 NR Description: OSJNBb0018A10.6
  misc_feature (32)..(118): NCBI GI NO: 32489775 NR Description: OSJNBb0018A10.6
  misc_feature (157)..(247): NCBI GI NO: 29466635 NR Description: Transcription Factor [Oryza sativa]
  misc_feature (32)..(118): NCBI GI NO: 29466635 NR Description: Transcription Factor [Oryza sativa]
  misc_feature (1)..(163): NCBI GI NO: 7486225 NR Description: hypothetical protein F27B13
MENIGEEYGYWPENDMLFQNEDLGSWAIMDEAALSGSGYYDSSSPDGTGASSSVASKNIVSERNRRKKLNDRLFALRAVVPNITKMDKASIIKDAIEYIQHLHDQEKRIQAEILDLESGNKLKNPTYEFDQDLPILLRSKKKRTEQLFGSVSSRNSPIEIIDLRVTYMGEKTFVVSLTCSKRTDTMVKLCAVFESLKLKVITANITSFSGTLLKTVFIQADEEERDFLHIKIQTAISALNDPLSPMSI

SEQ ID NO: 7416 - protein, 233 aa, Glycine max
  peptide (1)..(233): Ceres Seq. ID no. 12611477
  misc_feature (41)..(87): Pfam Name: Pfam Description:  Helix-loop-helix DNA-binding domain
  misc_feature (1)..(233): NCBI GI NO: 18423944 NR Description: bHLH protein; protein id: At5g57150
  misc_feature (1)..(233): NCBI GI NO: 21554896 NR Description: unknown [Arabidopsis thaliana]
  misc_feature (1)..(227): NCBI GI NO: 30688496 NR Description: bHLH protein family [Arabidopsis thaliana]
  misc_feature (1)..(204): NCBI GI NO: 8843817 NR Description: contains similarity to unknownprotein~gene_id:MUL3
  misc_feature (1)..(204): NCBI GI NO: 16604348 NR Description: AT5g57150/MUL3_10 [Arabidopsis thaliana]
  misc_feature (142)..(232): NCBI GI NO: 32489775 NR Description: OSJNBb0018A10.6
  misc_feature (17)..(103): NCBI GI NO: 32489775 NR Description: OSJNBb0018A10.6
  misc_feature (142)..(232): NCBI GI NO: 29466635 NR Description: Transcription Factor [Oryza sativa]
  misc_feature (17)..(103): NCBI GI NO: 29466635 NR Description: Transcription Factor [Oryza sativa]
  misc_feature (1)..(148): NCBI GI NO: 7486225 NR Description: hypothetical protein F27B13
MLFQNEDLGSWAIMDEAALSGSGYYDSSSPDGTGASSSVASKNIVSERNRRKKLNDRLFALRAVVPNITKMDKASIIKDAIEYIQHLHDQEKRIQAEILDLESGNKLKNPTYEFDQDLPILLRSKKKRTEQLFGSVSSRNSPIEIIDLRVTYMGEKTFVVSLTCSKRTDTMVKLCAVFESLKLKVITANITSFSGTLLKTVFIQADEEERDFLHIKIQTAISALNDPLSPMSI

SEQ ID NO: 7417 - DNA, 1309 bp, Glycine max
  misc_feature (1)..(1309): Ceres Seq. ID no. 14301430
atcacatcgtctcaccaagcagcagctagctaagctaagcctagccaaagcttctctagcttcggtagtccaggaaacatgaggctcgcggtggttctcctctgcgccctggtggccgtccaggtcgcgctcctcgccgccccggcggaggccggcgagctggtggtcgggtactacgacaagaaatgcaggggcgtggagaacgtcgtccagtggcacgtcaggagggcgctcaagaccaaccgccgcgccggtgccgccctcgtccgcctcctcttccacgactgcttcgtcaggggttgcgatgcctctgtgctccttgacgcgtcccccgagaaccctcacccggagaaggaggcgccggtgaacatcgggctggccgccttcgacctcctggaggagatcaaggcggccgtcgaggacaggtgccccggcgtggtgtcctgctctgacatcctcatttacgcagcccgtgacgcggcccacgccctcagcaatggcaacatccacttcgacgtccctgccgggcgcctcgacggcctcgtctcctcggccgccgaggcccaggcggagctcccggactccaccttcaccgtgcagcagctcatcgacaacttcgcacgcaaggacttcgacgtggaggagctggtcatcctgtccggcgcgcactccatcggcgtcggccactgctcctccttcaccggccgcctcaccgcgccgccggagcagatcaacccggcctaccgcaaccttctcaaccacaagtgccaccagggcgccaacccggccgtcgtcaacaacgtccgcgatgaggactacgagacggtgtccaagttcatgcccgggttcaccagccgggtgcgcaagatcagcgacttcctcgacaacaccttctaccacaacaacctcgccaggatcgtcagcttcaactccgactggcagctcatgacccacaccgaggccaggggccacgtccacgagtacgccgacaacgccacgctctgggacggcgacttcgcggaatccctgctcaagctcagcaagctgtccatgcccgccgggagcaagggcggcatcaggaagaagtgcagcatcgccacccaccctctctactaaacaagtcgtatgcatgcatgaacaaggtcgatccaacgaagaagagaacctttgcccctggcggtgtgcggatttcttcaataatcatgtgatttttctggttcaatccattcttttgattcccattggttgtgtattttatttatggcaacatatatgtatcacggaaataaagttacggtctttcaaatgt

SEQ ID NO: 7418 - protein, 345 aa, Glycine max
  peptide (1)..(345): Ceres Seq. ID no. 14301431
  misc_feature (44)..(305): Pfam Name: Pfam Description:  Peroxidase
  misc_feature (1)..(345): NCBI GI NO: 34894404 NR Description: putative peroxidase
  misc_feature (1)..(342): NCBI GI NO: 34894394 NR Description: putative peroxidase
  misc_feature (3)..(337): NCBI GI NO: 34894402 NR Description: putative peroxidase
  misc_feature (11)..(337): NCBI GI NO: 34894398 NR Description: putative peroxidase
  misc_feature (7)..(235): NCBI GI NO: 27261094 NR Description: putative peroxidase
  misc_feature (213)..(339): NCBI GI NO: 27261094 NR Description: putative peroxidase
  misc_feature (12)..(339): NCBI GI NO: 12039346 NR Description: putative peroxidase [Oryza sativa]
  misc_feature (12)..(339): NCBI GI NO: 12039335 NR Description: putative peroxidase [Oryza sativa]
  misc_feature (21)..(337): NCBI GI NO: 34896268 NR Description: putative peroxidase [Oryza sativa]
  misc_feature (4)..(342): NCBI GI NO: 34896944 NR Description: putative peroxidase [Oryza sativa]
MRLAVVLLCALVAVQVALLAAPAEAGELVVGYYDKKCRGVENVVQWHVRRALKTNRRAGAALVRLLFHDCFVRGCDASVLLDASPENPHPEKEAPVNIGLAAFDLLEEIKAAVEDRCPGVVSCSDILIYAARDAAHALSNGNIHFDVPAGRLDGLVSSAAEAQAELPDSTFTVQQLIDNFARKDFDVEELVILSGAHSIGVGHCSSFTGRLTAPPEQINPAYRNLLNHKCHQGANPAVVNNVRDEDYETVSKFMPGFTSRVRKISDFLDNTFYHNNLARIVSFNSDWQLMTHTEARGHVHEYADNATLWDGDFAESLLKLSKLSMPAGSKGGIRKKCSIATHPLY

SEQ ID NO: 7419 - DNA, 840 bp, Glycine max
  misc_feature (1)..(840): Ceres Seq. ID no. 13639278
acaattcccaggaagaacgtttcaattctaatcagtagttaaacttttccctacaccaaaatcatctcttcactaatggaaggtggactaaagggaagctcattacaagatatgaagcttttgtttgttgaaatgggtgttggctatgaccttcatggtcaggacataacagctgccgcaatgagagcatgcagagatgcaatttctgccaattcaattccagctttccgtaaaggtagcatccctggtgttacatctgatcacatgaaattacatgtcaaactgggggtgcctcatcctctgcaacaaaacttgaacaaggataaaattaagtctgtgtttccatacggacaaatcatgaactttgaagtagtggatggtggacttgtgtgctcaactgaagaaatggccgaaaagaacgatgactgctacattgttaatgctgctgtatatgttggctactaggcttttggtatcttagatccctctggaatcttaatttccatggggaacttgcatgtgtgttggagttttgttgcttcagtaaagctgcaatgagggcaaagtttgcattttagcttttttatatgtattttaattaagagtagttgtgttatcctttcattgtttctgcacgaatgtacctagtacttttgtcagttaggttgaatttactatgtttgtttgtaataatggatcaaagatcatctgaagttcatttttgaactgcatacttctcaaccattgatgtatactttaccttaaacaaaatattaatagaaaaataaaataaattaatgtagggtgaaagcttaaactgcacccctgctgttagttttc

SEQ ID NO: 7420 - protein, 129 aa, Glycine max
  peptide (1)..(129): Ceres Seq. ID no. 13639279
  misc_feature (3)..(129): NCBI GI NO: 18396927 NR Description: expressed protein [Arabidopsis thaliana]
  misc_feature (3)..(129): NCBI GI NO: 21954066 NR Description: unknown protein [Arabidopsis thaliana]
  misc_feature (13)..(129): NCBI GI NO: 30690579 NR Description: expressed protein [Arabidopsis thaliana]
  misc_feature (3)..(90): NCBI GI NO: 34912624 NR Description: P0410E01.16
  misc_feature (13)..(129): NCBI GI NO: 37520060 NR Description: hypothetical protein glr0491
  misc_feature (15)..(129): NCBI GI NO: 23098097 NR Description: hypothetical protein
  misc_feature (14)..(129): NCBI GI NO: 23098421 NR Description: hypothetical protein
  misc_feature (14)..(129): NCBI GI NO: 16802555 NR Description: lmo0512 [Listeria monocytogenes EGD-e]
  misc_feature (14)..(129): NCBI GI NO: 16799587 NR Description: lin0512 [Listeria innocua]
  misc_feature (19)..(129): NCBI GI NO: 27379135 NR Description: blr4024 [Bradyrhizobium japonicum]
MEGGLKGSSLQDMKLLFVEMGVGYDLHGQDITAAAMRACRDAISANSIPAFRKGSIPGVTSDHMKLHVKLGVPHPLQQNLNKDKIKSVFPYGQIMNFEVVDGGLVCSTEEMAEKNDDCYIVNAAVYVGY

SEQ ID NO: 7421 - protein, 117 aa, Glycine max
  peptide (1)..(117): Ceres Seq. ID no. 13639280
  misc_feature (1)..(117): NCBI GI NO: 18396927 NR Description: expressed protein [Arabidopsis thaliana]
  misc_feature (1)..(117): NCBI GI NO: 21954066 NR Description: unknown protein [Arabidopsis thaliana]
  misc_feature (1)..(117): NCBI GI NO: 30690579 NR Description: expressed protein [Arabidopsis thaliana]
  misc_feature (1)..(78): NCBI GI NO: 34912624 NR Description: P0410E01.16
  misc_feature (1)..(117): NCBI GI NO: 37520060 NR Description: hypothetical protein glr0491
  misc_feature (3)..(117): NCBI GI NO: 23098097 NR Description: hypothetical protein
  misc_feature (2)..(117): NCBI GI NO: 23098421 NR Description: hypothetical protein
  misc_feature (2)..(117): NCBI GI NO: 16802555 NR Description: lmo0512 [Listeria monocytogenes EGD-e]
  misc_feature (2)..(117): NCBI GI NO: 16799587 NR Description: lin0512 [Listeria innocua]
  misc_feature (7)..(117): NCBI GI NO: 27379135 NR Description: blr4024 [Bradyrhizobium japonicum]
MKLLFVEMGVGYDLHGQDITAAAMRACRDAISANSIPAFRKGSIPGVTSDHMKLHVKLGVPHPLQQNLNKDKIKSVFPYGQIMNFEVVDGGLVCSTEEMAEKNDDCYIVNAAVYVGY

SEQ ID NO: 7422 - protein, 110 aa, Glycine max
  peptide (1)..(110): Ceres Seq. ID no. 13639281
  misc_feature (1)..(110): NCBI GI NO: 18396927 NR Description: expressed protein [Arabidopsis thaliana]
  misc_feature (1)..(110): NCBI GI NO: 21954066 NR Description: unknown protein [Arabidopsis thaliana]
  misc_feature (1)..(110): NCBI GI NO: 30690579 NR Description: expressed protein [Arabidopsis thaliana]
  misc_feature (1)..(71): NCBI GI NO: 34912624 NR Description: P0410E01.16
  misc_feature (1)..(110): NCBI GI NO: 37520060 NR Description: hypothetical protein glr0491
  misc_feature (1)..(110): NCBI GI NO: 23098097 NR Description: hypothetical protein
  misc_feature (1)..(110): NCBI GI NO: 23098421 NR Description: hypothetical protein
  misc_feature (1)..(110): NCBI GI NO: 16802555 NR Description: lmo0512 [Listeria monocytogenes EGD-e]
  misc_feature (1)..(110): NCBI GI NO: 16799587 NR Description: lin0512 [Listeria innocua]
  misc_feature (1)..(110): NCBI GI NO: 27379135 NR Description: blr4024 [Bradyrhizobium japonicum]
MGVGYDLHGQDITAAAMRACRDAISANSIPAFRKGSIPGVTSDHMKLHVKLGVPHPLQQNLNKDKIKSVFPYGQIMNFEVVDGGLVCSTEEMAEKNDDCYIVNAAVYVGY

SEQ ID NO: 7423 - DNA, 987 bp, Glycine max
  misc_feature (1)..(987): Ceres Seq. ID no. 13639250
cttctcccttctcctacctcccacacatcctcgaatcacaacctcacacctcctcccctgagtcctgaccgaccaccccgcagctagcttcgcgcagccagcaccgaccgatcacacgctagctgctgctgctgaggcgaccgaccggctatccatggcggtgaaagactgcggcgggcacaagggcgggggctgcgagtgccaccgccgccggctctaccgcaagtgctgcggcgcgctgctggccctcgtcatcctcgccctcttcatcatcctcatcgtctacctggtgctccgcccccacaagccccgcttctacctgcaggacctggcggtgctctgcctcaacgtcacgccgcccacctccgcctacctcttcaccaccatgcaggccacggtcgcggcgcgcaaccccaacgaccgcgtcggcgtctactacgacgaggcggacatgtacgcggagtacaagggcgtgcccatcaccgtccccacccgcctccccgtcgcctaccagggccaccgggaccagtccgtctggtcgccctacctccggtccatggacagcgtcgtgctcccgccgcagctcgccatcgcgctggcgcaggacgagacggccgggtacgtgctggtggacgtcaaggtggacggtcaggtgcgctggaaggtgggcacgtggatctccggccactaccacctccgggtcaactgcccggccctcatcagggtgaacgagggcaagggcagctacggcgccaccaccggcggcggccccgactacttccgcttccagcaggccgccgcctgcgccgtcgacgtctgatcatgcatcatcggttcgacctccaccgatccatgcctgtgtccaaattcaaattcaggggaatcgattgattgcttttctctctctagtttctttcttgcttctttttagtctctttttgacttgttgatcgattggttaaagaaatgaatgaaaacaaaaggttg

SEQ ID NO: 7424 - protein, 221 aa, Glycine max
  peptide (1)..(221): Ceres Seq. ID no. 13639251
  misc_feature (3)..(221): NCBI GI NO: 32488715 NR Description: OSJNBa0088H09.16
  misc_feature (1)..(221): NCBI GI NO: 38637038 NR Description: harpin-induced protein 1 family (HIN1)-like
  misc_feature (17)..(221): NCBI GI NO: 38344036 NR Description: OJ991214_12.17
  misc_feature (14)..(221): NCBI GI NO: 15229906 NR Description: harpin-induced protein 1 family (HIN1)
  misc_feature (1)..(221): NCBI GI NO: 22326984 NR Description: harpin-induced protein 1 family (HIN1)
  misc_feature (1)..(221): NCBI GI NO: 15227538 NR Description: harpin-induced protein 1 family (HIN1)
  misc_feature (4)..(221): NCBI GI NO: 15231227 NR Description: harpin-induced protein 1 family (HIN1)
  misc_feature (3)..(221): NCBI GI NO: 18399308 NR Description: harpin-induced protein 1 family (HIN1)
  misc_feature (3)..(221): NCBI GI NO: 28392929 NR Description: putative VAMP protein SEC22 [Arabidopsis thaliana]
  misc_feature (1)..(221): NCBI GI NO: 15240001 NR Description: harpin-induced protein, putative (HIN1)
MAVKDCGGHKGGGCECHRRRLYRKCCGALLALVILALFIILIVYLVLRPHKPRFYLQDLAVLCLNVTPPTSAYLFTTMQATVAARNPNDRVGVYYDEADMYAEYKGVPITVPTRLPVAYQGHRDQSVWSPYLRSMDSVVLPPQLAIALAQDETAGYVLVDVKVDGQVRWKVGTWISGHYHLRVNCPALIRVNEGKGSYGATTGGGPDYFRFQQAAACAVDV

SEQ ID NO: 7425 - protein, 144 aa, Glycine max
  peptide (1)..(144): Ceres Seq. ID no. 13639252
  misc_feature (1)..(144): NCBI GI NO: 32488715 NR Description: OSJNBa0088H09.16
  misc_feature (1)..(144): NCBI GI NO: 38637038 NR Description: harpin-induced protein 1 family (HIN1)-like
  misc_feature (1)..(144): NCBI GI NO: 38344036 NR Description: OJ991214_12.17
  misc_feature (1)..(144): NCBI GI NO: 15229906 NR Description: harpin-induced protein 1 family (HIN1)
  misc_feature (1)..(144): NCBI GI NO: 22326984 NR Description: harpin-induced protein 1 family (HIN1)
  misc_feature (1)..(144): NCBI GI NO: 15227538 NR Description: harpin-induced protein 1 family (HIN1)
  misc_feature (1)..(144): NCBI GI NO: 15231227 NR Description: harpin-induced protein 1 family (HIN1)
  misc_feature (1)..(144): NCBI GI NO: 18399308 NR Description: harpin-induced protein 1 family (HIN1)
  misc_feature (1)..(144): NCBI GI NO: 28392929 NR Description: putative VAMP protein SEC22 [Arabidopsis thaliana]
  misc_feature (1)..(144): NCBI GI NO: 15240001 NR Description: harpin-induced protein, putative (HIN1)
MQATVAARNPNDRVGVYYDEADMYAEYKGVPITVPTRLPVAYQGHRDQSVWSPYLRSMDSVVLPPQLAIALAQDETAGYVLVDVKVDGQVRWKVGTWISGHYHLRVNCPALIRVNEGKGSYGATTGGGPDYFRFQQAAACAVDV

SEQ ID NO: 7426 - protein, 122 aa, Glycine max
  peptide (1)..(122): Ceres Seq. ID no. 13639253
  misc_feature (1)..(122): NCBI GI NO: 32488715 NR Description: OSJNBa0088H09.16
  misc_feature (1)..(122): NCBI GI NO: 38637038 NR Description: harpin-induced protein 1 family (HIN1)-like
  misc_feature (1)..(122): NCBI GI NO: 38344036 NR Description: OJ991214_12.17
  misc_feature (1)..(122): NCBI GI NO: 15229906 NR Description: harpin-induced protein 1 family (HIN1)
  misc_feature (1)..(122): NCBI GI NO: 22326984 NR Description: harpin-induced protein 1 family (HIN1)
  misc_feature (1)..(122): NCBI GI NO: 15227538 NR Description: harpin-induced protein 1 family (HIN1)
  misc_feature (1)..(122): NCBI GI NO: 15231227 NR Description: harpin-induced protein 1 family (HIN1)
  misc_feature (1)..(122): NCBI GI NO: 18399308 NR Description: harpin-induced protein 1 family (HIN1)
  misc_feature (1)..(122): NCBI GI NO: 28392929 NR Description: putative VAMP protein SEC22 [Arabidopsis thaliana]
  misc_feature (1)..(122): NCBI GI NO: 15240001 NR Description: harpin-induced protein, putative (HIN1)
MYAEYKGVPITVPTRLPVAYQGHRDQSVWSPYLRSMDSVVLPPQLAIALAQDETAGYVLVDVKVDGQVRWKVGTWISGHYHLRVNCPALIRVNEGKGSYGATTGGGPDYFRFQQAAACAVDV

SEQ ID NO: 7427 - DNA, 1105 bp, Glycine max
  misc_feature (1)..(1105): Ceres Seq. ID no. 13595851
atcgccgcctcatcgccgccaggagttcgagttccccccgaaccgtcgccatggctgccgcaccagtcatctccccgaaagaaaatctgcccccttcgctgacctccacctccgagccccctccactcttcgacggcaccaccaggttgtatgttgcatatcactgcccatatgcgcagcgcgcttggattgccaggaactacaagggtttgcaagacaagatcaagatagtcgggatcgatctcgcagacaggccggcttggtacaaggagaaggtttacccacagaacaaggtgccttcactggagcataacaacgaggtgaaaggagaaagcttggatttggtcaagtacattgacagcaatttcgatggcccagcattgctccccgatgattctgcaaagaagcagtttgccgaggagctgcttgtgtacatcgatgagttcaataaagcactatactcatccataacctccaagggagatgtggcagaggaaactgttgctgcgctggataaaatagaagcggccctgggaaagttcagtgatggccctttcttccttggccagttcagtttggtggacattgcatatgtgccatttatcgaaaggtttcagatattcttttctggtatcaaaaactatgatatcaccaaggacagacctaatattcagaaattcatcgaggaagtgaacaagatcgatgcgtacacgcaaacgaaactggacccacaatttctacttgaacacacaaagaagcggcttgggattgagtgaagatgtgaccaaggatgaccaagagaccagggaactactgcagcatggaagatgaagaggaagacactcaggagtgtgcttgcttgctactactactagatcatgaaaggcacgcgttgctgcgcccgtcttatggtaataataaattttaggcttgacacaattgtgcggaagcattgtatgtaaactttagatcttctagtattataaataattttgtgtaatttcatttttacctggaatttaaagcaatgtagtagtattaggcttatgccgttgtcattacaatacaacgattgttcaaagaccttggtgaacaacaacggttc

SEQ ID NO: 7428 - protein, 257 aa, Glycine max
  peptide (1)..(257): Ceres Seq. ID no. 13595852
  misc_feature (16)..(256): NCBI GI NO: 24796806 NR Description: putative glutathione S-transferase
  misc_feature (15)..(256): NCBI GI NO: 7939638 NR Description: XIG [Oryza sativa]
  misc_feature (15)..(254): NCBI GI NO: 24796810 NR Description: putative glutathione S-transferase
  misc_feature (15)..(256): NCBI GI NO: 1352460 NR Description: IN2-1 PROTEIN
  misc_feature (15)..(256): NCBI GI NO: 7489703 NR Description: safener-induced In2.1-like protein - wheat
  misc_feature (29)..(253): NCBI GI NO: 11385579 NR Description: In2-1 protein [Glycine max]
  misc_feature (20)..(253): NCBI GI NO: 15241956 NR Description: In2-1 protein, putative [Arabidopsis thaliana]
  misc_feature (20)..(253): NCBI GI NO: 21537338 NR Description: In2-1 protein [Arabidopsis thaliana]
  misc_feature (17)..(252): NCBI GI NO: 11357919 NR Description: hypothetical protein F9G14
  misc_feature (17)..(252): NCBI GI NO: 30679765 NR Description: In2-1 protein, putative [Arabidopsis thaliana]
RRLIAARSSSSPRTVAMAAAPVISPKENLPPSLTSTSEPPPLFDGTTRLYVAYHCPYAQRAWIARNYKGLQDKIKIVGIDLADRPAWYKEKVYPQNKVPSLEHNNEVKGESLDLVKYIDSNFDGPALLPDDSAKKQFAEELLVYIDEFNKALYSSITSKGDVAEETVAALDKIEAALGKFSDGPFFLGQFSLVDIAYVPFIERFQIFFSGIKNYDITKDRPNIQKFIEEVNKIDAYTQTKLDPQFLLEHTKKRLGIE

SEQ ID NO: 7429 - protein, 241 aa, Glycine max
  peptide (1)..(241): Ceres Seq. ID no. 13595853
  misc_feature (1)..(240): NCBI GI NO: 24796806 NR Description: putative glutathione S-transferase
  misc_feature (1)..(240): NCBI GI NO: 7939638 NR Description: XIG [Oryza sativa]
  misc_feature (1)..(238): NCBI GI NO: 24796810 NR Description: putative glutathione S-transferase
  misc_feature (1)..(240): NCBI GI NO: 1352460 NR Description: IN2-1 PROTEIN
  misc_feature (1)..(240): NCBI GI NO: 7489703 NR Description: safener-induced In2.1-like protein - wheat
  misc_feature (13)..(237): NCBI GI NO: 11385579 NR Description: In2-1 protein [Glycine max]
  misc_feature (4)..(237): NCBI GI NO: 15241956 NR Description: In2-1 protein, putative [Arabidopsis thaliana]
  misc_feature (4)..(237): NCBI GI NO: 21537338 NR Description: In2-1 protein [Arabidopsis thaliana]
  misc_feature (1)..(236): NCBI GI NO: 11357919 NR Description: hypothetical protein F9G14
  misc_feature (1)..(236): NCBI GI NO: 30679765 NR Description: In2-1 protein, putative [Arabidopsis thaliana]
MAAAPVISPKENLPPSLTSTSEPPPLFDGTTRLYVAYHCPYAQRAWIARNYKGLQDKIKIVGIDLADRPAWYKEKVYPQNKVPSLEHNNEVKGESLDLVKYIDSNFDGPALLPDDSAKKQFAEELLVYIDEFNKALYSSITSKGDVAEETVAALDKIEAALGKFSDGPFFLGQFSLVDIAYVPFIERFQIFFSGIKNYDITKDRPNIQKFIEEVNKIDAYTQTKLDPQFLLEHTKKRLGIE

SEQ ID NO: 7430 - DNA, 1808 bp, Glycine max
  misc_feature (1)..(1808): Ceres Seq. ID no. 13595437
aaaaaccctagattttcaaatctagggttttgttttcttaacttgttacggttatggttatggttctggttcaggaactgaactcccacccttgctaatttcacttttctcttctcaatcttagcctctggtttttctacattttccctccctcgctaacctctgccatgggattttcaatgctgattttgtttcacctctaaagccactccctctcttattttcttcaaccttttggcattcgcaactcatcttctttgtggtgtttctaggtaaacgagacccttgtacgtgcattcacttgacaaaatctccgagcttgttacttgaatatctggagctagcttctgggctttagatcctcttctttcttctttgcattagggttaaagatctattttttccatcattgtgaaagctatttgcttttgactagtagaagggtacctagctaaacccctgtttttacatcttcactagtttcatagtttaagaagttagtagcaccagtgaaagggtttgaagttgaggaggaaaaattatcacaattgacaaacctgttagtaaatgcatggatgggagagaaggcatggcatttcctggtggctctgctccatattacatgcagcatagaggaggaggggttggtgggtctgttccaggaaccgggacacagagtggagggtttcaaccaccctctggctttagagctttgtcaaatgtctctccaggttctgcatttaaagtagagtctcagcctcaacatgctagttttagtcatggcattaacacaggttcctctcctgatggtggaagtggagtgccttcttctggtgagcctgtgaagaagaaaagagggaggcctaggaagtatggccctgatggatctgtttccttgatgctctctcccatgtctgccactgctaattccaccccgggatcgggcacttcttcggagaaacgacccagggggcgcccacctggaagtggaaggaagcaacagcttgccactctaggtgaatggatgaacaattctgcaggactggccttttcacctcatgttatcaccgttggagttggggaggacattgtagcaaagttattgtcatttgcaaggcagagaccaagggctgtgtgcatcttaacaggaactgggacaatttcttcagtcactctgcgccaacccgcttctactagcatcagtgttacatatgagggccgatttcaaatattatgcttgtctggttcttacttggttgctgaagaaggtggacctcacaatagramcgggtggcatgagtgtttccctttctagtcctgatggtcatatcattggtggtggtgttactaggcttgttgctgcaagcccagtgcaggtggtagcatgcagtttcgtatatgggggctccaagccaaagactaaagaagtgaccactaccactactvctacaaaagatagcagttcagagcctcagagtagtgataagttagcgtctccagccagtgctcctccacctaatcaaaactacacctcttcttctccgttcccaggcatttggcctgcatcgtcaaggccagtagaggttaaaagtgcacatccacatactggtattgacttgacgcgtgggtgaagaccatttattattctataagagactttgtagttttgtatagagatctcttgtaaatgaaccgaatttgtgagcattgtgactcttcctatctatcactgttgatgggtgacaagttcgcgctaacctatgctgtaaccaatggatttcagggttaagtaacagtcttgactttgc

SEQ ID NO: 7431 - protein, 247 aa, Glycine max
  peptide (1)..(247): Ceres Seq. ID no. 15221577
  misc_feature (1)..(240): NCBI GI NO: 7488825 NR Description: probable DNA-binding protein - garden pea
  misc_feature (1)..(240): NCBI GI NO: 2213534 NR Description: DNA-binding PD1-like protein [Pisum sativum]
  misc_feature (52)..(240): NCBI GI NO: 30696854 NR Description: DNA-binding protein -related
  misc_feature (1)..(240): NCBI GI NO: 6633838 NR Description: F2K11.15 [Arabidopsis thaliana]
  misc_feature (52)..(240): NCBI GI NO: 6633838 NR Description: F2K11.15 [Arabidopsis thaliana]
  misc_feature (1)..(240): NCBI GI NO: 22330402 NR Description: DNA-binding protein -related
  misc_feature (7)..(240): NCBI GI NO: 17979309 NR Description: putative DNA-binding protein
  misc_feature (1)..(240): NCBI GI NO: 30695388 NR Description: DNA-binding protein -related
  misc_feature (12)..(240): NCBI GI NO: 11281387 NR Description: probable DNA-binding protein - Arabidopsis thaliana
  misc_feature (48)..(240): NCBI GI NO: 14326504 NR Description: At2g33620/F4P9.39 [Arabidopsis thaliana]
  misc_feature (238)..(238): Xaa is any aa, unknown or other
  misc_feature (239)..(239): Xaa is any aa, unknown or other
MDGREGMAFPGGSAPYYMQHRGGGVGGSVPGTGTQSGGFQPPSGFRALSNVSPGSAFKVESQPQHASFSHGINTGSSPDGGSGVPSSGEPVKKKRGRPRKYGPDGSVSLMLSPMSATANSTPGSGTSSEKRPRGRPPGSGRKQQLATLGEWMNNSAGLAFSPHVITVGVGEDIVAKLLSFARQRPRAVCILTGTGTISSVTLRQPASTSISVTYEGRFQILCLSGSYLVAEEGGPHNXXGWHECFPF

SEQ ID NO: 7432 - protein, 241 aa, Glycine max
  peptide (1)..(241): Ceres Seq. ID no. 15221578
  misc_feature (1)..(234): NCBI GI NO: 7488825 NR Description: probable DNA-binding protein - garden pea
  misc_feature (1)..(234): NCBI GI NO: 2213534 NR Description: DNA-binding PD1-like protein [Pisum sativum]
  misc_feature (46)..(234): NCBI GI NO: 30696854 NR Description: DNA-binding protein -related
  misc_feature (1)..(234): NCBI GI NO: 6633838 NR Description: F2K11.15 [Arabidopsis thaliana]
  misc_feature (46)..(234): NCBI GI NO: 6633838 NR Description: F2K11.15 [Arabidopsis thaliana]
  misc_feature (1)..(234): NCBI GI NO: 22330402 NR Description: DNA-binding protein -related
  misc_feature (1)..(234): NCBI GI NO: 17979309 NR Description: putative DNA-binding protein
  misc_feature (1)..(234): NCBI GI NO: 30695388 NR Description: DNA-binding protein -related
  misc_feature (6)..(234): NCBI GI NO: 11281387 NR Description: probable DNA-binding protein - Arabidopsis thaliana
  misc_feature (42)..(234): NCBI GI NO: 14326504 NR Description: At2g33620/F4P9.39 [Arabidopsis thaliana]
  misc_feature (232)..(232): Xaa is any aa, unknown or other
  misc_feature (233)..(233): Xaa is any aa, unknown or other
MAFPGGSAPYYMQHRGGGVGGSVPGTGTQSGGFQPPSGFRALSNVSPGSAFKVESQPQHASFSHGINTGSSPDGGSGVPSSGEPVKKKRGRPRKYGPDGSVSLMLSPMSATANSTPGSGTSSEKRPRGRPPGSGRKQQLATLGEWMNNSAGLAFSPHVITVGVGEDIVAKLLSFARQRPRAVCILTGTGTISSVTLRQPASTSISVTYEGRFQILCLSGSYLVAEEGGPHNXXGWHECFPF

SEQ ID NO: 7433 - protein, 230 aa, Glycine max
  peptide (1)..(230): Ceres Seq. ID no. 15221579
  misc_feature (1)..(223): NCBI GI NO: 7488825 NR Description: probable DNA-binding protein - garden pea
  misc_feature (1)..(223): NCBI GI NO: 2213534 NR Description: DNA-binding PD1-like protein [Pisum sativum]
  misc_feature (35)..(223): NCBI GI NO: 30696854 NR Description: DNA-binding protein -related
  misc_feature (1)..(223): NCBI GI NO: 6633838 NR Description: F2K11.15 [Arabidopsis thaliana]
  misc_feature (35)..(223): NCBI GI NO: 6633838 NR Description: F2K11.15 [Arabidopsis thaliana]
  misc_feature (1)..(223): NCBI GI NO: 22330402 NR Description: DNA-binding protein -related
  misc_feature (1)..(223): NCBI GI NO: 17979309 NR Description: putative DNA-binding protein
  misc_feature (1)..(223): NCBI GI NO: 30695388 NR Description: DNA-binding protein -related
  misc_feature (1)..(223): NCBI GI NO: 11281387 NR Description: probable DNA-binding protein - Arabidopsis thaliana
  misc_feature (31)..(223): NCBI GI NO: 14326504 NR Description: At2g33620/F4P9.39 [Arabidopsis thaliana]
  misc_feature (221)..(221): Xaa is any aa, unknown or other
  misc_feature (222)..(222): Xaa is any aa, unknown or other
MQHRGGGVGGSVPGTGTQSGGFQPPSGFRALSNVSPGSAFKVESQPQHASFSHGINTGSSPDGGSGVPSSGEPVKKKRGRPRKYGPDGSVSLMLSPMSATANSTPGSGTSSEKRPRGRPPGSGRKQQLATLGEWMNNSAGLAFSPHVITVGVGEDIVAKLLSFARQRPRAVCILTGTGTISSVTLRQPASTSISVTYEGRFQILCLSGSYLVAEEGGPHNXXGWHECFPF

SEQ ID NO: 7434 - DNA, 755 bp, Glycine max
  misc_feature (1)..(755): Ceres Seq. ID no. 12610554
aagttctatagtgttcaaaaagtgtaacaatggctcctagttccacattgcaattcccaattctcttgggtcttctcttaatttcatttctgggtgttgaaggggtacttcccccatcatgcaatcgctatgagtgccccaactataatgtcaaatatgtaggcaaaaactttgaaatccgtcgttataattcacctgtgtggatttcaaatctggctgttcaagacccttctttggttggagctacaagatctggcttcaaaagactatttagttatatttatggtaacaacaactataagaaggaaatgaacatgacaacgcctgtgatcagtgaagtatcaattaatggtggaaattcctcaattgttgtgagcttctatgtgccgaaagtgaaccaagcagacccacctttggcaaatggtctctatgttcagagatggaaaactatagatgtagcagtaagacaatttggtggatttgtcaaagattctaatattgggttgcaagtgtcggccttgaacgatagtcttaccggcactacatggtccgctattgttaagaataagtacattgtggcacagtacaattccccttttgaattgtacaatagagtgaatgagatatggtttttttatgaatgataatgatatgcaagtggaatatgctagacaagattgactcatcttgttatcaacttaaatcagtgaattatatcatatataaatgaacaaattgttgcaataaaaaaaaaa

SEQ ID NO: 7435 - protein, 204 aa, Glycine max
  peptide (1)..(204): Ceres Seq. ID no. 12610555
  misc_feature (33)..(204): Pfam Name: Pfam Description:  SOUL heme-binding protein
  misc_feature (25)..(204): NCBI GI NO: 15220033 NR Description: SOUL-like protein; protein id: At1g17100
  misc_feature (13)..(204): NCBI GI NO: 34903864 NR Description: unnamed protein product
  misc_feature (27)..(204): NCBI GI NO: 18411970 NR Description: expressed protein; protein id: At1g78450
  misc_feature (27)..(204): NCBI GI NO: 21593898 NR Description: SOUL-like protein [Arabidopsis thaliana]
  misc_feature (25)..(199): NCBI GI NO: 15218357 NR Description: hypothetical protein; protein id: At1g78460.1
  misc_feature (13)..(201): NCBI GI NO: 34904402 NR Description: unnamed protein product
  misc_feature (37)..(200): NCBI GI NO: 28278449 NR Description: Similar to heme binding protein 2 [Danio rerio]
  misc_feature (47)..(200): NCBI GI NO: 7657603 NR Description: heme binding protein 2
  misc_feature (47)..(200): NCBI GI NO: 15778345 NR Description: C6ORF34B [Homo sapiens]
  misc_feature (94)..(199): NCBI GI NO: 16323115 NR Description: At1g78460/F3F9_3 [Arabidopsis thaliana]
MAPSSTLQFPILLGLLLISFLGVEGVLPPSCNRYECPNYNVKYVGKNFEIRRYNSPVWISNLAVQDPSLVGATRSGFKRLFSYIYGNNNYKKEMNMTTPVISEVSINGGNSSIVVSFYVPKVNQADPPLANGLYVQRWKTIDVAVRQFGGFVKDSNIGLQVSALNDSLTGTTWSAIVKNKYIVAQYNSPFELYNRVNEIWFFYE

SEQ ID NO: 7436 - protein, 111 aa, Glycine max
  peptide (1)..(111): Ceres Seq. ID no. 12610556
  misc_feature (1)..(111): Pfam Name: Pfam Description:  SOUL heme-binding protein
  misc_feature (1)..(111): NCBI GI NO: 15220033 NR Description: SOUL-like protein; protein id: At1g17100
  misc_feature (1)..(111): NCBI GI NO: 34903864 NR Description: unnamed protein product
  misc_feature (1)..(111): NCBI GI NO: 18411970 NR Description: expressed protein; protein id: At1g78450
  misc_feature (1)..(111): NCBI GI NO: 21593898 NR Description: SOUL-like protein [Arabidopsis thaliana]
  misc_feature (1)..(106): NCBI GI NO: 15218357 NR Description: hypothetical protein; protein id: At1g78460.1
  misc_feature (1)..(108): NCBI GI NO: 34904402 NR Description: unnamed protein product
  misc_feature (1)..(107): NCBI GI NO: 28278449 NR Description: Similar to heme binding protein 2 [Danio rerio]
  misc_feature (1)..(107): NCBI GI NO: 7657603 NR Description: heme binding protein 2
  misc_feature (1)..(107): NCBI GI NO: 15778345 NR Description: C6ORF34B [Homo sapiens]
  misc_feature (1)..(106): NCBI GI NO: 16323115 NR Description: At1g78460/F3F9_3 [Arabidopsis thaliana]
MNMTTPVISEVSINGGNSSIVVSFYVPKVNQADPPLANGLYVQRWKTIDVAVRQFGGFVKDSNIGLQVSALNDSLTGTTWSAIVKNKYIVAQYNSPFELYNRVNEIWFFYE

SEQ ID NO: 7437 - protein, 109 aa, Glycine max
  peptide (1)..(109): Ceres Seq. ID no. 12610557
  misc_feature (1)..(109): Pfam Name: Pfam Description:  SOUL heme-binding protein
  misc_feature (1)..(109): NCBI GI NO: 15220033 NR Description: SOUL-like protein; protein id: At1g17100
  misc_feature (1)..(109): NCBI GI NO: 34903864 NR Description: unnamed protein product
  misc_feature (1)..(109): NCBI GI NO: 18411970 NR Description: expressed protein; protein id: At1g78450
  misc_feature (1)..(109): NCBI GI NO: 21593898 NR Description: SOUL-like protein [Arabidopsis thaliana]
  misc_feature (1)..(104): NCBI GI NO: 15218357 NR Description: hypothetical protein; protein id: At1g78460.1
  misc_feature (1)..(106): NCBI GI NO: 34904402 NR Description: unnamed protein product
  misc_feature (1)..(105): NCBI GI NO: 28278449 NR Description: Similar to heme binding protein 2 [Danio rerio]
  misc_feature (1)..(105): NCBI GI NO: 7657603 NR Description: heme binding protein 2
  misc_feature (1)..(105): NCBI GI NO: 15778345 NR Description: C6ORF34B [Homo sapiens]
  misc_feature (1)..(104): NCBI GI NO: 16323115 NR Description: At1g78460/F3F9_3 [Arabidopsis thaliana]
MTTPVISEVSINGGNSSIVVSFYVPKVNQADPPLANGLYVQRWKTIDVAVRQFGGFVKDSNIGLQVSALNDSLTGTTWSAIVKNKYIVAQYNSPFELYNRVNEIWFFYE

SEQ ID NO: 7438 - DNA, 628 bp, Glycine max
  misc_feature (1)..(628): Ceres Seq. ID no. 13595146
atcttctctcgtctccactgatcccaccaaccacacttacttctctcaatggcgacgatgtacgttcctccggcgacgctttacgccggcaaaccgactccagtgacttcaaacctccagagatcgtctttcttgccgtattactcgttgaggatactcggcgacaagaagaagaagtctctttccaagtcttcatcatcctcctctgctccaagattctccatgcgtgtctcctccaagcaagcttatatctgccgtgattgcgggtatatatacaatgacagaactccattcgataagttgcctgataattacttctgtccagtgtgtgctgctcctaaacggcggttcagaccgtacatgcctgatgtgagcaagaacgtcaacgacaaggatgtgagaaaggctagaaaagctgagctccaacgtgacgaagccgttgggaaggctttgcctatagcaattgctgttggggttctagctttagcagctctttacttctatgtcaacagtaccgcatgaactgctgcatcaagaggctagctacattcttgtttcgttttgtattaacatgtcttctctgagttgttgttagacattataaatgaagtaaaatgttgagatttct

SEQ ID NO: 7439 - protein, 157 aa, Glycine max
  peptide (1)..(157): Ceres Seq. ID no. 13595147
  misc_feature (64)..(101): Pfam Name: Pfam Description:  Rubredoxin
  misc_feature (4)..(157): NCBI GI NO: 18423226 NR Description: expressed protein [Arabidopsis thaliana]
  misc_feature (45)..(112): NCBI GI NO: 18418200 NR Description: expressed protein [Arabidopsis thaliana]
  misc_feature (55)..(112): NCBI GI NO: 34905300 NR Description: P0577B11.21
MATMYVPPATLYAGKPTPVTSNLQRSSFLPYYSLRILGDKKKKSLSKSSSSSSAPRFSMRVSSKQAYICRDCGYIYNDRTPFDKLPDNYFCPVCAAPKRRFRPYMPDVSKNVNDKDVRKARKAELQRDEAVGKALPIAIAVGVLALAALYFYVNSTA

SEQ ID NO: 7440 - protein, 154 aa, Glycine max
  peptide (1)..(154): Ceres Seq. ID no. 13595148
  misc_feature (61)..(98): Pfam Name: Pfam Description:  Rubredoxin
  misc_feature (1)..(154): NCBI GI NO: 18423226 NR Description: expressed protein [Arabidopsis thaliana]
  misc_feature (42)..(109): NCBI GI NO: 18418200 NR Description: expressed protein [Arabidopsis thaliana]
  misc_feature (52)..(109): NCBI GI NO: 34905300 NR Description: P0577B11.21
MYVPPATLYAGKPTPVTSNLQRSSFLPYYSLRILGDKKKKSLSKSSSSSSAPRFSMRVSSKQAYICRDCGYIYNDRTPFDKLPDNYFCPVCAAPKRRFRPYMPDVSKNVNDKDVRKARKAELQRDEAVGKALPIAIAVGVLALAALYFYVNSTA

SEQ ID NO: 7441 - protein, 99 aa, Glycine max
  peptide (1)..(99): Ceres Seq. ID no. 13595149
  misc_feature (6)..(43): Pfam Name: Pfam Description:  Rubredoxin
  misc_feature (1)..(99): NCBI GI NO: 18423226 NR Description: expressed protein [Arabidopsis thaliana]
  misc_feature (1)..(54): NCBI GI NO: 18418200 NR Description: expressed protein [Arabidopsis thaliana]
  misc_feature (1)..(54): NCBI GI NO: 34905300 NR Description: P0577B11.21
MRVSSKQAYICRDCGYIYNDRTPFDKLPDNYFCPVCAAPKRRFRPYMPDVSKNVNDKDVRKARKAELQRDEAVGKALPIAIAVGVLALAALYFYVNSTA

SEQ ID NO: 7442 - DNA, 727 bp, Glycine max
  misc_feature (1)..(727): Ceres Seq. ID no. 13582362
tacctagaacatcctaatcgaaaacaaaagcactcaaaatgatcgctctggtctttttggctctcttctcggtagcagctgcatacccgtacaaacacgacatcggttcgagtacgaaggcaaattgggccacaacctcccataccagaaggaattctacggcaaggaatacacccagggcaagggatacccattcggtgaatacttccacaaacaaggttacggatacccacagtaccagggacaatactacggttacccaggatactactcccactggtccacaccatactacggccgccagactggtttcgcccgttacggatacggccagaaccgcattggatacggatatgaatacccacaaggaagctacggctacaaaccattctacggtgaatacggactccacaacttcccatactacggaatcaagaactacgaatacggatcctacggcccatacggatacggtttgggatacaatcctttctaccgctactacggcagctactacccaaaatcctaccttggcgaatacaaatactgaactgatgtttgataattgacaattgaaaattttgccagcttgttcaatagtaactttgtcgaattgacaccaacaatagcgtacctgtaaacagtgcaaacaattagaaacctacaccaaacaattgtaccaatcaaatttcatggattttctctgaaataaaaaatgacttctgat

SEQ ID NO: 7443 - protein, 176 aa, Glycine max
  peptide (1)..(176): Ceres Seq. ID no. 13582363
  misc_feature (24)..(170): Pfam Name: Pfam Description:  Equine herpesvirus glycoprotein gp2
  misc_feature (24)..(170): NCBI GI NO: 39583863 NR Description: Hypothetical protein CBG08535
  misc_feature (17)..(168): NCBI GI NO: 7494135 NR Description: mucin-like glycoprotein 900
  misc_feature (24)..(170): NCBI GI NO: 6322611 NR Description: Delayed Anaerobic Gene; Dan4p
  misc_feature (24)..(170): NCBI GI NO: 7494135 NR Description: mucin-like glycoprotein 900
  misc_feature (19)..(170): NCBI GI NO: 7494135 NR Description: mucin-like glycoprotein 900
  misc_feature (24)..(170): NCBI GI NO: 7494135 NR Description: mucin-like glycoprotein 900
  misc_feature (33)..(170): NCBI GI NO: 24641644 NR Description: CG32644-PB [Drosophila melanogaster]
  misc_feature (24)..(170): NCBI GI NO: 6322611 NR Description: Delayed Anaerobic Gene; Dan4p
  misc_feature (24)..(170): NCBI GI NO: 7494135 NR Description: mucin-like glycoprotein 900
  misc_feature (24)..(170): NCBI GI NO: 32264364 NR Description: MBCTL1 [Monosiga brevicollis]
MIALVFLALFSVAAAYPYKHDIGSSTKANWATTSHTRRNSTARNTPRARDTHSVNTSTNKVTDTHSTRDNTTVTQDTTPTGPHHTTAARLVSPVTDTARTALDTDMNTHKEATATNHSTVNTDSTTSHTTESRTTNTDPTAHTDTVWDTILSTATTAATTQNPTLANTNTELMFDN

SEQ ID NO: 7444 - DNA, 778 bp, Glycine max
  misc_feature (1)..(778): Ceres Seq. ID no. 12611396
cccctcgtcgctgcgtctctctcccgcaaccttatagattcgtttttattcccatcgatcggagagagagagaataattcaataagcgaccatgttggtgtacactgatcttctcaccggtgatgagcttctctctgactctttcccttacaaggagattgagaatggtattctttgggaagttgaaggaaagtggactacccagggatgtgtagaggttaacattggtgccaacccctctgctgaagaaggtggtgaggacgagggtgttgacgactctgttcaaaaggttgttgacattgtcgacaccttcaggctccaggagcaaccgacctacgacaagaaggggttcatcgcctatatcaaaaagtacatcaagcttttgacccccaagctcaacgccgaagatcaagaagctttcaagaagggtattgagggagctaccaagtacttgctccctaagctcaaggacttccaattctttgttggggagagcatgcacgatgacagcactgtggtctttgcttactacaaggagggtgctactaacccaacatttttgtacttcggacatggtttgaaggaggtcaagtgctgattgagagaagctctcgtgtggtcggtcgcagcgactctattaagtctatgtctctttatattgttatgtgtttcttccccaccattttacttttctttctacttctcatctctgttgcaaaattctcaagttattaatccgaaaacaatggtttgttagttgaattttggttcgtccttt

SEQ ID NO: 7445 - protein, 168 aa, Glycine max
  peptide (1)..(168): Ceres Seq. ID no. 12611397
  misc_feature (1)..(165): Pfam Name: Pfam Description:  Translationally controlled tumour protein
  misc_feature (1)..(168): NCBI GI NO: 20140684 NR Description: Translationally controlled tumor protein homolog
  misc_feature (1)..(168): NCBI GI NO: 15228276 NR Description: translationally controlled tumor protein-likeprotein
  misc_feature (1)..(168): NCBI GI NO: 21595816 NR Description: translationally controlled tumor protein-likeprotein
  misc_feature (1)..(168): NCBI GI NO: 549063 NR Description: Translationally controlled tumor protein homolog
  misc_feature (1)..(168): NCBI GI NO: 2507443 NR Description: Translationally controlled tumor protein homolog
  misc_feature (1)..(168): NCBI GI NO: 2507442 NR Description: TRANSLATIONALLY CONTROLLED TUMOR PROTEIN HOMOLOG
  misc_feature (1)..(168): NCBI GI NO: 20140865 NR Description: Translationally controlled tumor protein homolog
  misc_feature (1)..(168): NCBI GI NO: 9979196 NR Description: Translationally controlled tumor protein homolog
  misc_feature (1)..(168): NCBI GI NO: 1174626 NR Description: TRANSLATIONALLY CONTROLLED TUMOR PROTEIN HOMOLOG
  misc_feature (1)..(168): NCBI GI NO: 20140683 NR Description: Translationally controlled tumor protein homolog
MLVYTDLLTGDELLSDSFPYKEIENGILWEVEGKWTTQGCVEVNIGANPSAEEGGEDEGVDDSVQKVVDIVDTFRLQEQPTYDKKGFIAYIKKYIKLLTPKLNAEDQEAFKKGIEGATKYLLPKLKDFQFFVGESMHDDSTVVFAYYKEGATNPTFLYFGHGLKEVKC

SEQ ID NO: 7446 - DNA, 1378 bp, Glycine max
  misc_feature (1)..(1378): Ceres Seq. ID no. 15224803
accaccaccacaccacggccagccatctcacaacataagctagccagcatacacgagtccagactacctagctagcgttgccaaggttccaatcatcaatggcgagagcgatcgtgcatgcggccgtcatggccgcggccgcactgttcgtgctgctggccgctgcgccggcgccggcgagcgccattgacttcggcgaccacgacctggcgtcggaggactccctgtgggcgctgtacgagcgctggagggagcagcacacggtggcgcgagacctcggcgagaaagcccgccgcttcaacgtcttcagggagaacgtccgcctcatccacgagttcaaccgcggcgacgccccctacaagctccgcctcaaccgcttcggcgacatgaccgcggacgagttccgccgcgcctacgcctcctcccgcgtctctcaccaccgcatgttcagccgtaaggagggcgatggcggcttcatgcacgggagcgctcgggacgtgccgccttcggtggactggcggcagaagggcgcggtgaccgccgtcaaggaccaggggcagtgcggcagctgctgggctttctccacgatcgcggccgtggagggcgtcaacgcgatccgcaccaagaacctcacgtctctgtccgagcagcagctcgtggactgcgacaccaagtccaacgccggctgcaacggcggcctcatggactacgccttccagtacatcgccaagcacggcggggtcgccgccgaggacgcgtacccctacaaggcccggcaggcctcctcctgcaacaagaagccgtccgccgtggtcaccatcgacgggtacgaggacgtgccggccaacgacgagacggcgctgaagaaggcggtggccgcgcagccggtggccgtggccatcgaggctagcgggtcgcacttccagttctactcggagggggtgtttgcgggcaagtgcgggacggagctggaccatggcgtgacggcggtggggtacggcgccaccgtggacggcaccaagtactggatcgtgaagaactcgtgggggccggagtggggcgaaaaggggtacatccgcatgaagcgcgatgtgaaagacaaggaggggctctgcggcatcgccatggaggcgtcctaccccgtcaagacctcagccaacccgaagcatgccagtgccaatgacgagctctgaatctctcatcgattgtcttacaaattattggccccaatatgcatgatcagggcattatcgctagggaaaaaaataagtagtcaatcgttatgcacccatcacatatagtgcactactacttaattgtttgtactagtaaaacgcccatgcgttgccacgggcttttgaaaaaaatttaagatgcc

SEQ ID NO: 7447 - protein, 364 aa, Glycine max
  peptide (1)..(364): Ceres Seq. ID no. 15224804
  misc_feature (134)..(349): Pfam Name: Pfam Description:  Papain family cysteine protease
  misc_feature (27)..(364): NCBI GI NO: 1169186 NR Description: Thiol protease SEN102 precursor
  misc_feature (15)..(364): NCBI GI NO: 40806500 NR Description: putative cysteine protease 2 [Iris hollandica]
  misc_feature (18)..(364): NCBI GI NO: 537437 NR Description: cysteine proteinase [Hemerocallis hybrid cultivar]
  misc_feature (14)..(364): NCBI GI NO: 7435797 NR Description: cysteine proteinase (EC 3.4.22.-) - barley
  misc_feature (18)..(364): NCBI GI NO: 1173630 NR Description: cysteine proteinase
  misc_feature (14)..(364): NCBI GI NO: 7435798 NR Description: probable cysteine proteinase (EC 3
  misc_feature (14)..(364): NCBI GI NO: 4100157 NR Description: cysteine proteinase precursor [Hordeum vulgare]
  misc_feature (10)..(364): NCBI GI NO: 18423124 NR Description: cysteine proteinase [Arabidopsis thaliana]
  misc_feature (11)..(364): NCBI GI NO: 629792 NR Description: cysteine proteinase (EC 3.4.22.-) - rice
  misc_feature (17)..(364): NCBI GI NO: 7435817 NR Description: cysteine endopeptidase (EC 3
MARAIVHAAVMAAAALFVLLAAAPAPASAIDFGDHDLASEDSLWALYERWREQHTVARDLGEKARRFNVFRENVRLIHEFNRGDAPYKLRLNRFGDMTADEFRRAYASSRVSHHRMFSRKEGDGGFMHGSARDVPPSVDWRQKGAVTAVKDQGQCGSCWAFSTIAAVEGVNAIRTKNLTSLSEQQLVDCDTKSNAGCNGGLMDYAFQYIAKHGGVAAEDAYPYKARQASSCNKKPSAVVTIDGYEDVPANDETALKKAVAAQPVAVAIEASGSHFQFYSEGVFAGKCGTELDHGVTAVGYGATVDGTKYWIVKNSWGPEWGEKGYIRMKRDVKDKEGLCGIAMEASYPVKTSANPKHASANDEL

SEQ ID NO: 7448 - protein, 354 aa, Glycine max
  peptide (1)..(354): Ceres Seq. ID no. 15224805
  misc_feature (124)..(339): Pfam Name: Pfam Description:  Papain family cysteine protease
  misc_feature (17)..(354): NCBI GI NO: 1169186 NR Description: Thiol protease SEN102 precursor
  misc_feature (5)..(354): NCBI GI NO: 40806500 NR Description: putative cysteine protease 2 [Iris hollandica]
  misc_feature (8)..(354): NCBI GI NO: 537437 NR Description: cysteine proteinase [Hemerocallis hybrid cultivar]
  misc_feature (4)..(354): NCBI GI NO: 7435797 NR Description: cysteine proteinase (EC 3.4.22.-) - barley
  misc_feature (8)..(354): NCBI GI NO: 1173630 NR Description: cysteine proteinase
  misc_feature (4)..(354): NCBI GI NO: 7435798 NR Description: probable cysteine proteinase (EC 3
  misc_feature (4)..(354): NCBI GI NO: 4100157 NR Description: cysteine proteinase precursor [Hordeum vulgare]
  misc_feature (1)..(354): NCBI GI NO: 18423124 NR Description: cysteine proteinase [Arabidopsis thaliana]
  misc_feature (1)..(354): NCBI GI NO: 629792 NR Description: cysteine proteinase (EC 3.4.22.-) - rice
  misc_feature (7)..(354): NCBI GI NO: 7435817 NR Description: cysteine endopeptidase (EC 3
MAAAALFVLLAAAPAPASAIDFGDHDLASEDSLWALYERWREQHTVARDLGEKARRFNVFRENVRLIHEFNRGDAPYKLRLNRFGDMTADEFRRAYASSRVSHHRMFSRKEGDGGFMHGSARDVPPSVDWRQKGAVTAVKDQGQCGSCWAFSTIAAVEGVNAIRTKNLTSLSEQQLVDCDTKSNAGCNGGLMDYAFQYIAKHGGVAAEDAYPYKARQASSCNKKPSAVVTIDGYEDVPANDETALKKAVAAQPVAVAIEASGSHFQFYSEGVFAGKCGTELDHGVTAVGYGATVDGTKYWIVKNSWGPEWGEKGYIRMKRDVKDKEGLCGIAMEASYPVKTSANPKHASANDEL

SEQ ID NO: 7449 - protein, 268 aa, Glycine max
  peptide (1)..(268): Ceres Seq. ID no. 15224806
  misc_feature (38)..(253): Pfam Name: Pfam Description:  Papain family cysteine protease
  misc_feature (1)..(268): NCBI GI NO: 1169186 NR Description: Thiol protease SEN102 precursor
  misc_feature (1)..(268): NCBI GI NO: 40806500 NR Description: putative cysteine protease 2 [Iris hollandica]
  misc_feature (1)..(268): NCBI GI NO: 537437 NR Description: cysteine proteinase [Hemerocallis hybrid cultivar]
  misc_feature (1)..(268): NCBI GI NO: 7435797 NR Description: cysteine proteinase (EC 3.4.22.-) - barley
  misc_feature (1)..(268): NCBI GI NO: 1173630 NR Description: cysteine proteinase
  misc_feature (1)..(268): NCBI GI NO: 7435798 NR Description: probable cysteine proteinase (EC 3
  misc_feature (1)..(268): NCBI GI NO: 4100157 NR Description: cysteine proteinase precursor [Hordeum vulgare]
  misc_feature (1)..(268): NCBI GI NO: 18423124 NR Description: cysteine proteinase [Arabidopsis thaliana]
  misc_feature (1)..(268): NCBI GI NO: 629792 NR Description: cysteine proteinase (EC 3.4.22.-) - rice
  misc_feature (1)..(268): NCBI GI NO: 7435817 NR Description: cysteine endopeptidase (EC 3
MTADEFRRAYASSRVSHHRMFSRKEGDGGFMHGSARDVPPSVDWRQKGAVTAVKDQGQCGSCWAFSTIAAVEGVNAIRTKNLTSLSEQQLVDCDTKSNAGCNGGLMDYAFQYIAKHGGVAAEDAYPYKARQASSCNKKPSAVVTIDGYEDVPANDETALKKAVAAQPVAVAIEASGSHFQFYSEGVFAGKCGTELDHGVTAVGYGATVDGTKYWIVKNSWGPEWGEKGYIRMKRDVKDKEGLCGIAMEASYPVKTSANPKHASANDEL

SEQ ID NO: 7450 - DNA, 1318 bp, Glycine max
  misc_feature (1)..(1318): Ceres Seq. ID no. 13639246
atccgtcaaactcccaagaaacccttcagaaccttcctcactctttctctcttcctttttttttctttttttttctataaacctaacctaaccaaaaaacccttttcattattcttcattcatttattcttattcatcttttcattcactcactctcactcatggctgaagatgggaacaacaacgatgtacccttacacaaattcaaagacagcaatccaaaccctgaagagttcgatgcaaagggttacagcctcagcggaaaaatcatgctttcagcaataatccttcttttcttcgtcgtcgttttgatgttgtgccttcatatctacgcgcgctggtacctccggcgtgctcgccgccgccagctccggcgccaacgcgagctccgccgcacccagcttgtcttttacaacgacgacgccacccccgcagccgtgtcacgtggcctcgacgccgccatccttgccacgctccccgtcttcaccttcgacccggaaaaaaccgggccggagtgcgctgtttgcttgtcggagttcgaacccggtgaaacgggtcgggtcttgcccaaatgtaatcacagtttccacatagaatgtattgacatgtggttccattctcatgacacgtgtcctctttgtcgcgccccggttgaacgcgcgccggaaccggaagttgttgttataacagtacccgatccggtttccgaaaccggttcaggcgaaaatgagaaccgaaccggttcttcttcttcttcctcttcggttggattgagtaagcctaagccttcgttggttggtgtgacaattgaggtgcctccgagggacgagaattttcaaaacgagttgcaaccgagttgcgactcatcctcctcgtttcggtcgccgatgagtcgcatgctgtcgtttacgaggatgctcggcagggaaaagaaggggaacgtgtcgccgtcgtcgtgcggcggcggcgattgtagctccgccgcggagcgaggtgagcgagaggagactcagtgagtcggtgactcgggtgctgacgtggcacttgttggaagcggaaaaacttgggttgttggcgcgtggcggtgtgtaatagtgacgtttctggattttaatgtaggcggtgagcggcgcgtgagttaggtggcgcgagatactgacgtagaatggttttgggatgaacataaatgatgtacttattcgttgatatatatattttttctttatttgtttcttatcttcgggttccaaaaatagttaaatagaatacgaaaattgctaattgtaatgcttgcttacatagaaatgaaaccaatttt

SEQ ID NO: 7451 - protein, 284 aa, Glycine max
  peptide (1)..(284): Ceres Seq. ID no. 13639247
  misc_feature (119)..(160): Pfam Name: RING finger Pfam Description: Zinc finger, C3HC4 type
  misc_feature (6)..(263): NCBI GI NO: 15228302 NR Description: RING zinc finger protein -related
  misc_feature (6)..(263): NCBI GI NO: 21593806 NR Description: putative RING zinc finger protein
  misc_feature (6)..(263): NCBI GI NO: 25456278 NR Description: probable zinc finger protein
  misc_feature (30)..(246): NCBI GI NO: 4928401 NR Description: RING-H2 zinc finger protein ATL5
  misc_feature (30)..(246): NCBI GI NO: 15228830 NR Description: RING-H2 zinc finger protein ATL5
  misc_feature (27)..(226): NCBI GI NO: 15226628 NR Description: hypothetical protein [Arabidopsis thaliana]
  misc_feature (31)..(242): NCBI GI NO: 7485154 NR Description: hypothetical protein - Arabidopsis thaliana
  misc_feature (32)..(248): NCBI GI NO: 12003386 NR Description: Avr9/Cf-9 rapidly elicited protein 132
  misc_feature (37)..(242): NCBI GI NO: 18414561 NR Description: expressed protein [Arabidopsis thaliana]
  misc_feature (37)..(242): NCBI GI NO: 21537244 NR Description: unknown [Arabidopsis thaliana]
MAEDGNNNDVPLHKFKDSNPNPEEFDAKGYSLSGKIMLSAIILLFFVVVLMLCLHIYARWYLRRARRRQLRRQRELRRTQLVFYNDDATPAAVSRGLDAAILATLPVFTFDPEKTGPECAVCLSEFEPGETGRVLPKCNHSFHIECIDMWFHSHDTCPLCRAPVERAPEPEVVVITVPDPVSETGSGENENRTGSSSSSSSVGLSKPKPSLVGVTIEVPPRDENFQNELQPSCDSSSSFRSPMSRMLSFTRMLGREKKGNVSPSSCGGGDCSSAAERGEREETQ

SEQ ID NO: 7452 - protein, 248 aa, Glycine max
  peptide (1)..(248): Ceres Seq. ID no. 13639248
  misc_feature (83)..(124): Pfam Name: RING finger Pfam Description: Zinc finger, C3HC4 type
  misc_feature (1)..(227): NCBI GI NO: 15228302 NR Description: RING zinc finger protein -related
  misc_feature (1)..(227): NCBI GI NO: 25456278 NR Description: probable zinc finger protein
  misc_feature (1)..(227): NCBI GI NO: 21593806 NR Description: putative RING zinc finger protein
  misc_feature (1)..(210): NCBI GI NO: 4928401 NR Description: RING-H2 zinc finger protein ATL5
  misc_feature (1)..(210): NCBI GI NO: 15228830 NR Description: RING-H2 zinc finger protein ATL5
  misc_feature (1)..(190): NCBI GI NO: 15226628 NR Description: hypothetical protein [Arabidopsis thaliana]
  misc_feature (1)..(206): NCBI GI NO: 7485154 NR Description: hypothetical protein - Arabidopsis thaliana
  misc_feature (1)..(212): NCBI GI NO: 12003386 NR Description: Avr9/Cf-9 rapidly elicited protein 132
  misc_feature (1)..(206): NCBI GI NO: 18414561 NR Description: expressed protein [Arabidopsis thaliana]
  misc_feature (1)..(206): NCBI GI NO: 21537244 NR Description: unknown [Arabidopsis thaliana]
MLSAIILLFFVVVLMLCLHIYARWYLRRARRRQLRRQRELRRTQLVFYNDDATPAAVSRGLDAAILATLPVFTFDPEKTGPECAVCLSEFEPGETGRVLPKCNHSFHIECIDMWFHSHDTCPLCRAPVERAPEPEVVVITVPDPVSETGSGENENRTGSSSSSSSVGLSKPKPSLVGVTIEVPPRDENFQNELQPSCDSSSSFRSPMSRMLSFTRMLGREKKGNVSPSSCGGGDCSSAAERGEREETQ

SEQ ID NO: 7453 - protein, 234 aa, Glycine max
  peptide (1)..(234): Ceres Seq. ID no. 13639249
  misc_feature (69)..(110): Pfam Name: RING finger Pfam Description: Zinc finger, C3HC4 type
  misc_feature (1)..(213): NCBI GI NO: 15228302 NR Description: RING zinc finger protein -related
  misc_feature (1)..(213): NCBI GI NO: 25456278 NR Description: probable zinc finger protein
  misc_feature (1)..(213): NCBI GI NO: 21593806 NR Description: putative RING zinc finger protein
  misc_feature (1)..(196): NCBI GI NO: 4928401 NR Description: RING-H2 zinc finger protein ATL5
  misc_feature (1)..(196): NCBI GI NO: 15228830 NR Description: RING-H2 zinc finger protein ATL5
  misc_feature (1)..(176): NCBI GI NO: 15226628 NR Description: hypothetical protein [Arabidopsis thaliana]
  misc_feature (1)..(192): NCBI GI NO: 7485154 NR Description: hypothetical protein - Arabidopsis thaliana
  misc_feature (1)..(198): NCBI GI NO: 12003386 NR Description: Avr9/Cf-9 rapidly elicited protein 132
  misc_feature (1)..(192): NCBI GI NO: 18414561 NR Description: expressed protein [Arabidopsis thaliana]
  misc_feature (1)..(192): NCBI GI NO: 21537244 NR Description: unknown [Arabidopsis thaliana]
MLCLHIYARWYLRRARRRQLRRQRELRRTQLVFYNDDATPAAVSRGLDAAILATLPVFTFDPEKTGPECAVCLSEFEPGETGRVLPKCNHSFHIECIDMWFHSHDTCPLCRAPVERAPEPEVVVITVPDPVSETGSGENENRTGSSSSSSSVGLSKPKPSLVGVTIEVPPRDENFQNELQPSCDSSSSFRSPMSRMLSFTRMLGREKKGNVSPSSCGGGDCSSAAERGEREETQ

SEQ ID NO: 7454 - DNA, 1645 bp, Glycine max
  misc_feature (1)..(1645): Ceres Seq. ID no. 13639022
aaaatagaagaaaggattatcagagtcgcattgtcgattcagagaaaaaaaaattgaattcaatctgatagatcctatcacagcaaaaaaaattggattgaataaggtgtttccgatttcaaaaacaatcacacaaatggttaataaaagttaggtttcttaatttctgcttcttattacatcatcttaaatctttggttttggatccatccaataatcatggagagcataataagcaagctccgcaacctagacgcctaccctaaaatcaacgaggatttctacagccgcacgctctccggcggtgtcatcactctcgcttcctccattctcatgctcttgctcttctactccgagctccggttgtatcttcacgctgtcaccgagaccaagcttgtcgtcgacacttccagagccgaaacgctgcgtatcaattttgatgttacgtttcctgcgcttccatgttccatactcagtcttgatgccatggacatcagcggagagcagcgtctagatgttaaacacgatataatcaagaagagattagactctcgtggcaatgtgatagaaacaaggcaagaaggaattggtgctcccaagattgaaaagccattgcagaggcatggaggcaggctcgagcacaatgagacttattgtggttcctgttatggttctgaagtgtcagatgatgattgttgtaattcctgtgaggatgttcgtgaagcataccgtaagaaaggttgggcactttcaaatcctgatttaattgaccagtgcaaaagagaaggattcttacaaagaatcaaggatgaagaaggtgaaggatgcaatgtgtatggtttcttggaagtaaataaggttgcagggaattttcattttgcacctgggaaaagctttcagcaatctggtgtacatgtacatgacctgctggcttttcaaaaggattcttttaatttaagtcaccacatcaacagattaactttcggagagtatttccctggtgttgttaatcctcttgacaacgtgcattggacacaagaaacaccaagtgggatgtaccagtattttattaaggttgtgcctacagtatacactgatgtgagtgggcatactatccagtcaaaccagttctctgttacagaacacttcaggactggagacatgggccgtctgcagtcccttcccggagttttctttttctatgacctctctccaattaaggttacttttacggaagaaaatgtctcattcttacattttcttactaatgtttgtgccatagttggaggtattttcaccgtttctggaatactagattcattcatctatcacggtcaaagggctatcaagaagaagatggaacttggtaaatttaactgatgggtgctatttgagtaatttcgagcgaatggctctccagagacaatctattcaagagaaggtcaactactgattgaaattccccttggggttctgagttcttcggttacaacaaaaggattttgcccttagatcaaggttgaaatgcctagatatcatgtgcaacaaatgctactttgccttgattcatatcttttctgacagctctgatgttgtgaatgttatgtgttttatggaaagtagaggggcttttccttgcagaagc

SEQ ID NO: 7455 - protein, 386 aa, Glycine max
  peptide (1)..(386): Ceres Seq. ID no. 13639023
  misc_feature (1)..(386): NCBI GI NO: 30693281 NR Description: expressed protein [Arabidopsis thaliana]
  misc_feature (1)..(386): NCBI GI NO: 38347102 NR Description: OSJNBa0006M15.17
  misc_feature (1)..(386): NCBI GI NO: 18395087 NR Description: expressed protein [Arabidopsis thaliana]
  misc_feature (149)..(362): NCBI GI NO: 6598578 NR Description: F5J5.4 [Arabidopsis thaliana]
  misc_feature (1)..(153): NCBI GI NO: 6598578 NR Description: F5J5.4 [Arabidopsis thaliana]
  misc_feature (358)..(386): NCBI GI NO: 6598578 NR Description: F5J5.4 [Arabidopsis thaliana]
  misc_feature (1)..(384): NCBI GI NO: 34860248 NR Description: similar to serologically defined breast cancerantigen 84
  misc_feature (1)..(384): NCBI GI NO: 13384938 NR Description: serologically defined breast cancer antigen 84
  misc_feature (1)..(384): NCBI GI NO: 7706278 NR Description: serologically defined breast cancer antigen 84
  misc_feature (5)..(384): NCBI GI NO: 28278376 NR Description: Similar to serologically defined breast cancerantigen 84
MESIISKLRNLDAYPKINEDFYSRTLSGGVITLASSILMLLLFYSELRLYLHAVTETKLVVDTSRAETLRINFDVTFPALPCSILSLDAMDISGEQRLDVKHDIIKKRLDSRGNVIETRQEGIGAPKIEKPLQRHGGRLEHNETYCGSCYGSEVSDDDCCNSCEDVREAYRKKGWALSNPDLIDQCKREGFLQRIKDEEGEGCNVYGFLEVNKVAGNFHFAPGKSFQQSGVHVHDLLAFQKDSFNLSHHINRLTFGEYFPGVVNPLDNVHWTQETPSGMYQYFIKVVPTVYTDVSGHTIQSNQFSVTEHFRTGDMGRLQSLPGVFFFYDLSPIKVTFTEENVSFLHFLTNVCAIVGGIFTVSGILDSFIYHGQRAIKKKMELGKFN

SEQ ID NO: 7456 - protein, 348 aa, Glycine max
  peptide (1)..(348): Ceres Seq. ID no. 13639024
  misc_feature (1)..(348): NCBI GI NO: 30693281 NR Description: expressed protein [Arabidopsis thaliana]
  misc_feature (1)..(348): NCBI GI NO: 38347102 NR Description: OSJNBa0006M15.17
  misc_feature (1)..(348): NCBI GI NO: 18395087 NR Description: expressed protein [Arabidopsis thaliana]
  misc_feature (111)..(324): NCBI GI NO: 6598578 NR Description: F5J5.4 [Arabidopsis thaliana]
  misc_feature (1)..(115): NCBI GI NO: 6598578 NR Description: F5J5.4 [Arabidopsis thaliana]
  misc_feature (320)..(348): NCBI GI NO: 6598578 NR Description: F5J5.4 [Arabidopsis thaliana]
  misc_feature (1)..(346): NCBI GI NO: 34860248 NR Description: similar to serologically defined breast cancerantigen 84
  misc_feature (1)..(346): NCBI GI NO: 13384938 NR Description: serologically defined breast cancer antigen 84
  misc_feature (1)..(346): NCBI GI NO: 7706278 NR Description: serologically defined breast cancer antigen 84
  misc_feature (1)..(346): NCBI GI NO: 28278376 NR Description: Similar to serologically defined breast cancerantigen 84
MLLLFYSELRLYLHAVTETKLVVDTSRAETLRINFDVTFPALPCSILSLDAMDISGEQRLDVKHDIIKKRLDSRGNVIETRQEGIGAPKIEKPLQRHGGRLEHNETYCGSCYGSEVSDDDCCNSCEDVREAYRKKGWALSNPDLIDQCKREGFLQRIKDEEGEGCNVYGFLEVNKVAGNFHFAPGKSFQQSGVHVHDLLAFQKDSFNLSHHINRLTFGEYFPGVVNPLDNVHWTQETPSGMYQYFIKVVPTVYTDVSGHTIQSNQFSVTEHFRTGDMGRLQSLPGVFFFYDLSPIKVTFTEENVSFLHFLTNVCAIVGGIFTVSGILDSFIYHGQRAIKKKMELGKFN

SEQ ID NO: 7457 - protein, 297 aa, Glycine max
  peptide (1)..(297): Ceres Seq. ID no. 13639025
  misc_feature (1)..(297): NCBI GI NO: 30693281 NR Description: expressed protein [Arabidopsis thaliana]
  misc_feature (1)..(297): NCBI GI NO: 38347102 NR Description: OSJNBa0006M15.17
  misc_feature (1)..(297): NCBI GI NO: 18395087 NR Description: expressed protein [Arabidopsis thaliana]
  misc_feature (60)..(273): NCBI GI NO: 6598578 NR Description: F5J5.4 [Arabidopsis thaliana]
  misc_feature (1)..(64): NCBI GI NO: 6598578 NR Description: F5J5.4 [Arabidopsis thaliana]
  misc_feature (269)..(297): NCBI GI NO: 6598578 NR Description: F5J5.4 [Arabidopsis thaliana]
  misc_feature (1)..(295): NCBI GI NO: 34860248 NR Description: similar to serologically defined breast cancerantigen 84
  misc_feature (1)..(295): NCBI GI NO: 13384938 NR Description: serologically defined breast cancer antigen 84
  misc_feature (1)..(295): NCBI GI NO: 7706278 NR Description: serologically defined breast cancer antigen 84
  misc_feature (1)..(295): NCBI GI NO: 28278376 NR Description: Similar to serologically defined breast cancerantigen 84
MDISGEQRLDVKHDIIKKRLDSRGNVIETRQEGIGAPKIEKPLQRHGGRLEHNETYCGSCYGSEVSDDDCCNSCEDVREAYRKKGWALSNPDLIDQCKREGFLQRIKDEEGEGCNVYGFLEVNKVAGNFHFAPGKSFQQSGVHVHDLLAFQKDSFNLSHHINRLTFGEYFPGVVNPLDNVHWTQETPSGMYQYFIKVVPTVYTDVSGHTIQSNQFSVTEHFRTGDMGRLQSLPGVFFFYDLSPIKVTFTEENVSFLHFLTNVCAIVGGIFTVSGILDSFIYHGQRAIKKKMELGKFN

SEQ ID NO: 7458 - DNA, 782 bp, Glycine max
  misc_feature (1)..(782): Ceres Seq. ID no. 14301420
ccccaccctttcgcctagtgcccctaggccggcctccgggctcgaacccactgctctaacaaataataaatccgcgtacaaatctacccccactgacccagatcatcctcgtccccatccgcccccgccgccgatccgcgccacaattcacatctgacttcccccaattttatcttgcttcgattcgattctcttggttcgttcgtaggggctagggttgggagccgatcgcgcgccgccggagccggtcgatagggttagggttagagtggggaggggctgagatggagaagaagaaggcggcggtgccgctggtctgccacggccactcgcggccggtcgtcgacctgttctacagccccgtcacgcccgacggctacttcctcatcagcgccagcaaggactcaaatccaatgcttcgtaatggtgagactggagattggattgggacttttgaaggtcataaaggtgctgtttggagctgttgccttgacacaaatgctctgcgtgctgcctctggttcagcagacttttcagctaaagtatgggatgcactaacaggtgatgaactacattcatttgaacacaagcatatagtccgtgcgtgtgcgtgtccatgaataaatcttagcttgtctcggcaagctgggtgcgagtcccttgtttgttttttgtatgattattaccagtgtgcatgcgttgttgtttcttgttgggtttatgggattatcccggccggtcaatccttctctcatgtagtaagattttattttgggcaaatc

SEQ ID NO: 7459 - protein, 111 aa, Glycine max
  peptide (1)..(111): Ceres Seq. ID no. 14301421
  misc_feature (7)..(47): Pfam Name: Pfam Description:  WD domain, G-beta repeat
  misc_feature (1)..(109): NCBI GI NO: 18400838 NR Description: transducin / WD-40 repeat protein family
  misc_feature (1)..(109): NCBI GI NO: 30695318 NR Description: transducin / WD-40 repeat protein family
  misc_feature (1)..(109): NCBI GI NO: 15219076 NR Description: unknown protein; protein id: At1g52730.1
  misc_feature (9)..(109): NCBI GI NO: 18394249 NR Description: transducin / WD-40 repeat protein family
  misc_feature (8)..(109): NCBI GI NO: 19922822 NR Description: CG3957-PA [Drosophila melanogaster]
  misc_feature (9)..(107): NCBI GI NO: 29437263 NR Description: Similar to serine/threonine kinase receptorassociated protein
  misc_feature (9)..(107): NCBI GI NO: 12667270 NR Description: serine-threonine kinase receptor-associated
  misc_feature (9)..(106): NCBI GI NO: 4519417 NR Description: WD-40 repeat protein [Homo sapiens]
  misc_feature (9)..(106): NCBI GI NO: 6755682 NR Description: serine/threonine kinase receptor associatedprotein
  misc_feature (9)..(106): NCBI GI NO: 20149592 NR Description: unr-interacting protein [Homo sapiens]
MEKKKAAVPLVCHGHSRPVVDLFYSPVTPDGYFLISASKDSNPMLRNGETGDWIGTFEGHKGAVWSCCLDTNALRAASGSADFSAKVWDALTGDELHSFEHKHIVRACACP

SEQ ID NO: 7460 - protein, 68 aa, Glycine max
  peptide (1)..(68): Ceres Seq. ID no. 14301422
  misc_feature (1)..(66): NCBI GI NO: 18400838 NR Description: transducin / WD-40 repeat protein family
  misc_feature (1)..(66): NCBI GI NO: 30695318 NR Description: transducin / WD-40 repeat protein family
  misc_feature (1)..(66): NCBI GI NO: 15219076 NR Description: unknown protein; protein id: At1g52730.1
  misc_feature (1)..(66): NCBI GI NO: 18394249 NR Description: transducin / WD-40 repeat protein family
  misc_feature (1)..(66): NCBI GI NO: 19922822 NR Description: CG3957-PA [Drosophila melanogaster]
  misc_feature (1)..(64): NCBI GI NO: 29437263 NR Description: Similar to serine/threonine kinase receptorassociated protein
  misc_feature (1)..(64): NCBI GI NO: 12667270 NR Description: serine-threonine kinase receptor-associated
  misc_feature (1)..(63): NCBI GI NO: 4519417 NR Description: WD-40 repeat protein [Homo sapiens]
  misc_feature (1)..(63): NCBI GI NO: 6755682 NR Description: serine/threonine kinase receptor associatedprotein
  misc_feature (1)..(63): NCBI GI NO: 20149592 NR Description: unr-interacting protein [Homo sapiens]
MLRNGETGDWIGTFEGHKGAVWSCCLDTNALRAASGSADFSAKVWDALTGDELHSFEHKHIVRACACP

SEQ ID NO: 7461 - DNA, 919 bp, Glycine max
  misc_feature (1)..(919): Ceres Seq. ID no. 13595484
aaatacaaccaacccctctcgccgtctgctcgcttgcccgtccgtccgtccccccaaatccaaccccctccccgcacgaaccccggcggcgtcaccggcgatggagtgcgtcatcggcgtggtcggccgcgacttcgcggtggtggccgcggacacgtccgccgtgcagagcatcctcgtccacaagacggacgaggacaagatcatgctcctcgactcccacaagctcatgggcgcctccggggagcccggcgaccgcgtgcagttcaccgagttcatccagaagaacctccacctctaccagttccgcaacaacatgccgctcagcaccgccgccaccgccaacttcacccgcggcgagctcgccaccgccctccgcaagaatccctactctgtaaacatcatacttgcagggtttgataaagatgctggtgcatcgatgtactacattgactacatcgcaacgctccacaaaattgacaagggagcattcgggtacgggtcgtacttctgtttgtcgctgatggacaagttgtaccgccctgacatgactgtcgaggaagcggtagaccttgttgacaagtgcatcaaggagatcagactccggctggtcgtcgcgcctcagaatttcgccatcaagatcgtggacaaggatggcgccagggactatgctaggcgtgagataggaggtgacagtcctgcagtcgcaaccgcaaccgcaacaatagcaacaactgcctgaggtgattggcgctgtcggtggtcatttggctggctggaggctgaaccctttctgttaattgtttccaagtactgtcactatgtaatcgcaatacgtttcggttcgagaactgtgttgcaaattctcccagatgtggactagtctgtttatgacccctatttcatggttatatgttcc

SEQ ID NO: 7462 - protein, 246 aa, Glycine max
  peptide (1)..(246): Ceres Seq. ID no. 13595485
  misc_feature (34)..(215): Pfam Name: Pfam Description:  Proteasome A-type and B-type
  misc_feature (34)..(243): NCBI GI NO: 27552546 NR Description: 20S proteasome beta 4 subunit
  misc_feature (34)..(243): NCBI GI NO: 17380213 NR Description: Proteasome subunit beta type 2
  misc_feature (34)..(226): NCBI GI NO: 15233580 NR Description: 20S proteasome beta subunit D2 (PBD2)
  misc_feature (34)..(227): NCBI GI NO: 15228805 NR Description: 20S proteasome beta subunit D (PBD1)
  misc_feature (34)..(167): NCBI GI NO: 14594929 NR Description: putative beta4 proteasome subunit
  misc_feature (34)..(222): NCBI GI NO: 29841035 NR Description: similar to NM_017284 proteasome
  misc_feature (34)..(222): NCBI GI NO: 19113828 NR Description: proteasome component; c7-I subfamily
  misc_feature (34)..(222): NCBI GI NO: 4506195 NR Description: proteasome beta 2 subunit
  misc_feature (34)..(222): NCBI GI NO: 30585195 NR Description: Homo sapiens proteasome
  misc_feature (4)..(222): NCBI GI NO: 16758370 NR Description: proteasome
NTTNPSRRLLACPSVRPPKSNPLPARTPAASPAMECVIGVVGRDFAVVAADTSAVQSILVHKTDEDKIMLLDSHKLMGASGEPGDRVQFTEFIQKNLHLYQFRNNMPLSTAATANFTRGELATALRKNPYSVNIILAGFDKDAGASMYYIDYIATLHKIDKGAFGYGSYFCLSLMDKLYRPDMTVEEAVDLVDKCIKEIRLRLVVAPQNFAIKIVDKDGARDYARREIGGDSPAVATATATIATTA

SEQ ID NO: 7463 - protein, 213 aa, Glycine max
  peptide (1)..(213): Ceres Seq. ID no. 13595486
  misc_feature (1)..(182): Pfam Name: Pfam Description:  Proteasome A-type and B-type
  misc_feature (1)..(210): NCBI GI NO: 27552546 NR Description: 20S proteasome beta 4 subunit
  misc_feature (1)..(210): NCBI GI NO: 17380213 NR Description: Proteasome subunit beta type 2
  misc_feature (1)..(193): NCBI GI NO: 15233580 NR Description: 20S proteasome beta subunit D2 (PBD2)
  misc_feature (1)..(194): NCBI GI NO: 15228805 NR Description: 20S proteasome beta subunit D (PBD1)
  misc_feature (1)..(134): NCBI GI NO: 14594929 NR Description: putative beta4 proteasome subunit
  misc_feature (1)..(189): NCBI GI NO: 29841035 NR Description: similar to NM_017284 proteasome
  misc_feature (1)..(189): NCBI GI NO: 19113828 NR Description: proteasome component; c7-I subfamily
  misc_feature (1)..(189): NCBI GI NO: 4506195 NR Description: proteasome beta 2 subunit
  misc_feature (1)..(189): NCBI GI NO: 30585195 NR Description: Homo sapiens proteasome
  misc_feature (1)..(189): NCBI GI NO: 16758370 NR Description: proteasome
MECVIGVVGRDFAVVAADTSAVQSILVHKTDEDKIMLLDSHKLMGASGEPGDRVQFTEFIQKNLHLYQFRNNMPLSTAATANFTRGELATALRKNPYSVNIILAGFDKDAGASMYYIDYIATLHKIDKGAFGYGSYFCLSLMDKLYRPDMTVEEAVDLVDKCIKEIRLRLVVAPQNFAIKIVDKDGARDYARREIGGDSPAVATATATIATTA

SEQ ID NO: 7464 - protein, 178 aa, Glycine max
  peptide (1)..(178): Ceres Seq. ID no. 13595487
  misc_feature (1)..(147): Pfam Name: Pfam Description:  Proteasome A-type and B-type
  misc_feature (1)..(175): NCBI GI NO: 27552546 NR Description: 20S proteasome beta 4 subunit
  misc_feature (1)..(175): NCBI GI NO: 17380213 NR Description: Proteasome subunit beta type 2
  misc_feature (1)..(158): NCBI GI NO: 15233580 NR Description: 20S proteasome beta subunit D2 (PBD2)
  misc_feature (1)..(159): NCBI GI NO: 15228805 NR Description: 20S proteasome beta subunit D (PBD1)
  misc_feature (1)..(99): NCBI GI NO: 14594929 NR Description: putative beta4 proteasome subunit
  misc_feature (1)..(154): NCBI GI NO: 29841035 NR Description: similar to NM_017284 proteasome
  misc_feature (1)..(154): NCBI GI NO: 19113828 NR Description: proteasome component; c7-I subfamily
  misc_feature (1)..(154): NCBI GI NO: 4506195 NR Description: proteasome beta 2 subunit
  misc_feature (1)..(154): NCBI GI NO: 30585195 NR Description: Homo sapiens proteasome
  misc_feature (1)..(154): NCBI GI NO: 16758370 NR Description: proteasome
MLLDSHKLMGASGEPGDRVQFTEFIQKNLHLYQFRNNMPLSTAATANFTRGELATALRKNPYSVNIILAGFDKDAGASMYYIDYIATLHKIDKGAFGYGSYFCLSLMDKLYRPDMTVEEAVDLVDKCIKEIRLRLVVAPQNFAIKIVDKDGARDYARREIGGDSPAVATATATIATTA

SEQ ID NO: 7465 - DNA, 479 bp, Glycine max
  misc_feature (1)..(479): Ceres Seq. ID no. 13595195
gtttgtctatgggcgaatctctccggcaacggcgacctctcttcccctgcgcgtccctcttccggcgttgccaccccgtcgtccatcgctaccagatcgacgaccgccccttcatcctctctggtctctgcagatctacgccggcggcccgccttaccgacggttcttcctagccacgctgaagtctccatcctagagggtagaggcattccatttccttcagttcagtgattgagaatggaaaatggatttcctggcgaagttctgaaggctgtttttcctctactggatggtaaagacttagtcttttgcatgcttgtatgccgccaatggtgcgaaattgcaaaggatgattacttctggaaatgcatctgctcacggaaatggccttccatctgcaagcagcctccttctgacacaaacttccaaaagctctatttaacgttctccaagccacggaagacggtgcaccttcctgt

SEQ ID NO: 7466 - protein, 80 aa, Glycine max
  peptide (1)..(80): Ceres Seq. ID no. 13595196
  misc_feature (5)..(47): Pfam Name: Pfam Description:  F-box domain
  misc_feature (1)..(79): NCBI GI NO: 30089733 NR Description: hypothetical protein
  misc_feature (5)..(79): NCBI GI NO: 15241675 NR Description: F-box protein family [Arabidopsis thaliana]
MENGFPGEVLKAVFPLLDGKDLVFCMLVCRQWCEIAKDDYFWKCICSRKWPSICKQPPSDTNFQKLYLTFSKPRKTVHLP

SEQ ID NO: 7467 - protein, 76 aa, Glycine max
  peptide (1)..(76): Ceres Seq. ID no. 13595197
VCLWANLSGNGDLSSPARPSSGVATPSSIATRSTTAPSSSLVSADLRRRPALPTVLPSHAEVSILEGRGIPFPSVQ

SEQ ID NO: 7468 - protein, 64 aa, Glycine max
  peptide (1)..(64): Ceres Seq. ID no. 13595198
FVYGRISPATATSLPLRVPLPALPPRRPSLPDRRPPLHPLWSLQIYAGGPPYRRFFLATLKSPS

SEQ ID NO: 7469 - DNA, 1114 bp, Glycine max
  misc_feature (1)..(1114): Ceres Seq. ID no. 12610713
acaacatccatgtcccatacatctttagcagcaagagaactcaaacagtttaattttcttcaaaactagtttttttttggttttagttggtatcctcggaagagagagaaaatgttgggaattttcagcggagctatagtatcattgccggaagagctggtggctgccgggaaccgaactccgtcgccgaagacaaccggatcggtcctagtcaacaagttcgtagagaaaaatccctctgccgtgtccgtacaggtcggcgactacgtgcagcttgcttatagccaccacaaagagagtcctctccggccaaggtcatttggggctaaggatgagatattctgcttgttccaaggctcacttgacaacctaggaagccttaaacaacaatatgggctggcaaagaatgcaaacgaggttctcttggtcattgaggcttacaagactctccgtgacagagctccttacccagccaaccacgtcgtgtcacacctaagtggcgattttgcctttgtggtctttgataaatcaacctccactctgtttgtagcctctgaccaagaaggtaaggtaccattgtactgggggataacagctgatgggtatgtggcatttgctgatgatattgagttgctaaaaggtgcttgtggcaaatctcttgcttctttccctcaaggctgtttttactcgactgccttaggtgggcttaggagctttgagaaccctaagaacaagatcactgccattcctgctagagaggaagaaatttggggagccaccttcaaggtggaaggagcagcagttcttgcacatggagagtgaaagaatcaagatccatctctcttaatatctaaactccaacagcaaacaaaataatgatgtagagaaaacaagaagctgttctatgagtttttttttttttttaaatgttatcaatggttggtgatgatgatgcgtgtagtgtgttctctcttttgtacaatccgtgtccgtctcttctgctgtttgtagtgactttgtcccaataagttatgtctcaaaactcaaaatctaccttctcttgatcctttttttatctcatgttcagatcttgtgtttcttcagtaagtcttgc

SEQ ID NO: 7470 - protein, 236 aa, Glycine max
  peptide (1)..(236): Ceres Seq. ID no. 12610714
  misc_feature (1)..(227): NCBI GI NO: 7488440 NR Description: aluminum-induced protein - rape
  misc_feature (1)..(233): NCBI GI NO: 15239658 NR Description: aluminium-induced protein - like
  misc_feature (1)..(236): NCBI GI NO: 34541994 NR Description: Al-induced protein [Gossypium hirsutum]
  misc_feature (1)..(236): NCBI GI NO: 7488881 NR Description: hypothetical protein ARG10 - mung bean
  misc_feature (1)..(233): NCBI GI NO: 13958130 NR Description: aluminium induced protein [Avicennia marina]
  misc_feature (2)..(222): NCBI GI NO: 7489671 NR Description: hypothetical protein wali7 - wheat (fragment)
  misc_feature (1)..(227): NCBI GI NO: 20340249 NR Description: aluminum-induced protein-like protein
  misc_feature (1)..(230): NCBI GI NO: 30017570 NR Description: unknown protein
  misc_feature (1)..(230): NCBI GI NO: 32352176 NR Description: hypothetical protein
  misc_feature (1)..(230): NCBI GI NO: 15228883 NR Description: unknown protein; protein id: At3g22850
MLGIFSGAIVSLPEELVAAGNRTPSPKTTGSVLVNKFVEKNPSAVSVQVGDYVQLAYSHHKESPLRPRSFGAKDEIFCLFQGSLDNLGSLKQQYGLAKNANEVLLVIEAYKTLRDRAPYPANHVVSHLSGDFAFVVFDKSTSTLFVASDQEGKVPLYWGITADGYVAFADDIELLKGACGKSLASFPQGCFYSTALGGLRSFENPKNKITAIPAREEEIWGATFKVEGAAVLAHGE

SEQ ID NO: 7471 - DNA, 1380 bp, Glycine max
  misc_feature (1)..(1380): Ceres Seq. ID no. 15176016
  misc_feature (799)..(799): n is a, c, t, g, unknown, or other
aggaaattgggaaagatactaaaactttccctggaactgagttggagtataattttttcttgttttgcgcacttctcagatgaatccctagtttccttacaaggtcctctgtaccatttacaatggaacatgcagataaaggaaaagaatcatcaaatagtgtaaatgaagtagaagtcactaattctccaattatttgtggccttccagatgatatttctcttatgtgcctggcaagaattccaagaaaatatcattctgtcctgaagtgtgtctcaaagagctggaggaacttgatttgcagtgaagaatggttctgttatcgccgaaagcacaaacttgatgaaacctggatttatgctttgtgcagggacaaatcaaatgagattttctgttatgtattggatccaaccttgtcaagaagatactggaagctcattgataaccttccacctcaaatctcgaaaagaaaaggcataggttttgaagctttgggaaataagctattcttattgggtggttgtagcgagtttctagattctactgatgaggtttattcatatgatgcttcctcaaactgttgggctcaagctacttccttgtcaactgctaggtacaactttggttgtgaagttttggataaaaaactatatgctatcgggggaggaggttcaaagtcaagttatcattcttgggagacttttgaccctttgacaaattgttggacatctcagacagatcctaaaattgttaatgaaattaaagattcagtggttcttgacgggaagatatacgtcgnatgtagcagatatcctgtaactcctcatgtatttgctgttgtatatgaaccatcaagtggcacatgggagtatgcagatgatgacatggtttcaggatggactggtcctgcagttgctgttgatggtaccctttatgtcttggatcagagtgcaggaactaagttaatgatgtggcataaagagagacgcgagtggatactcgttggaaagctatcaccattgcctattagacaaccctgccagcttgttgcagttggtaaaagcattttcattgttgggagagtgcttagcactgtggttgttgatgttgataatttggggaatgaggatcaggtgattgtgggttctgctatacctggattattatttgatgtcaatgtaacaagtgttaaatgcttgtcaaactgaagcattaattagtttgtgggtagtgttatgctatgaaacatgcatcaatgttacatgaaacttttttcttttcttggtacaatcatagtactgaagtttgaaccattggcttatatgtaaattactcaaatccggcacagtttgcattgtcaatcctagtagtattttgcat

SEQ ID NO: 7472 - protein, 361 aa, Glycine max
  peptide (1)..(361): Ceres Seq. ID no. 15176017
  misc_feature (25)..(70): Pfam Name: Pfam Description:  F-box domain
  misc_feature (15)..(360): NCBI GI NO: 18411974 NR Description: SKP1 interacting partner 4 (SKIP4), putative
  misc_feature (15)..(360): NCBI GI NO: 26453288 NR Description: putative SKP1 interacting partner 4 SKIP4
  misc_feature (48)..(360): NCBI GI NO: 10716953 NR Description: SKP1 interacting partner 4 [Arabidopsis thaliana]
  misc_feature (8)..(331): NCBI GI NO: 19071626 NR Description: putative Kelch motif containing protein
  misc_feature (9)..(331): NCBI GI NO: 37534254 NR Description: unknown protein
  misc_feature (12)..(331): NCBI GI NO: 18405298 NR Description: Kelch repeat containing F-box protein family
  misc_feature (12)..(331): NCBI GI NO: 25405811 NR Description: unknown protein, 58496-60308
  misc_feature (1)..(329): NCBI GI NO: 18397351 NR Description: Kelch repeat containing F-box protein family
  misc_feature (22)..(345): NCBI GI NO: 15229392 NR Description: Kelch repeat containing F-box protein family
  misc_feature (21)..(294): NCBI GI NO: 15220452 NR Description: Kelch repeat containing F-box protein family
  misc_feature (226)..(226): Xaa is any aa, unknown or other
MEHADKGKESSNSVNEVEVTNSPIICGLPDDISLMCLARIPRKYHSVLKCVSKSWRNLICSEEWFCYRRKHKLDETWIYALCRDKSNEIFCYVLDPTLSRRYWKLIDNLPPQISKRKGIGFEALGNKLFLLGGCSEFLDSTDEVYSYDASSNCWAQATSLSTARYNFGCEVLDKKLYAIGGGGSKSSYHSWETFDPLTNCWTSQTDPKIVNEIKDSVVLDGKIYVXCSRYPVTPHVFAVVYEPSSGTWEYADDDMVSGWTGPAVAVDGTLYVLDQSAGTKLMMWHKERREWILVGKLSPLPIRQPCQLVAVGKSIFIVGRVLSTVVVDVDNLGNEDQVIVGSAIPGLLFDVNVTSVKCLSN

SEQ ID NO: 7473 - protein, 327 aa, Glycine max
  peptide (1)..(327): Ceres Seq. ID no. 15176018
  misc_feature (1)..(36): Pfam Name: Pfam Description:  F-box domain
  misc_feature (1)..(326): NCBI GI NO: 18411974 NR Description: SKP1 interacting partner 4 (SKIP4), putative
  misc_feature (1)..(326): NCBI GI NO: 26453288 NR Description: putative SKP1 interacting partner 4 SKIP4
  misc_feature (14)..(326): NCBI GI NO: 10716953 NR Description: SKP1 interacting partner 4 [Arabidopsis thaliana]
  misc_feature (1)..(297): NCBI GI NO: 19071626 NR Description: putative Kelch motif containing protein
  misc_feature (1)..(297): NCBI GI NO: 37534254 NR Description: unknown protein
  misc_feature (1)..(297): NCBI GI NO: 18405298 NR Description: Kelch repeat containing F-box protein family
  misc_feature (1)..(297): NCBI GI NO: 25405811 NR Description: unknown protein, 58496-60308
  misc_feature (1)..(295): NCBI GI NO: 18397351 NR Description: Kelch repeat containing F-box protein family
  misc_feature (1)..(311): NCBI GI NO: 15229392 NR Description: Kelch repeat containing F-box protein family
  misc_feature (1)..(260): NCBI GI NO: 15220452 NR Description: Kelch repeat containing F-box protein family
  misc_feature (192)..(192): Xaa is any aa, unknown or other
MCLARIPRKYHSVLKCVSKSWRNLICSEEWFCYRRKHKLDETWIYALCRDKSNEIFCYVLDPTLSRRYWKLIDNLPPQISKRKGIGFEALGNKLFLLGGCSEFLDSTDEVYSYDASSNCWAQATSLSTARYNFGCEVLDKKLYAIGGGGSKSSYHSWETFDPLTNCWTSQTDPKIVNEIKDSVVLDGKIYVXCSRYPVTPHVFAVVYEPSSGTWEYADDDMVSGWTGPAVAVDGTLYVLDQSAGTKLMMWHKERREWILVGKLSPLPIRQPCQLVAVGKSIFIVGRVLSTVVVDVDNLGNEDQVIVGSAIPGLLFDVNVTSVKCLSN

SEQ ID NO: 7474 - DNA, 1503 bp, Glycine max
  misc_feature (1)..(1503): Ceres Seq. ID no. 13595199
ctccattcgatccgaacccatccgattcggaagagaggtactcacttgccccaaccaatcgaagcagggcgagctcgactttgcggcgctaattcgtcggcagctagtatcccgcgctgtgtgtttccctcgttcgtgttcaggtggtgatgccgcttgtggaatcgcctcaatggcgccggaaggccaccgatttcttctcttcatctagcttcaagctgaagcaggcagggcaatctgcaggggataatatagctgatgttgccgggaaggttggaacagtggtgaagagtcggtgggctatcttccaggatgctagacagcgaccgccaccaccaggagatactgtgcaggagcgcttcatctctgctgctgccaacactggagtgattctgaggaagggcatttcagagacaaaggagaaggtcgcggtgggaaaggtcaaagttgaagaggctgccaaaaaaactgcggacaaaagcaaaactattttgaacaatattgaacgctggcagaagggagttgcgagcaatgacgtttttggtgttcctgttgaagccactgtacaacgggagcaatatggtaaagctgtgcctctgatactggtgaggtgtgcagaccacttggttatatcaggcttgagtaatgagtgcttgttcaaatctgaaggtgacagaaaagttcttcagcaactagtttcactttacaatgaggattcgggtgcatctttgcctgatggtgttagccctcttgatgtagctgcactgatcaagtgctaccttgccagcatccccgaaccgcttacaacatttgctctttatgatgagcttaaagacgcgagggttagcattgatgatcttaagaacatactgaagaagcttccaaatgtgaactacatgacactagaatttgttacagcattgctactgagagtaagccgtaaatcagcactcaacaagatggactctcgtacccttgctgtggagttcgcacctttgatcatatggcagcaaggggattctggaacagatttacggaatcatctcagattcacactgaaaccacctccaaaaattgtggacgcgacgacaagtaccactacatgggacttgctagatgaggatgatgtggatgcttcgtcgcaaatccccttggacgatggttcgcctctagactatggtgctattgaggtgattcaatgcttaattgagcatcacaatcccatattcacggatgcaaacgagactgtatggagatgacctgacctggccggctcctctttagatttctgtggtatttagctcgtgctatgtacaagttccaggtagtaggatggagtggagtgccgcgaataagtctagtcttggggaagcattttggtccaaacttttttttgtgggagtaaaagttggaactgtatatattaattgtccacatgacagagttgtcttgtgggatttgcctcgacatggctcgtcaataatgtaccatgattcttgtgct

SEQ ID NO: 7475 - protein, 369 aa, Glycine max
  peptide (1)..(369): Ceres Seq. ID no. 13595200
  misc_feature (149)..(288): Pfam Name: Pfam Description:  RhoGAP domain
  misc_feature (1)..(369): NCBI GI NO: 28564771 NR Description: putative auxin-regulated protein
  misc_feature (1)..(369): NCBI GI NO: 18424478 NR Description: auxin-regulated protein [Arabidopsis thaliana]
  misc_feature (1)..(369): NCBI GI NO: 21553593 NR Description: unknown [Arabidopsis thaliana]
  misc_feature (112)..(285): NCBI GI NO: 26333369 NR Description: unnamed protein product [Mus musculus]
  misc_feature (128)..(296): NCBI GI NO: 2624718 NR Description: Gtpase-Activation Domain From Rhogap
  misc_feature (128)..(296): NCBI GI NO: 3402094 NR Description: Chain A, Complex Between Cdc42hs
  misc_feature (128)..(296): NCBI GI NO: 3660275 NR Description: Chain A, RhoRHOGAPGDP(DOT)ALF4 COMPLEX
  misc_feature (128)..(296): NCBI GI NO: 6730013 NR Description: Chain B
  misc_feature (128)..(296): NCBI GI NO: 4139447 NR Description: Chain B
  misc_feature (99)..(291): NCBI GI NO: 21358061 NR Description: CG6811-PA [Drosophila melanogaster]
MPLVESPQWRRKATDFFSSSSFKLKQAGQSAGDNIADVAGKVGTVVKSRWAIFQDARQRPPPPGDTVQERFISAAANTGVILRKGISETKEKVAVGKVKVEEAAKKTADKSKTILNNIERWQKGVASNDVFGVPVEATVQREQYGKAVPLILVRCADHLVISGLSNECLFKSEGDRKVLQQLVSLYNEDSGASLPDGVSPLDVAALIKCYLASIPEPLTTFALYDELKDARVSIDDLKNILKKLPNVNYMTLEFVTALLLRVSRKSALNKMDSRTLAVEFAPLIIWQQGDSGTDLRNHLRFTLKPPPKIVDATTSTTTWDLLDEDDVDASSQIPLDDGSPLDYGAIEVIQCLIEHHNPIFTDANETVWR

SEQ ID NO: 7476 - DNA, 787 bp, Glycine max
  misc_feature (1)..(787): Ceres Seq. ID no. 12610718
gaatcaacctaaaaataaaaccaaaccaaccaatctccttattagaagaagcatgaacatagtctgtgtccgcgctctctatccgccctccaggttgctacatcgtgccgagagatgtagagtgggagggagaaactacgaaaaacctgaactcaagcaaagcaacttctcaaaagacgaagacgatctcatccttaggcttcatgcacttcttggcaatagatggtcattgatagcgggaaggttacctggacgaaccgatactgaaataaggatccattgggaaacttacttaaagaggaaactcatgaaaatgggaatagacccaaccaaccatcgtctctaccatcacgcaaactacatttcaagacaatacctcaattcctctcataagaaacttgaaacagatatcattagtgatcaatcttcttcggtatccgaatcatgtgatatgagaatgttacccgtttcaagtaccaattgctatgatagtgctagtagtagtgctggacatagtcgtttgcctgacctcaacatcagtctcatccccgcggagacggtggtttctcggccagtttgtggccttcaagaatctaacagcaatggttcaacgcgtcaagaaacgcttcttcttttccagtgaaatcggatattttattgctacataaaaatgaaaaatggtgtatttatctgtactattttgctagatatttttttttttgtaattttactagataaaaatactcaattgagaggataataaatgatgttcaaaattttcaacccg

SEQ ID NO: 7477 - protein, 213 aa, Glycine max
  peptide (1)..(213): Ceres Seq. ID no. 12610719
  misc_feature (53)..(98): Pfam Name: Pfam Description:  Myb-like DNA-binding domain
  misc_feature (18)..(213): NCBI GI NO: 15223923 NR Description: myb family transcription factor
  misc_feature (18)..(186): NCBI GI NO: 2129650 NR Description: myb-related 24
  misc_feature (22)..(148): NCBI GI NO: 7446161 NR Description: myb-related protein - upland cotton
  misc_feature (22)..(148): NCBI GI NO: 23476315 NR Description: myb-like transcription factor 6
  misc_feature (22)..(148): NCBI GI NO: 23476311 NR Description: myb-like transcription factor 6
  misc_feature (22)..(148): NCBI GI NO: 23476313 NR Description: myb-like transcription factor 6
  misc_feature (22)..(121): NCBI GI NO: 23476317 NR Description: myb-like transcription factor 6
  misc_feature (22)..(181): NCBI GI NO: 28628961 NR Description: MYB8 [Dendrobium sp. XMW-2002-8]
  misc_feature (22)..(181): NCBI GI NO: 2129933 NR Description: myb-related protein TMH27 - tomato
  misc_feature (22)..(157): NCBI GI NO: 82308 NR Description: myb-related protein 308 - garden snapdragon
NQPKNKTKPTNLLIRRSMNIVCVRALYPPSRLLHRAERCRVGGRNYEKPELKQSNFSKDEDDLILRLHALLGNRWSLIAGRLPGRTDTEIRIHWETYLKRKLMKMGIDPTNHRLYHHANYISRQYLNSSHKKLETDIISDQSSSVSESCDMRMLPVSSTNCYDSASSSAGHSRLPDLNISLIPAETVVSRPVCGLQESNSNGSTRQETLLLFQ

SEQ ID NO: 7478 - protein, 196 aa, Glycine max
  peptide (1)..(196): Ceres Seq. ID no. 12610720
  misc_feature (36)..(81): Pfam Name: Pfam Description:  Myb-like DNA-binding domain
  misc_feature (1)..(196): NCBI GI NO: 15223923 NR Description: myb family transcription factor
  misc_feature (1)..(169): NCBI GI NO: 2129650 NR Description: myb-related 24
  misc_feature (5)..(131): NCBI GI NO: 7446161 NR Description: myb-related protein - upland cotton
  misc_feature (5)..(131): NCBI GI NO: 23476315 NR Description: myb-like transcription factor 6
  misc_feature (5)..(131): NCBI GI NO: 23476311 NR Description: myb-like transcription factor 6
  misc_feature (5)..(131): NCBI GI NO: 23476313 NR Description: myb-like transcription factor 6
  misc_feature (5)..(104): NCBI GI NO: 23476317 NR Description: myb-like transcription factor 6
  misc_feature (5)..(164): NCBI GI NO: 28628961 NR Description: MYB8 [Dendrobium sp. XMW-2002-8]
  misc_feature (5)..(164): NCBI GI NO: 2129933 NR Description: myb-related protein TMH27 - tomato
  misc_feature (5)..(140): NCBI GI NO: 82308 NR Description: myb-related protein 308 - garden snapdragon
MNIVCVRALYPPSRLLHRAERCRVGGRNYEKPELKQSNFSKDEDDLILRLHALLGNRWSLIAGRLPGRTDTEIRIHWETYLKRKLMKMGIDPTNHRLYHHANYISRQYLNSSHKKLETDIISDQSSSVSESCDMRMLPVSSTNCYDSASSSAGHSRLPDLNISLIPAETVVSRPVCGLQESNSNGSTRQETLLLFQ

SEQ ID NO: 7479 - protein, 111 aa, Glycine max
  peptide (1)..(111): Ceres Seq. ID no. 12610721
  misc_feature (1)..(111): NCBI GI NO: 15223923 NR Description: myb family transcription factor
  misc_feature (1)..(84): NCBI GI NO: 2129650 NR Description: myb-related 24
  misc_feature (1)..(46): NCBI GI NO: 7446161 NR Description: myb-related protein - upland cotton
  misc_feature (1)..(46): NCBI GI NO: 23476315 NR Description: myb-like transcription factor 6
  misc_feature (1)..(46): NCBI GI NO: 23476311 NR Description: myb-like transcription factor 6
  misc_feature (1)..(46): NCBI GI NO: 23476313 NR Description: myb-like transcription factor 6
  misc_feature (1)..(19): NCBI GI NO: 23476317 NR Description: myb-like transcription factor 6
  misc_feature (1)..(79): NCBI GI NO: 28628961 NR Description: MYB8 [Dendrobium sp. XMW-2002-8]
  misc_feature (1)..(79): NCBI GI NO: 2129933 NR Description: myb-related protein TMH27 - tomato
  misc_feature (1)..(55): NCBI GI NO: 82308 NR Description: myb-related protein 308 - garden snapdragon
MKMGIDPTNHRLYHHANYISRQYLNSSHKKLETDIISDQSSSVSESCDMRMLPVSSTNCYDSASSSAGHSRLPDLNISLIPAETVVSRPVCGLQESNSNGSTRQETLLLFQ

SEQ ID NO: 7480 - DNA, 1352 bp, Glycine max
  misc_feature (1)..(1352): Ceres Seq. ID no. 12611506
aaaaaccaaaaccctagcgaggttggttcccaattcccatggtttctcacccgaaatcgaagttcagtgtctatcaaaacccttccttttcggcggttctcacttccaacagtcttcaaccttccaagttcaccatcctctccttcttctctgcctccgcattcgcttttctcgctgtcttcttcagggaaaacggcttcgtccacattttgagcttcgcagctttttcccctgtcacagcttgtaagtttccaacctcaatttttttaattagggtaatttctgatccctttattgaacttcagattggcttgccaagacgctacaagctatagtgggttttatcttcattgtttctgcactcttcaaagttgtgtttctgcgtagagttaggtatgctggtggaggtgttgttgcggctaagtctctgtctgatgctaacagcgttcataggaatgagattttgctaacaaaacatcaattagggcttttaggagtgaagccaaaggttgatttggctcaacctgattcagcaaagaagccccccaagtctaaacttcaactgccttcttcagatttgcttgttccccttcaccggccaattcccagtcccactcagggttcttcgtctagcattgatgccgatggttcaaattctaataggggtggtgctgctcgttctattggtactccatcgaggtagtcaggttcggtgtcattctatctttcgccaggttcggtttcgcctccaaggggttcggctggagtggattcagcattttcgagtccttggtctaacaggcaagcctcctctgttactaagataacggctgaagaaaagctggagaaattcatagctgaagtggatgaaaggatcaatgagtctgctgggaagatgtctaccccgcctcctattgtttctggttttggcatagtgagccctattacagttacaggctcaaccaatacctctggaactgctaggcgtacgtcattgaggcttgtgaggatgtctccgggctcgcaaaagtttaacactccccctaagaagggtgagggcaagtttcctgcaccaatgtccatggaagaatctgttcaagcttttgaacatcttggcatctatcctcaaattgaacagtggcatgatcaactctggcaatggttttctttgcttctgctcaatcctttgcttaacaagattgagacaagtcacattaaggtttcttttattcttcatttcttctcttatgttcaaagcaaggttaaacaaacaagaaaaatattgactttggaagtcaatatatgtgatggcaacaataattttcaatgacagacaaagtagtatttgatgt

SEQ ID NO: 7481 - protein, 144 aa, Glycine max
  peptide (1)..(144): Ceres Seq. ID no. 12611507
  misc_feature (1)..(109): NCBI GI NO: 15223059 NR Description: hypothetical protein; protein id: At1g07970.1
MSTPPPIVSGFGIVSPITVTGSTNTSGTARRTSLRLVRMSPGSQKFNTPPKKGEGKFPAPMSMEESVQAFEHLGIYPQIEQWHDQLWQWFSLLLLNPLLNKIETSHIKVSFILHFFSYVQSKVKQTRKILTLEVNICDGNNNFQ

SEQ ID NO: 7482 - protein, 106 aa, Glycine max
  peptide (1)..(106): Ceres Seq. ID no. 12611508
  misc_feature (1)..(71): NCBI GI NO: 15223059 NR Description: hypothetical protein; protein id: At1g07970.1
MSPGSQKFNTPPKKGEGKFPAPMSMEESVQAFEHLGIYPQIEQWHDQLWQWFSLLLLNPLLNKIETSHIKVSFILHFFSYVQSKVKQTRKILTLEVNICDGNNNFQ

SEQ ID NO: 7483 - protein, 98 aa, Glycine max
  peptide (1)..(98): Ceres Seq. ID no. 12611509
  misc_feature (5)..(68): NCBI GI NO: 15223059 NR Description: hypothetical protein; protein id: At1g07970.1
MVSHPKSKFSVYQNPSFSAVLTSNSLQPSKFTILSFFSASAFAFLAVFFRENGFVHILSFAAFSPVTACKFPTSIFLIRVISDPFIELQIGLPRRYKL

SEQ ID NO: 7484 - DNA, 1699 bp, Glycine max
  misc_feature (1)..(1699): Ceres Seq. ID no. 13582285
acttttgttgtctaacatggctttggtgaatccgtttctgtgtaccactcgaacgtccctccctctgcgagtttcaggtccaccaaaccaagtcctaccacgttggactctctgctcccaatattcattcaaaacatcatcactaagatcgaagcaactcaggtgtggcgccactgcagacatcaaagcagatcacgcggttcttgtgggccccaccagcgaggaggagagaaaaggggactatgactggacacaggaatggtaccctttgtatctcactcagaatgtgcccgaagatgcacctttgggtctcagagtgtttgataaacagctcgtgttgttcaaggatggcaatggccagtttcgctgttacgaagatcgctgcccccacaggttagcgaaactatctgagggacagttgattgatggaaggctcgagtgtctataccatggatggcaatttgaaggggagggaaaatgtgtgaagatacctcagcttccagctgatgccaaaatcccaagggctgcttgtgttaaaacatatgaagtgagggactctcaaggtgttatttgggtatggatgtccctcaagacacctccaaatgtcagtaaattaccttggtttgagaacttcgcaaggccggggtttcaagatgtttcgacaattcacgaactcccttatgatcactctattcttctggagaacctgatggatcctgctcatatcccaatctcccatgacagaacagattggactgcgaaaagggaggatgctcagccgctgtgttttgaggtgaccgaacgaacagatagagggtttgcaggttggtggggcagagagaaagatggatccatgcctaacttcttgcggtttgaggctccttgtgttctacaaaacaacagggaaattgttgataagaatggtgaaataaactacttcagtggcctgttcctttgtagaccaaccgggcaagggaaatccatgctgatagttaggtttggaggaacaaaaagatctccactagcaaaagtgtttcctaagtggtacttccatcagaatgcaagcaaggtgtttgagcaagacatgggattcttgtcatcacaaaatgaaattcttctgagagaaaaggttccaacaaaggaactatacctgaatctgaaatcatcagacacatgggttgctgaatacaggaagtggatggacaaagcggggcatggaatgccatatcattttggtcacagcactatctctttgcctaaagagcctgctgtggttgaacacgcacctgctggactagtcgcaggacaatcagcttcctcaccaaccaaggggggcattggaacaatgcatgcccctaattttgccaacagatattttaggcatgtgattcattgcaaaggatgtagaaccgtcgtcaaagctttcgaagcttggaaaaatgctctttcagctgtggcaattgcattaactgcgttggcaattctgctttctgggagacaatggaaggtccttctcttggcatctgcagctctctgctctgttggagtctatgcttgctcaaccgccattgcaatgaatacaacaaattttattaggacacataggagattgtgagtgactggttgtaaaaatagttgttcaaatgaatactaaacagtttgtctaatgactaattagttgttacagattgtgtttggc

SEQ ID NO: 7485 - protein, 537 aa, Glycine max
  peptide (1)..(537): Ceres Seq. ID no. 13582286
  misc_feature (86)..(188): Pfam Name: Pfam Description:  Rieske [2Fe-2S] domain
  misc_feature (39)..(537): NCBI GI NO: 7488843 NR Description: Rieske
  misc_feature (67)..(537): NCBI GI NO: 15224625 NR Description: Rieske
  misc_feature (76)..(415): NCBI GI NO: 23125858 NR Description: hypothetical protein [Nostoc punctiforme]
  misc_feature (72)..(425): NCBI GI NO: 17232499 NR Description: similar to cell death suppressor protein Lls1
  misc_feature (80)..(409): NCBI GI NO: 23041088 NR Description: hypothetical protein
  misc_feature (73)..(381): NCBI GI NO: 30088964 NR Description: lethal leaf spot 1-like protein
  misc_feature (62)..(402): NCBI GI NO: 23040568 NR Description: hypothetical protein
  misc_feature (49)..(381): NCBI GI NO: 1935912 NR Description: lethal leaf-spot 1 [Zea mays]
  misc_feature (49)..(381): NCBI GI NO: 7489721 NR Description: cell death suppressor protein lls1 - maize
  misc_feature (11)..(385): NCBI GI NO: 15230543 NR Description: Rieske
LLLSNMALVNPFLCTTRTSLPLRVSGPPNQVLPRWTLCSQYSFKTSSLRSKQLRCGATADIKADHAVLVGPTSEEERKGDYDWTQEWYPLYLTQNVPEDAPLGLRVFDKQLVLFKDGNGQFRCYEDRCPHRLAKLSEGQLIDGRLECLYHGWQFEGEGKCVKIPQLPADAKIPRAACVKTYEVRDSQGVIWVWMSLKTPPNVSKLPWFENFARPGFQDVSTIHELPYDHSILLENLMDPAHIPISHDRTDWTAKREDAQPLCFEVTERTDRGFAGWWGREKDGSMPNFLRFEAPCVLQNNREIVDKNGEINYFSGLFLCRPTGQGKSMLIVRFGGTKRSPLAKVFPKWYFHQNASKVFEQDMGFLSSQNEILLREKVPTKELYLNLKSSDTWVAEYRKWMDKAGHGMPYHFGHSTISLPKEPAVVEHAPAGLVAGQSASSPTKGGIGTMHAPNFANRYFRHVIHCKGCRTVVKAFEAWKNALSAVAIALTALAILLSGRQWKVLLLASAALCSVGVYACSTAIAMNTTNFIRTHRRL

SEQ ID NO: 7486 - protein, 532 aa, Glycine max
  peptide (1)..(532): Ceres Seq. ID no. 13582287
  misc_feature (81)..(183): Pfam Name: Pfam Description:  Rieske [2Fe-2S] domain
  misc_feature (34)..(532): NCBI GI NO: 7488843 NR Description: Rieske
  misc_feature (62)..(532): NCBI GI NO: 15224625 NR Description: Rieske
  misc_feature (71)..(410): NCBI GI NO: 23125858 NR Description: hypothetical protein [Nostoc punctiforme]
  misc_feature (67)..(420): NCBI GI NO: 17232499 NR Description: similar to cell death suppressor protein Lls1
  misc_feature (75)..(404): NCBI GI NO: 23041088 NR Description: hypothetical protein
  misc_feature (68)..(376): NCBI GI NO: 30088964 NR Description: lethal leaf spot 1-like protein
  misc_feature (57)..(397): NCBI GI NO: 23040568 NR Description: hypothetical protein
  misc_feature (44)..(376): NCBI GI NO: 1935912 NR Description: lethal leaf-spot 1 [Zea mays]
  misc_feature (44)..(376): NCBI GI NO: 7489721 NR Description: cell death suppressor protein lls1 - maize
  misc_feature (6)..(380): NCBI GI NO: 15230543 NR Description: Rieske
MALVNPFLCTTRTSLPLRVSGPPNQVLPRWTLCSQYSFKTSSLRSKQLRCGATADIKADHAVLVGPTSEEERKGDYDWTQEWYPLYLTQNVPEDAPLGLRVFDKQLVLFKDGNGQFRCYEDRCPHRLAKLSEGQLIDGRLECLYHGWQFEGEGKCVKIPQLPADAKIPRAACVKTYEVRDSQGVIWVWMSLKTPPNVSKLPWFENFARPGFQDVSTIHELPYDHSILLENLMDPAHIPISHDRTDWTAKREDAQPLCFEVTERTDRGFAGWWGREKDGSMPNFLRFEAPCVLQNNREIVDKNGEINYFSGLFLCRPTGQGKSMLIVRFGGTKRSPLAKVFPKWYFHQNASKVFEQDMGFLSSQNEILLREKVPTKELYLNLKSSDTWVAEYRKWMDKAGHGMPYHFGHSTISLPKEPAVVEHAPAGLVAGQSASSPTKGGIGTMHAPNFANRYFRHVIHCKGCRTVVKAFEAWKNALSAVAIALTALAILLSGRQWKVLLLASAALCSVGVYACSTAIAMNTTNFIRTHRRL

SEQ ID NO: 7487 - protein, 344 aa, Glycine max
  peptide (1)..(344): Ceres Seq. ID no. 13582288
  misc_feature (1)..(344): NCBI GI NO: 7488843 NR Description: Rieske
  misc_feature (1)..(344): NCBI GI NO: 15224625 NR Description: Rieske
  misc_feature (1)..(222): NCBI GI NO: 23125858 NR Description: hypothetical protein [Nostoc punctiforme]
  misc_feature (1)..(232): NCBI GI NO: 17232499 NR Description: similar to cell death suppressor protein Lls1
  misc_feature (1)..(216): NCBI GI NO: 23041088 NR Description: hypothetical protein
  misc_feature (1)..(188): NCBI GI NO: 30088964 NR Description: lethal leaf spot 1-like protein
  misc_feature (1)..(209): NCBI GI NO: 23040568 NR Description: hypothetical protein
  misc_feature (1)..(188): NCBI GI NO: 1935912 NR Description: lethal leaf-spot 1 [Zea mays]
  misc_feature (1)..(188): NCBI GI NO: 7489721 NR Description: cell death suppressor protein lls1 - maize
  misc_feature (1)..(192): NCBI GI NO: 15230543 NR Description: Rieske
MSLKTPPNVSKLPWFENFARPGFQDVSTIHELPYDHSILLENLMDPAHIPISHDRTDWTAKREDAQPLCFEVTERTDRGFAGWWGREKDGSMPNFLRFEAPCVLQNNREIVDKNGEINYFSGLFLCRPTGQGKSMLIVRFGGTKRSPLAKVFPKWYFHQNASKVFEQDMGFLSSQNEILLREKVPTKELYLNLKSSDTWVAEYRKWMDKAGHGMPYHFGHSTISLPKEPAVVEHAPAGLVAGQSASSPTKGGIGTMHAPNFANRYFRHVIHCKGCRTVVKAFEAWKNALSAVAIALTALAILLSGRQWKVLLLASAALCSVGVYACSTAIAMNTTNFIRTHRRL

SEQ ID NO: 7488 - DNA, 882 bp, Glycine max
  misc_feature (1)..(882): Ceres Seq. ID no. 13639080
agcaagcagctgatccgagttaaccattagccaaaagtaatcttgcttttccatttcccgagagagctcagttcgtgtctgcactccagtccagtgtttgtttgagcagcagccatggcctccaaccaggacaaggcaagctaccgcgccggcgaggccaaggcccacaccgaggagaaggccggacaggtgaccggcgcggccaaggacgaggcgtgcgacgccaaggaccgggcgtcgggcgcggcggggcaagcgacggggaaggggcagggcgccgtggaggccacgaagcagaaggccggcgaggcggggcagaagacgtccgagacggcgcaggccggcaaggaccgggccgccgagggcaaggaccggaccggcagctacctcggccacgcgaccgaggggaccaagcagaaggcctccgaggcgacggggtacacgcaggacagggcttccgacgcggcgcagtacaccaaggactccgccgtcgccggcaaggacaagaccggcagcgtcctcagccaggccggcgagcaggtgaagaacgcggtggtcggcgcgaaagacgcggtggcgagcacgctggggatggggggagacaacacctccagcgcaaccaaggacgcgagcaccaccgagaccatcaccaagagccgtcactagattatacctgtcgcggttgcataatgctttctttccttcagttcccctcgagctccacattcctgtggtgtgtccgagtctctatgtcgaggtcgggcgagaatgtctgactgacgagagatgtatcttggtgttcagagttctcgttttaagttccacaatggtgtaataataacaataataataaagtactgcgtaccgtaagtaatttcgtcc

SEQ ID NO: 7489 - protein, 183 aa, Glycine max
  peptide (1)..(183): Ceres Seq. ID no. 13639081
  misc_feature (79)..(152): Pfam Name: Pfam Description:  Late embryogenesis abundant protein
  misc_feature (1)..(181): NCBI GI NO: 7489493 NR Description: LEA protein - rice
  misc_feature (1)..(181): NCBI GI NO: 4105441 NR Description: group 3 LEA protein [Oryza sativa]
  misc_feature (1)..(181): NCBI GI NO: 7489569 NR Description: protein LEA type 1 - rice
  misc_feature (1)..(174): NCBI GI NO: 4929080 NR Description: ABA-inducible protein WRAB1 [Triticum aestivum]
  misc_feature (1)..(178): NCBI GI NO: 126081 NR Description: ABA-inducible protein PHV A1
  misc_feature (1)..(183): NCBI GI NO: 25989709 NR Description: LEA2 protein [Triticum aestivum]
  misc_feature (1)..(180): NCBI GI NO: 33342178 NR Description: ABA inducible protein [Triticum aestivum]
  misc_feature (1)..(180): NCBI GI NO: 25989707 NR Description: LEA3 protein [Triticum aestivum]
  misc_feature (1)..(183): NCBI GI NO: 25989705 NR Description: LEA1 protein [Triticum aestivum]
  misc_feature (1)..(183): NCBI GI NO: 7387828 NR Description: Late embryogenesis abundant protein, group 3
MASNQDKASYRAGEAKAHTEEKAGQVTGAAKDEACDAKDRASGAAGQATGKGQGAVEATKQKAGEAGQKTSETAQAGKDRAAEGKDRTGSYLGHATEGTKQKASEATGYTQDRASDAAQYTKDSAVAGKDKTGSVLSQAGEQVKNAVVGAKDAVASTLGMGGDNTSSATKDASTTETITKSRH

SEQ ID NO: 7490 - DNA, 1706 bp, Glycine max
  misc_feature (1)..(1706): Ceres Seq. ID no. 13595201
aggcaccacacaacacaacttccttgtgcagccaccattattgttgttattggagatttcaattctctgtctttcaaactcctcaagttgggtttatgtgatgatggctctcaacatctcttctccagctgaagtcaagtccatttttttcgctgattccttcaagtctaactgcctcacagcaaaattctcaggtgggtttgcttttaagagaaaagagcgtagagcagcatctggaggacgggtttattgctcagtgcaggcaacaccaccaccaccagcctggccgggacgagcggttccggaacaaggtcgtaagacttgggatggaccaaaacccatttcaattgtggggagtactggttcaattggaactcagacactagatattgtggcagagaatccagataagtttaaagttgtggcacttgcagctggttcaaatgttactcttcttgcagaccaggtaaaaagatttaagcctcaacttgttgctgttagaaatgagtccctaattgctgaacttgaagaggccttgcatgatgttgaagaaaaacctgagatcatccctggagagcagggaatcattgaggttgctcgtcacccagatgcagttagtgtagtcacaggaatagtaggctgtgcaggactgaagccaacmgttgcagcgatagaagcagggaaagacatagctttggccaacaaagagacattgattgctggaggtccttttgttcttcctcttgctcagaagcataatgtaaaaatacttccagctgattcagaacattctgccatctttcagtgtatccaggggttgccagagggtgcacttaggagagttattttaactgcatctggaggtgctttcagggattggccagttgataaactgaaagatgttaaagttgctgatgcattaaaacatcctaactggaatatggggaaaaagataactgtggactctgctaccctttttaataagggtctagaagtaattgaagcacattacttgtttggagctgactacgatcatattgagattgtcattcatccacaatcaatcatacattcaatgattgaaacacaggattcatctgttcttgcacaattggggtggcctgatatgcgtttgccaatcctctatacattatcatggcctgacaggatttattgttctgaagtcacttggccacgccttgatctttgcaagcttggttcacttacatttaaaactccagataatgtaaagtatccatccatgaatcttgcattttctgctggccgtgctggaggcacaatgacaggagttcttagtgcagcaaatgaaaaagctgtagagatgtttattgatgaaaagattagctatttggatatattcaaagttgtggagctaacatgtgagaagcatcaaaatgaattggtatcctctccttcccttgaggaaattattcactatgacctgtgggcgcgaaaatatgctgctagtctgcaagactcttccagcttcactcctattcttgcatgaggatgattaaactagggatgtggctgatgcttcccaattgcctgctttcaccataatttcttcgggcattgaacaatgtagaatggtgcattccacagatgttgaaaattaaataggttttttgtttatggaatgttggtgttttaacacctttcaattgatcttatagttttgtcgt

SEQ ID NO: 7491 - protein, 508 aa, Glycine max
  peptide (1)..(508): Ceres Seq. ID no. 15221510
  misc_feature (114)..(494): Pfam Name: Pfam Description:  1-deoxy-D-xylulose 5-phosphate reductoisomerase
  misc_feature (35)..(507): NCBI GI NO: 15679908 NR Description: 1-deoxy-D-xylulose-5-phosphate reductoisomerase
  misc_feature (34)..(508): NCBI GI NO: 15241970 NR Description: 1-deoxy-D-xylulose 5-phosphate reductoisomerase
  misc_feature (35)..(507): NCBI GI NO: 7621710 NR Description: 1-deoxy-D-xylulose-5-phosphate reductoisomerase
  misc_feature (34)..(508): NCBI GI NO: 9801280 NR Description: putative 1-deoxy-D-xylulose 5-phosphatereductoisomerase
  misc_feature (35)..(506): NCBI GI NO: 34894108 NR Description: 1-deoxy-d-xylulose-5-phosphate reductoisomerase
  misc_feature (35)..(506): NCBI GI NO: 17225989 NR Description: 1-deoxy-D-xylulose 5-phosphate reductoisomeraseprecursor
  misc_feature (35)..(506): NCBI GI NO: 22797429 NR Description: 1-deoxy-D-xylulose 5-phosphate reductoisomerase
  misc_feature (35)..(507): NCBI GI NO: 9800656 NR Description: 1-deoxy-D-xylulose-5-phosphate reductoisomerase
  misc_feature (67)..(508): NCBI GI NO: 34996397 NR Description: putative 1-deoxy-D-xylulose 5-phosphatereductoisomerase
  misc_feature (35)..(507): NCBI GI NO: 8134417 NR Description: 1-deoxy-D-xylulose 5-phosphate reductoisomerase
  misc_feature (220)..(220): Xaa is any aa, unknown or other
GTTQHNFLVQPPLLLLLEISILCLSNSSSWVYVMMALNISSPAEVKSIFFADSFKSNCLTAKFSGGFAFKRKERRAASGGRVYCSVQATPPPPAWPGRAVPEQGRKTWDGPKPISIVGSTGSIGTQTLDIVAENPDKFKVVALAAGSNVTLLADQVKRFKPQLVAVRNESLIAELEEALHDVEEKPEIIPGEQGIIEVARHPDAVSVVTGIVGCAGLKPXVAAIEAGKDIALANKETLIAGGPFVLPLAQKHNVKILPADSEHSAIFQCIQGLPEGALRRVILTASGGAFRDWPVDKLKDVKVADALKHPNWNMGKKITVDSATLFNKGLEVIEAHYLFGADYDHIEIVIHPQSIIHSMIETQDSSVLAQLGWPDMRLPILYTLSWPDRIYCSEVTWPRLDLCKLGSLTFKTPDNVKYPSMNLAFSAGRAGGTMTGVLSAANEKAVEMFIDEKISYLDIFKVVELTCEKHQNELVSSPSLEEIIHYDLWARKYAASLQDSSSFTPILA

SEQ ID NO: 7492 - protein, 475 aa, Glycine max
  peptide (1)..(475): Ceres Seq. ID no. 15221511
  misc_feature (81)..(461): Pfam Name: Pfam Description:  1-deoxy-D-xylulose 5-phosphate reductoisomerase
  misc_feature (2)..(474): NCBI GI NO: 15679908 NR Description: 1-deoxy-D-xylulose-5-phosphate reductoisomerase
  misc_feature (1)..(475): NCBI GI NO: 15241970 NR Description: 1-deoxy-D-xylulose 5-phosphate reductoisomerase
  misc_feature (2)..(474): NCBI GI NO: 7621710 NR Description: 1-deoxy-D-xylulose-5-phosphate reductoisomerase
  misc_feature (1)..(475): NCBI GI NO: 9801280 NR Description: putative 1-deoxy-D-xylulose 5-phosphatereductoisomerase
  misc_feature (2)..(473): NCBI GI NO: 34894108 NR Description: 1-deoxy-d-xylulose-5-phosphate reductoisomerase
  misc_feature (2)..(473): NCBI GI NO: 17225989 NR Description: 1-deoxy-D-xylulose 5-phosphate reductoisomeraseprecursor
  misc_feature (2)..(473): NCBI GI NO: 22797429 NR Description: 1-deoxy-D-xylulose 5-phosphate reductoisomerase
  misc_feature (2)..(474): NCBI GI NO: 9800656 NR Description: 1-deoxy-D-xylulose-5-phosphate reductoisomerase
  misc_feature (34)..(475): NCBI GI NO: 34996397 NR Description: putative 1-deoxy-D-xylulose 5-phosphatereductoisomerase
  misc_feature (2)..(474): NCBI GI NO: 8134417 NR Description: 1-deoxy-D-xylulose 5-phosphate reductoisomerase
  misc_feature (187)..(187): Xaa is any aa, unknown or other
MMALNISSPAEVKSIFFADSFKSNCLTAKFSGGFAFKRKERRAASGGRVYCSVQATPPPPAWPGRAVPEQGRKTWDGPKPISIVGSTGSIGTQTLDIVAENPDKFKVVALAAGSNVTLLADQVKRFKPQLVAVRNESLIAELEEALHDVEEKPEIIPGEQGIIEVARHPDAVSVVTGIVGCAGLKPXVAAIEAGKDIALANKETLIAGGPFVLPLAQKHNVKILPADSEHSAIFQCIQGLPEGALRRVILTASGGAFRDWPVDKLKDVKVADALKHPNWNMGKKITVDSATLFNKGLEVIEAHYLFGADYDHIEIVIHPQSIIHSMIETQDSSVLAQLGWPDMRLPILYTLSWPDRIYCSEVTWPRLDLCKLGSLTFKTPDNVKYPSMNLAFSAGRAGGTMTGVLSAANEKAVEMFIDEKISYLDIFKVVELTCEKHQNELVSSPSLEEIIHYDLWARKYAASLQDSSSFTPILA

SEQ ID NO: 7493 - protein, 474 aa, Glycine max
  peptide (1)..(474): Ceres Seq. ID no. 15221512
  misc_feature (80)..(460): Pfam Name: Pfam Description:  1-deoxy-D-xylulose 5-phosphate reductoisomerase
  misc_feature (1)..(473): NCBI GI NO: 15679908 NR Description: 1-deoxy-D-xylulose-5-phosphate reductoisomerase
  misc_feature (1)..(474): NCBI GI NO: 15241970 NR Description: 1-deoxy-D-xylulose 5-phosphate reductoisomerase
  misc_feature (1)..(473): NCBI GI NO: 7621710 NR Description: 1-deoxy-D-xylulose-5-phosphate reductoisomerase
  misc_feature (1)..(474): NCBI GI NO: 9801280 NR Description: putative 1-deoxy-D-xylulose 5-phosphatereductoisomerase
  misc_feature (1)..(472): NCBI GI NO: 34894108 NR Description: 1-deoxy-d-xylulose-5-phosphate reductoisomerase
  misc_feature (1)..(472): NCBI GI NO: 17225989 NR Description: 1-deoxy-D-xylulose 5-phosphate reductoisomeraseprecursor
  misc_feature (1)..(472): NCBI GI NO: 22797429 NR Description: 1-deoxy-D-xylulose 5-phosphate reductoisomerase
  misc_feature (1)..(473): NCBI GI NO: 9800656 NR Description: 1-deoxy-D-xylulose-5-phosphate reductoisomerase
  misc_feature (33)..(474): NCBI GI NO: 34996397 NR Description: putative 1-deoxy-D-xylulose 5-phosphatereductoisomerase
  misc_feature (1)..(473): NCBI GI NO: 8134417 NR Description: 1-deoxy-D-xylulose 5-phosphate reductoisomerase
  misc_feature (186)..(186): Xaa is any aa, unknown or other
MALNISSPAEVKSIFFADSFKSNCLTAKFSGGFAFKRKERRAASGGRVYCSVQATPPPPAWPGRAVPEQGRKTWDGPKPISIVGSTGSIGTQTLDIVAENPDKFKVVALAAGSNVTLLADQVKRFKPQLVAVRNESLIAELEEALHDVEEKPEIIPGEQGIIEVARHPDAVSVVTGIVGCAGLKPXVAAIEAGKDIALANKETLIAGGPFVLPLAQKHNVKILPADSEHSAIFQCIQGLPEGALRRVILTASGGAFRDWPVDKLKDVKVADALKHPNWNMGKKITVDSATLFNKGLEVIEAHYLFGADYDHIEIVIHPQSIIHSMIETQDSSVLAQLGWPDMRLPILYTLSWPDRIYCSEVTWPRLDLCKLGSLTFKTPDNVKYPSMNLAFSAGRAGGTMTGVLSAANEKAVEMFIDEKISYLDIFKVVELTCEKHQNELVSSPSLEEIIHYDLWARKYAASLQDSSSFTPILA

SEQ ID NO: 7494 - DNA, 1168 bp, Glycine max
  misc_feature (1)..(1168): Ceres Seq. ID no. 13639102
acttgttcttctctagctaccttatcatcataaaaacgagaaacgaatgattcacattagccaaaactaaacgccgctctatttccgtctcattttcactcactatggcttcggatgagaccatgaactttcactcttgttcgttacacgaagatgactttgatgatgatgatgatgatcacccccacaacttgtcgaggctctccgtgtgcactggcagcacctttggtgtcgacgacgatgttgacaatctggcctccatgtgcgtgtcacacttgtccatcgaaagcttcgacgcagatggtgagttatcatccgactcagaaaacgaattgggaagttgttactctctgccctctacgcccccacgaatgaggaaacagcttaaggactatgccagtgacaatgggaatgaaattacaaacaagagtgatccacggagaaggagaagatcctttaggagggagaggtgggggtttgagaagactaagatcaggaaagaggaggggcttagtggggatagtgatcaaagtggtgtcatgctcataactagacccaaaggtggaattaggtctctttgcatggacttggaagaagttaaggcttgtagagatcttggatttgagttggaacacgaacgtatgcttgagatcccttctcgtctctctttttccaattccacacttgacactagcagtggtagcaactctcccatcgccaattggcgtatctctgctccaggtgatgatccacgagacgtgaaggcacggctcaaagtgtgggcgcaggcggtggcacttgcgtctgcctcaaaatacggcacatgaattcaattttcttctaactcgttcttgctttttgttcgattgagactatatgttatagcgtattagtataatataagcctttttgtcttcccactatgattggtggttgtatcattttgttgtagattttaggttgtttttttcccactaggagtgttgaggtttcaggtggaagttcgttttttgagtgatggtcacttttgttctgtacagtagtagtgtttgaataaaatgaagaggccgtgattggagaaagtaaagtagtgtgtgcatagctagtgaaaatatgtagtaccaatgtgaacgcccaaagaaaaaacactggtgaaatttttggattc

SEQ ID NO: 7495 - protein, 240 aa, Glycine max
  peptide (1)..(240): Ceres Seq. ID no. 13639103
  misc_feature (29)..(237): NCBI GI NO: 15228678 NR Description: expressed protein [Arabidopsis thaliana]
  misc_feature (95)..(238): NCBI GI NO: 30678941 NR Description: expressed protein [Arabidopsis thaliana]
  misc_feature (1)..(214): NCBI GI NO: 15226471 NR Description: expressed protein [Arabidopsis thaliana]
  misc_feature (84)..(240): NCBI GI NO: 34902536 NR Description: P0581F09.27
  misc_feature (95)..(213): NCBI GI NO: 25334719 NR Description: hypothetical protein AT4g01670
  misc_feature (155)..(231): NCBI GI NO: 25406874 NR Description: hypothetical protein
  misc_feature (155)..(231): NCBI GI NO: 30689349 NR Description: expressed protein [Arabidopsis thaliana]
  misc_feature (155)..(232): NCBI GI NO: 15221309 NR Description: expressed protein [Arabidopsis thaliana]
  misc_feature (202)..(231): NCBI GI NO: 26451183 NR Description: unknown protein [Arabidopsis thaliana]
  misc_feature (155)..(231): NCBI GI NO: 30684991 NR Description: expressed protein [Arabidopsis thaliana]
MASDETMNFHSCSLHEDDFDDDDDDHPHNLSRLSVCTGSTFGVDDDVDNLASMCVSHLSIESFDADGELSSDSENELGSCYSLPSTPPRMRKQLKDYASDNGNEITNKSDPRRRRRSFRRERWGFEKTKIRKEEGLSGDSDQSGVMLITRPKGGIRSLCMDLEEVKACRDLGFELEHERMLEIPSRLSFSNSTLDTSSGSNSPIANWRISAPGDDPRDVKARLKVWAQAVALASASKYGT

SEQ ID NO: 7496 - protein, 234 aa, Glycine max
  peptide (1)..(234): Ceres Seq. ID no. 13639104
  misc_feature (23)..(231): NCBI GI NO: 15228678 NR Description: expressed protein [Arabidopsis thaliana]
  misc_feature (89)..(232): NCBI GI NO: 30678941 NR Description: expressed protein [Arabidopsis thaliana]
  misc_feature (1)..(208): NCBI GI NO: 15226471 NR Description: expressed protein [Arabidopsis thaliana]
  misc_feature (78)..(234): NCBI GI NO: 34902536 NR Description: P0581F09.27
  misc_feature (89)..(207): NCBI GI NO: 25334719 NR Description: hypothetical protein AT4g01670
  misc_feature (149)..(225): NCBI GI NO: 25406874 NR Description: hypothetical protein
  misc_feature (149)..(225): NCBI GI NO: 30689349 NR Description: expressed protein [Arabidopsis thaliana]
  misc_feature (149)..(226): NCBI GI NO: 15221309 NR Description: expressed protein [Arabidopsis thaliana]
  misc_feature (196)..(225): NCBI GI NO: 26451183 NR Description: unknown protein [Arabidopsis thaliana]
  misc_feature (149)..(225): NCBI GI NO: 30684991 NR Description: expressed protein [Arabidopsis thaliana]
MNFHSCSLHEDDFDDDDDDHPHNLSRLSVCTGSTFGVDDDVDNLASMCVSHLSIESFDADGELSSDSENELGSCYSLPSTPPRMRKQLKDYASDNGNEITNKSDPRRRRRSFRRERWGFEKTKIRKEEGLSGDSDQSGVMLITRPKGGIRSLCMDLEEVKACRDLGFELEHERMLEIPSRLSFSNSTLDTSSGSNSPIANWRISAPGDDPRDVKARLKVWAQAVALASASKYGT

SEQ ID NO: 7497 - protein, 188 aa, Glycine max
  peptide (1)..(188): Ceres Seq. ID no. 13639105
  misc_feature (1)..(185): NCBI GI NO: 15228678 NR Description: expressed protein [Arabidopsis thaliana]
  misc_feature (43)..(186): NCBI GI NO: 30678941 NR Description: expressed protein [Arabidopsis thaliana]
  misc_feature (1)..(162): NCBI GI NO: 15226471 NR Description: expressed protein [Arabidopsis thaliana]
  misc_feature (32)..(188): NCBI GI NO: 34902536 NR Description: P0581F09.27
  misc_feature (43)..(161): NCBI GI NO: 25334719 NR Description: hypothetical protein AT4g01670
  misc_feature (103)..(179): NCBI GI NO: 25406874 NR Description: hypothetical protein
  misc_feature (103)..(179): NCBI GI NO: 30689349 NR Description: expressed protein [Arabidopsis thaliana]
  misc_feature (103)..(180): NCBI GI NO: 15221309 NR Description: expressed protein [Arabidopsis thaliana]
  misc_feature (150)..(179): NCBI GI NO: 26451183 NR Description: unknown protein [Arabidopsis thaliana]
  misc_feature (103)..(179): NCBI GI NO: 30684991 NR Description: expressed protein [Arabidopsis thaliana]
MCVSHLSIESFDADGELSSDSENELGSCYSLPSTPPRMRKQLKDYASDNGNEITNKSDPRRRRRSFRRERWGFEKTKIRKEEGLSGDSDQSGVMLITRPKGGIRSLCMDLEEVKACRDLGFELEHERMLEIPSRLSFSNSTLDTSSGSNSPIANWRISAPGDDPRDVKARLKVWAQAVALASASKYGT

SEQ ID NO: 7498 - DNA, 1221 bp, Glycine max
  misc_feature (1)..(1221): Ceres Seq. ID no. 13505291
aacgtgccctctctcacctcctgcacgttctccctcttttctctcaccatcagaaagcgctttttttttttttttttcttctacctccgtttctccgtctccacatttctccttcacgaactcccgatttttcttcctcttcaatctcgtccctctctgtctctccatccttaaatatacacaacatcttctaaggagaaaggggttccgaaagttacgataaaataaaaatggatccaaacgcggtgaagtccactctctccaatctggcgtttggaaacgtaatggcggcagctgcccgtgattatcagaaggaattgcatgctcaagagaagacacatgcatcaagttcagtacatcaggaggttgaccttgacgagttaatggatgatcctgagttggaaaaattgcatgcagataggattgcagctcttaagaaagaagcagagaaacgggaggaatggaagaagaaaggtcatggagaatttagggaagtaaccgagggtgatttcttaggcgaagtcacaggaagtgaaaaagtgatttgtcacttctaccataaggagttctatagatgcaagataatggataagcatttaaagtctcttgcaccaaagcatatcgatacaaagttcatcaagcttgatgcagagaatgcaccattctttgttacaaaactggctatcaagactttaccctgcgtcatactgttcagacaaggagtagcagtagatagattggtaggatttcaagatgtgggaggtaaagatgattttaccacaagaacgctggaggctctgctgataaagaaaggtataattgaggtgaagaaagctgaggatgatgaagatgatgaatatcaagacagtacacgtagagttgtaagatcctccatgattgctggttctgattctgattctgattaaaattaatcagctggtggcattaaaagaagaatcctctgtttatcttcttcatatccttttggatttcgggcttgtataatctttgctgcacttgtggtttgtttgcttttgggaagtggtttgatgaatccatagcaatcatacagaagctatactgcgctacaactgttgtatgaacctgtccctgtaggaaattgctaacgtttctcgcatccgaggggtatcaaaagttagaacttcatttgtaacagtagaaattgatataggttttctaaaatggatttaattattgttc

SEQ ID NO: 7499 - protein, 231 aa, Glycine max
  peptide (1)..(231): Ceres Seq. ID no. 13505292
  misc_feature (1)..(229): NCBI GI NO: 30693386 NR Description: expressed protein [Arabidopsis thaliana]
  misc_feature (1)..(231): NCBI GI NO: 18425069 NR Description: expressed protein [Arabidopsis thaliana]
  misc_feature (1)..(231): NCBI GI NO: 10177522 NR Description: contains similarity to ATP binding proteinassociated with cell differentiation~gene_id:K1F13
  misc_feature (19)..(229): NCBI GI NO: 7485705 NR Description: hypothetical protein F18B3
  misc_feature (35)..(188): NCBI GI NO: 25286717 NR Description: ATP binding protein associated with celldifferentiation
  misc_feature (35)..(188): NCBI GI NO: 25282435 NR Description: ES cell-related protein; ATP binding protein
  misc_feature (37)..(231): NCBI GI NO: 18104959 NR Description: ATP binding protein associated with celldifferentiation
  misc_feature (37)..(200): NCBI GI NO: 19683948 NR Description: Similar to ATP binding protein associated with celldifferentiation
  misc_feature (19)..(231): NCBI GI NO: 28277604 NR Description: Similar to ATP binding protein associated with celldifferentiation
  misc_feature (37)..(188): NCBI GI NO: 2342477 NR Description: ATP binding protein [Homo sapiens]
MDPNAVKSTLSNLAFGNVMAAAARDYQKELHAQEKTHASSSVHQEVDLDELMDDPELEKLHADRIAALKKEAEKREEWKKKGHGEFREVTEGDFLGEVTGSEKVICHFYHKEFYRCKIMDKHLKSLAPKHIDTKFIKLDAENAPFFVTKLAIKTLPCVILFRQGVAVDRLVGFQDVGGKDDFTTRTLEALLIKKGIIEVKKAEDDEDDEYQDSTRRVVRSSMIAGSDSDSD

SEQ ID NO: 7500 - protein, 213 aa, Glycine max
  peptide (1)..(213): Ceres Seq. ID no. 13505293
  misc_feature (1)..(211): NCBI GI NO: 30693386 NR Description: expressed protein [Arabidopsis thaliana]
  misc_feature (1)..(213): NCBI GI NO: 18425069 NR Description: expressed protein [Arabidopsis thaliana]
  misc_feature (1)..(213): NCBI GI NO: 10177522 NR Description: contains similarity to ATP binding proteinassociated with cell differentiation~gene_id:K1F13
  misc_feature (1)..(211): NCBI GI NO: 7485705 NR Description: hypothetical protein F18B3
  misc_feature (17)..(170): NCBI GI NO: 25286717 NR Description: ATP binding protein associated with celldifferentiation
  misc_feature (17)..(170): NCBI GI NO: 25282435 NR Description: ES cell-related protein; ATP binding protein
  misc_feature (19)..(213): NCBI GI NO: 18104959 NR Description: ATP binding protein associated with celldifferentiation
  misc_feature (19)..(182): NCBI GI NO: 19683948 NR Description: Similar to ATP binding protein associated with celldifferentiation
  misc_feature (1)..(213): NCBI GI NO: 28277604 NR Description: Similar to ATP binding protein associated with celldifferentiation
  misc_feature (19)..(170): NCBI GI NO: 2342477 NR Description: ATP binding protein [Homo sapiens]
MAAAARDYQKELHAQEKTHASSSVHQEVDLDELMDDPELEKLHADRIAALKKEAEKREEWKKKGHGEFREVTEGDFLGEVTGSEKVICHFYHKEFYRCKIMDKHLKSLAPKHIDTKFIKLDAENAPFFVTKLAIKTLPCVILFRQGVAVDRLVGFQDVGGKDDFTTRTLEALLIKKGIIEVKKAEDDEDDEYQDSTRRVVRSSMIAGSDSDSD

SEQ ID NO: 7501 - protein, 180 aa, Glycine max
  peptide (1)..(180): Ceres Seq. ID no. 13505294
  misc_feature (1)..(178): NCBI GI NO: 30693386 NR Description: expressed protein [Arabidopsis thaliana]
  misc_feature (1)..(180): NCBI GI NO: 18425069 NR Description: expressed protein [Arabidopsis thaliana]
  misc_feature (1)..(180): NCBI GI NO: 10177522 NR Description: contains similarity to ATP binding proteinassociated with cell differentiation~gene_id:K1F13
  misc_feature (1)..(178): NCBI GI NO: 7485705 NR Description: hypothetical protein F18B3
  misc_feature (1)..(137): NCBI GI NO: 25286717 NR Description: ATP binding protein associated with celldifferentiation
  misc_feature (1)..(137): NCBI GI NO: 25282435 NR Description: ES cell-related protein; ATP binding protein
  misc_feature (1)..(180): NCBI GI NO: 18104959 NR Description: ATP binding protein associated with celldifferentiation
  misc_feature (1)..(149): NCBI GI NO: 19683948 NR Description: Similar to ATP binding protein associated with celldifferentiation
  misc_feature (1)..(180): NCBI GI NO: 28277604 NR Description: Similar to ATP binding protein associated with celldifferentiation
  misc_feature (1)..(137): NCBI GI NO: 2342477 NR Description: ATP binding protein [Homo sapiens]
MDDPELEKLHADRIAALKKEAEKREEWKKKGHGEFREVTEGDFLGEVTGSEKVICHFYHKEFYRCKIMDKHLKSLAPKHIDTKFIKLDAENAPFFVTKLAIKTLPCVILFRQGVAVDRLVGFQDVGGKDDFTTRTLEALLIKKGIIEVKKAEDDEDDEYQDSTRRVVRSSMIAGSDSDSD

SEQ ID NO: 7502 - DNA, 1064 bp, Glycine max
  misc_feature (1)..(1064): Ceres Seq. ID no. 14302012
agcactttcgccgctgctctccgctttcatagggtttatctctttcctcttcccctctcgcgcacggcagccggattccctaccgcaggcgagccaccacgccggccggagctcggagataaggtagttgtttagcaagcaatcgagaatgtcgtcggtgcagctctccggtgccggtgttgccacggtggccttcaacaacactggtctgcgcccctctcaggcgtcagcagtcagagtgtgctcatcgaggcgctcatctcgtagcctcgttgtcagggctgccactgtcgtcaccccgaagtatacatcactcaagcctctgggagacagagtgcttgtgaagcttagcgcagctgaggagaagaccattggtggaattttgcttccatcctccgcgcagtccaagcctcagggaggcgagattgttgctgttggagggggtagaaccattggggataagaaggtggaggtcagcataccgactggatctcaagttgtatattcaaagtatgctggtactgaggttgaatacaacaactccaagcatcttattatgaaagaggatgacatcataggtattcttgaatctgatgatgtcaaagacatgaagcctctcaatgaccggattctcatcaaggttgcagaggcttcagacaagactgaagctggtcttatcctcaccgagacaaccaaggagaagccatccattggaacagtcgtagctgttggtccgggctctcttgacgaggaaggcaagaggcagccattgccagtgtcaccaggcagcaccgtgctgtactccaagtacgcaggcggcgagttcaagggagctgatggcacgaactacattgtgttgagagtgtctgatgtgatggctgagctctcttaagtgtgtggtttattactttgtttcagttttgagttcacgatataggctagcatgagtggtaagattgctatgtgataaccacttgatgctgtttcggatgattacggaattgtacgagcaaacctgttgtctgggataaaaacatttactgaatttgtttacaaagggagcc

SEQ ID NO: 7503 - protein, 247 aa, Glycine max
  peptide (1)..(247): Ceres Seq. ID no. 14302013
  misc_feature (152)..(247): Pfam Name: Pfam Description:  Chaperonin 10 Kd subunit
  misc_feature (1)..(247): NCBI GI NO: 15242045 NR Description: chloroplast Cpn21 protein [Arabidopsis thaliana]
  misc_feature (1)..(247): NCBI GI NO: 25453528 NR Description: chaperonin 10 [imported] - Arabidopsis thaliana
  misc_feature (1)..(247): NCBI GI NO: 7331143 NR Description: chaperonin 21 precursor [Lycopersicon esculentum]
  misc_feature (1)..(247): NCBI GI NO: 21780187 NR Description: cp10-like protein [Gossypium hirsutum]
  misc_feature (19)..(247): NCBI GI NO: 399241 NR Description: 20 kDa chaperonin, chloroplast precursor
  misc_feature (56)..(147): NCBI GI NO: 2493659 NR Description: 10 kDa chaperonin (Protein Cpn10) (groES protein)
  misc_feature (56)..(147): NCBI GI NO: 20807075 NR Description: Co-chaperonin GroES (HSP10)
  misc_feature (151)..(244): NCBI GI NO: 22297730 NR Description: 10kD chaperonin
  misc_feature (55)..(147): NCBI GI NO: 23474135 NR Description: hypothetical protein
  misc_feature (56)..(147): NCBI GI NO: 15895961 NR Description: Co-chaperonin GroES, HSP10 family
MSSVQLSGAGVATVAFNNTGLRPSQASAVRVCSSRRSSRSLVVRAATVVTPKYTSLKPLGDRVLVKLSAAEEKTIGGILLPSSAQSKPQGGEIVAVGGGRTIGDKKVEVSIPTGSQVVYSKYAGTEVEYNNSKHLIMKEDDIIGILESDDVKDMKPLNDRILIKVAEASDKTEAGLILTETTKEKPSIGTVVAVGPGSLDEEGKRQPLPVSPGSTVLYSKYAGGEFKGADGTNYIVLRVSDVMAELS

SEQ ID NO: 7504 - DNA, 1497 bp, Glycine max
  misc_feature (1)..(1497): Ceres Seq. ID no. 13582369
atctatctctcttcgaatcccctcccccttaacaagttagcactcatgattccctcttcactccgatccactcgcatataacaacccttatttctccattgcaaggttcataaaagcacaggaatggaattaagcgcggagtattttaaaattcataacgatgtagacttatttttttaagaaaatctaaatgtataccgtattatttttacaaaaagaacgaacttggatgagcccgttttttctaacccttataagaaagtatgagtggttgaattagaaaaaattaatagcggcatcacatcgaagctcaatagttaatagcggcctctcgccggcaagaggtggtcgcagcggtggttctgagcattgggagctgacagtggcagcaccgttgctttctgtttcagtttattttaattgatttgtgccttcttgcttctccgtcctcgtcaaggtgtccatggctgaagattcaaggaaacgcacattggaggctttggagagaagaatagcttttgctaaagttgaagttctccaaaaagaaaagaaaaacaaaaagactataaatgaagatgggaaactacctattcctgcagattctacttctaatgatccttccccacatttgttgcattcatcatcagtctcatccaagaaagggaatttcagtttctctggtcataccactttgcaagacattgaagatggtccagcatatgcccaactttctgtgcctgtaaatggaaatctgctcacaactaatgaggagttttctgctgaaagaggaggttcaattgatggcatattgcatgagcttcttcagaagggagatgcagcacataagtacatgcaaggatctagaaacatgaaaattgacaactggatccttcttgataattatgtacaaggacgggtgctttcctctggttctcaagctagggctttgcaacttcattcaaaacgctctaagaaacacatgtctatgaaacggcataagaaggatggatcattagatcttcctcaagagttccagaaatttgatattttcaagccaatgcacgaaatgtggaaagattacataatgttgcttcttaaatccactgggaaaaatcaattggctcaatgtctccttggtgcagatctacatggtgcttttattttagttgtggagtgtaaaataacccattttactggaatttgtggcatcatgattcgtgaaactgcagaagcatttgggataattactgaagataataaattccgagttgttcccaaaaaggtttctgtgtttgtattccaagttgattgctggaaagtcactctgcatggagataaacttggttcaagaaaggttggattatgatattggtgataatccttcaactgtagaatatccacgtgacacctgtgcaatttgaaagtcccaagcagtctatgggagaaagggaaaagtttgattgctgatttgtatcagtagagaagttggaggttgct

SEQ ID NO: 7505 - protein, 300 aa, Glycine max
  peptide (1)..(300): Ceres Seq. ID no. 13582370
  misc_feature (216)..(296): Pfam Name: Pfam Description:  Domain of unknown function UPF0086
  misc_feature (1)..(296): NCBI GI NO: 18406178 NR Description: expressed protein [Arabidopsis thaliana]
  misc_feature (1)..(296): NCBI GI NO: 30689290 NR Description: expressed protein [Arabidopsis thaliana]
  misc_feature (1)..(233): NCBI GI NO: 25370825 NR Description: hypothetical protein At2g43190
  misc_feature (233)..(275): NCBI GI NO: 25370825 NR Description: hypothetical protein At2g43190
  misc_feature (167)..(296): NCBI GI NO: 34855765 NR Description: similar to POP4 (processing of precursor , S
  misc_feature (167)..(296): NCBI GI NO: 13384772 NR Description: RIKEN cDNA 1110023P21 [Mus musculus]
  misc_feature (167)..(296): NCBI GI NO: 4309676 NR Description: ribonuclease P protein subunit p29 [Homo sapiens]
  misc_feature (167)..(296): NCBI GI NO: 5729986 NR Description: POP4 (processing of precursor , S
  misc_feature (154)..(296): NCBI GI NO: 39579971 NR Description: Hypothetical protein CBG23842
  misc_feature (165)..(296): NCBI GI NO: 21430298 NR Description: LD45688p [Drosophila melanogaster]
MAEDSRKRTLEALERRIAFAKVEVLQKEKKNKKTINEDGKLPIPADSTSNDPSPHLLHSSSVSSKKGNFSFSGHTTLQDIEDGPAYAQLSVPVNGNLLTTNEEFSAERGGSIDGILHELLQKGDAAHKYMQGSRNMKIDNWILLDNYVQGRVLSSGSQARALQLHSKRSKKHMSMKRHKKDGSLDLPQEFQKFDIFKPMHEMWKDYIMLLLKSTGKNQLAQCLLGADLHGAFILVVECKITHFTGICGIMIRETAEAFGIITEDNKFRVVPKKVSVFVFQVDCWKVTLHGDKLGSRKVGL

SEQ ID NO: 7506 - protein, 171 aa, Glycine max
  peptide (1)..(171): Ceres Seq. ID no. 13582371
  misc_feature (87)..(167): Pfam Name: Pfam Description:  Domain of unknown function UPF0086
  misc_feature (1)..(167): NCBI GI NO: 18406178 NR Description: expressed protein [Arabidopsis thaliana]
  misc_feature (1)..(167): NCBI GI NO: 30689290 NR Description: expressed protein [Arabidopsis thaliana]
  misc_feature (1)..(104): NCBI GI NO: 25370825 NR Description: hypothetical protein At2g43190
  misc_feature (104)..(146): NCBI GI NO: 25370825 NR Description: hypothetical protein At2g43190
  misc_feature (38)..(167): NCBI GI NO: 34855765 NR Description: similar to POP4 (processing of precursor , S
  misc_feature (38)..(167): NCBI GI NO: 13384772 NR Description: RIKEN cDNA 1110023P21 [Mus musculus]
  misc_feature (38)..(167): NCBI GI NO: 4309676 NR Description: ribonuclease P protein subunit p29 [Homo sapiens]
  misc_feature (38)..(167): NCBI GI NO: 5729986 NR Description: POP4 (processing of precursor , S
  misc_feature (25)..(167): NCBI GI NO: 39579971 NR Description: Hypothetical protein CBG23842
  misc_feature (36)..(167): NCBI GI NO: 21430298 NR Description: LD45688p [Drosophila melanogaster]
MQGSRNMKIDNWILLDNYVQGRVLSSGSQARALQLHSKRSKKHMSMKRHKKDGSLDLPQEFQKFDIFKPMHEMWKDYIMLLLKSTGKNQLAQCLLGADLHGAFILVVECKITHFTGICGIMIRETAEAFGIITEDNKFRVVPKKVSVFVFQVDCWKVTLHGDKLGSRKVGL

SEQ ID NO: 7507 - protein, 165 aa, Glycine max
  peptide (1)..(165): Ceres Seq. ID no. 13582372
  misc_feature (81)..(161): Pfam Name: Pfam Description:  Domain of unknown function UPF0086
  misc_feature (1)..(161): NCBI GI NO: 18406178 NR Description: expressed protein [Arabidopsis thaliana]
  misc_feature (1)..(161): NCBI GI NO: 30689290 NR Description: expressed protein [Arabidopsis thaliana]
  misc_feature (1)..(98): NCBI GI NO: 25370825 NR Description: hypothetical protein At2g43190
  misc_feature (98)..(140): NCBI GI NO: 25370825 NR Description: hypothetical protein At2g43190
  misc_feature (32)..(161): NCBI GI NO: 34855765 NR Description: similar to POP4 (processing of precursor , S
  misc_feature (32)..(161): NCBI GI NO: 13384772 NR Description: RIKEN cDNA 1110023P21 [Mus musculus]
  misc_feature (32)..(161): NCBI GI NO: 4309676 NR Description: ribonuclease P protein subunit p29 [Homo sapiens]
  misc_feature (32)..(161): NCBI GI NO: 5729986 NR Description: POP4 (processing of precursor , S
  misc_feature (19)..(161): NCBI GI NO: 39579971 NR Description: Hypothetical protein CBG23842
  misc_feature (30)..(161): NCBI GI NO: 21430298 NR Description: LD45688p [Drosophila melanogaster]
MKIDNWILLDNYVQGRVLSSGSQARALQLHSKRSKKHMSMKRHKKDGSLDLPQEFQKFDIFKPMHEMWKDYIMLLLKSTGKNQLAQCLLGADLHGAFILVVECKITHFTGICGIMIRETAEAFGIITEDNKFRVVPKKVSVFVFQVDCWKVTLHGDKLGSRKVGL

SEQ ID NO: 7508 - DNA, 983 bp, Glycine max
  misc_feature (1)..(983): Ceres Seq. ID no. 13595495
atctttcattcgtgcctgaagcagcagccattgcccattgctaaccagagtggagtggtagagcagttcgagtttgcttttctctcttgcttgattgatcggtgcctcgatccatcgttcgtcggaggtgcatatagttagcgaggaattctccggccggccaccggcgacgacgaccgcaagtgatccgtgaggatggtgaacacgacggcggctatggtgagcggcggcggcaagggcggcgtgctgccgctggcgtccctgaaccacatcagcatagtgtgcaggtcggtggaggagtcgctcgacttctacatgaacgtcctcgggttcacccccatccgccgccccggctctttcgacttcgacggcgcatggctgttcaactacgggatcggcatccacctgctgcagtcggagcatcccgagagcttaccggcgaagaaggagatcaaccccaaggataaccacatctccttccagtgcgagagcatggtggcggtggagcggcggctcaaggagctgggcatcccgtacatccagcggtgcgtggaggagggcggcatctacgtcgaccagatcttcttccacgaccccgacggcttcatgatcgagatctgcaactgcgacaagctcccggtcgtcccgctcgccggccagaccttcgccatggccgcctgcaagagggtcgcctccgtcaagcaacagcagctgcccatgccagtcgcacaagtagcgcaagcaacccccgctccggcggcggccgcggcttcgcagtgcattccggcgccgaacccggccttgcagcgcgtcggcggcgaggaggcggcgcatatctcgtgcgcgtgaggggtggggggccggggtagccaggccgcccaactggtgggtggcgcgctccgtggagttgtggtttttgtacattgtgatatgacattgtgcgtatgaataaagcgagaggagcagagtgtagtttcagcttc

SEQ ID NO: 7509 - protein, 217 aa, Glycine max
  peptide (1)..(217): Ceres Seq. ID no. 15221592
  misc_feature (22)..(141): Pfam Name: Pfam Description:  Glyoxalase/Bleomycin resistance protein/Dioxygenasesuperfamily
  misc_feature (1)..(208): NCBI GI NO: 34910246 NR Description: OSJNBa0089K24.9
  misc_feature (15)..(177): NCBI GI NO: 18412683 NR Description: glyoxalase family protein
  misc_feature (15)..(177): NCBI GI NO: 25406639 NR Description: hypothetical protein F18B13.24
  misc_feature (15)..(182): NCBI GI NO: 18394235 NR Description: glyoxalase family protein
  misc_feature (19)..(151): NCBI GI NO: 18401734 NR Description: glyoxalase family protein
  misc_feature (19)..(151): NCBI GI NO: 15529260 NR Description: At2g28420/T1B3.6 [Arabidopsis thaliana]
  misc_feature (18)..(154): NCBI GI NO: 34395261 NR Description: glyoxalase family-like protein
  misc_feature (18)..(154): NCBI GI NO: 34899038 NR Description: hypothetical protein~similar to Arabidopsisthaliana chromosome 2
  misc_feature (20)..(140): NCBI GI NO: 33146737 NR Description: unknown protein
  misc_feature (20)..(140): NCBI GI NO: 34899880 NR Description: OJ1714_H10.23
MVNTTAAMVSGGGKGGVLPLASLNHISIVCRSVEESLDFYMNVLGFTPIRRPGSFDFDGAWLFNYGIGIHLLQSEHPESLPAKKEINPKDNHISFQCESMVAVERRLKELGIPYIQRCVEEGGIYVDQIFFHDPDGFMIEICNCDKLPVVPLAGQTFAMAACKRVASVKQQQLPMPVAQVAQATPAPAAAAASQCIPAPNPALQRVGGEEAAHISCA

SEQ ID NO: 7510 - protein, 210 aa, Glycine max
  peptide (1)..(210): Ceres Seq. ID no. 15221593
  misc_feature (15)..(134): Pfam Name: Pfam Description:  Glyoxalase/Bleomycin resistance protein/Dioxygenasesuperfamily
  misc_feature (1)..(201): NCBI GI NO: 34910246 NR Description: OSJNBa0089K24.9
  misc_feature (8)..(170): NCBI GI NO: 18412683 NR Description: glyoxalase family protein
  misc_feature (8)..(170): NCBI GI NO: 25406639 NR Description: hypothetical protein F18B13.24
  misc_feature (8)..(175): NCBI GI NO: 18394235 NR Description: glyoxalase family protein
  misc_feature (12)..(144): NCBI GI NO: 18401734 NR Description: glyoxalase family protein
  misc_feature (12)..(144): NCBI GI NO: 15529260 NR Description: At2g28420/T1B3.6 [Arabidopsis thaliana]
  misc_feature (11)..(147): NCBI GI NO: 34395261 NR Description: glyoxalase family-like protein
  misc_feature (11)..(147): NCBI GI NO: 34899038 NR Description: hypothetical protein~similar to Arabidopsisthaliana chromosome 2
  misc_feature (13)..(133): NCBI GI NO: 33146737 NR Description: unknown protein
  misc_feature (13)..(133): NCBI GI NO: 34899880 NR Description: OJ1714_H10.23
MVSGGGKGGVLPLASLNHISIVCRSVEESLDFYMNVLGFTPIRRPGSFDFDGAWLFNYGIGIHLLQSEHPESLPAKKEINPKDNHISFQCESMVAVERRLKELGIPYIQRCVEEGGIYVDQIFFHDPDGFMIEICNCDKLPVVPLAGQTFAMAACKRVASVKQQQLPMPVAQVAQATPAPAAAAASQCIPAPNPALQRVGGEEAAHISCA

SEQ ID NO: 7511 - protein, 177 aa, Glycine max
  peptide (1)..(177): Ceres Seq. ID no. 15221594
  misc_feature (1)..(101): Pfam Name: Pfam Description:  Glyoxalase/Bleomycin resistance protein/Dioxygenasesuperfamily
  misc_feature (1)..(168): NCBI GI NO: 34910246 NR Description: OSJNBa0089K24.9
  misc_feature (1)..(137): NCBI GI NO: 18412683 NR Description: glyoxalase family protein
  misc_feature (1)..(137): NCBI GI NO: 25406639 NR Description: hypothetical protein F18B13.24
  misc_feature (1)..(142): NCBI GI NO: 18394235 NR Description: glyoxalase family protein
  misc_feature (1)..(111): NCBI GI NO: 18401734 NR Description: glyoxalase family protein
  misc_feature (1)..(111): NCBI GI NO: 15529260 NR Description: At2g28420/T1B3.6 [Arabidopsis thaliana]
  misc_feature (1)..(114): NCBI GI NO: 34395261 NR Description: glyoxalase family-like protein
  misc_feature (1)..(114): NCBI GI NO: 34899038 NR Description: hypothetical protein~similar to Arabidopsisthaliana chromosome 2
  misc_feature (1)..(100): NCBI GI NO: 33146737 NR Description: unknown protein
  misc_feature (1)..(100): NCBI GI NO: 34899880 NR Description: OJ1714_H10.23
MNVLGFTPIRRPGSFDFDGAWLFNYGIGIHLLQSEHPESLPAKKEINPKDNHISFQCESMVAVERRLKELGIPYIQRCVEEGGIYVDQIFFHDPDGFMIEICNCDKLPVVPLAGQTFAMAACKRVASVKQQQLPMPVAQVAQATPAPAAAAASQCIPAPNPALQRVGGEEAAHISCA

SEQ ID NO: 7512 - DNA, 1089 bp, Glycine max
  misc_feature (1)..(1089): Ceres Seq. ID no. 12611159
ctcccattcttctcgtgtgtcctcctccatatcgctctttttttttctttatttctttttactctttctctaacacttgcttattatatatatcatccccacctaggttcttccgtttttgtagctggggtttataccctttgaggtttgaaaggaaatccaagcaaaggtagaaagaatgaggaagcctagttgtgatatcaaagaattgaacaaaggagcttggtccaaacaagaagaccagaaactcgtagattatatcaagaaacatggtgaagtttgttggcgtacactcccccaggctgcaggtttacatcggtgtggtaaaagttgtaggctgagatggataaactatctacgtccagacctcaaaagaggcaactttgctgaagatgaagaagatctcatcatcaagcttcatgccctgctaggcaaccggtggtcactaatagctgggagattgcctggacgtacagataatgaagtgaagaattattggaattctcatataagaaaaaagcttattagcaatggcattgacccaaataatcatagattaaaccatacaatcccttccgtttatcagaatccacctatgtctgatgatagttcaaaacactttggcatgaaagacaataatagcaagaacgagacaagcaaatcacctcgtgtttacaaccatggtgaagtctcagatgctgcgagtggtgaggctgagtcatcatgtgcattgccagatttaaaccttgatctctctatttgcgaaaaaaatctaaaaccatttcacgaatctaagttgtcgaggaaagtgccatttgattccccttctacacttcttctgtttcagtaattaatcaatcaacatcgaccttggcttgaatatggtgattcagcaaatcgtcatgtggagacgcatgcaagtgtgttgtgatatatagtatattgagatcttaattatcgacatggaaaaggacttagcttgtgtttcattttgaagaatgaaagccctcaactagctagaaagaatgttggcttatgctttgttacaaccttgcaatggcatacaattggcaaacattaattgctgct

SEQ ID NO: 7513 - protein, 223 aa, Glycine max
  peptide (1)..(223): Ceres Seq. ID no. 12611160
  misc_feature (13)..(60): Pfam Name: Pfam Description:  Myb-like DNA-binding domain
  misc_feature (1)..(194): NCBI GI NO: 23476311 NR Description: myb-like transcription factor 6
  misc_feature (1)..(194): NCBI GI NO: 23476313 NR Description: myb-like transcription factor 6
  misc_feature (1)..(194): NCBI GI NO: 7446161 NR Description: myb-related protein - upland cotton
  misc_feature (12)..(223): NCBI GI NO: 23476317 NR Description: myb-like transcription factor 6
  misc_feature (2)..(194): NCBI GI NO: 2129933 NR Description: myb-related protein TMH27 - tomato
  misc_feature (2)..(194): NCBI GI NO: 30687964 NR Description: myb family transcription factor
  misc_feature (2)..(207): NCBI GI NO: 82308 NR Description: myb-related protein 308 - garden snapdragon
  misc_feature (2)..(194): NCBI GI NO: 39725415 NR Description: MYB transcription factor [Eucalyptus gunnii]
  misc_feature (11)..(194): NCBI GI NO: 11273984 NR Description: probable transcription factor MYB3
  misc_feature (2)..(194): NCBI GI NO: 15233894 NR Description: myb family transcription factor
MRKPSCDIKELNKGAWSKQEDQKLVDYIKKHGEVCWRTLPQAAGLHRCGKSCRLRWINYLRPDLKRGNFAEDEEDLIIKLHALLGNRWSLIAGRLPGRTDNEVKNYWNSHIRKKLISNGIDPNNHRLNHTIPSVYQNPPMSDDSSKHFGMKDNNSKNETSKSPRVYNHGEVSDAASGEAESSCALPDLNLDLSICEKNLKPFHESKLSRKVPFDSPSTLLLFQ

SEQ ID NO: 7514 - DNA, 913 bp, Glycine max
  misc_feature (1)..(913): Ceres Seq. ID no. 14302544
ccgtctctgatctcttatcactcactctctctctcccctaactcgccaagcagctacaatggccgttaccttctcagatctacacacagagcagggtgtcaagtccgtggaggagcacctcgccggaaaaacctacatctccggagatcagttgactgtggatgatgtgaaggtatacgctgccatcgtggagaaaccgagcgatgccttccctaatgctagcaagtggtacgattccgtcgcgtcccaccttgctaaaagtttccctggtaaggccgtaggagtttcaatcggtggctctgctgcttctgctcctgctcaagctgaggcacctgcagctgtagctgatgatgatgatgacatggatctgtttggtgacgagaccgaggaggaaaagaaagccgcagaggagagggaggcttctaagaaggacaccaagaagcccaaagagagtggaaagtcatctgtgctcatggaggtcaagccatgggatgacgagactgacatgaagaaacttgaggagtgtgtccgcgctgttgagatgcctggtcttctatggggagcttcaaaactggttccagttggttacgggatcaagaagctcactatcatgctcacaattgttgatgacctcgtgtccccggacaatctcatcgaagactacctcacctgtgagcctaacaacgagtacatccagagtgttgacatcgtcgcattcaacaagatctagagactttaagttgtctccctaccaaaagatacttgatttccttccaagttttgttctttttttttgtgttgttttgcttgagatgtttattttctagtagcaagacctctttcatgttgcagaaaacataaactatcaacgctttactattccttttgccattactaaaaaaaaaaaaaaaac

SEQ ID NO: 7515 - protein, 223 aa, Glycine max
  peptide (1)..(223): Ceres Seq. ID no. 14302545
  misc_feature (134)..(223): Pfam Name: Pfam Description:  EF-1 guanine nucleotide exchange domain
  misc_feature (1)..(223): NCBI GI NO: 30687350 NR Description: elongation factor 1B alpha-subunit
  misc_feature (1)..(223): NCBI GI NO: 15239877 NR Description: elongation factor 1B alpha-subunit (emb|CAB64729
  misc_feature (19)..(223): NCBI GI NO: 27754711 NR Description: putative elongation factor 1B alpha-subunit
  misc_feature (1)..(223): NCBI GI NO: 38175744 NR Description: putative translation elongation factor eEF-1 beta'chain
  misc_feature (1)..(223): NCBI GI NO: 232031 NR Description: ELONGATION FACTOR 1-BETA' (EF-1-BETA')
  misc_feature (1)..(223): NCBI GI NO: 34899162 NR Description: putative translation elongation factor eEF-1 beta'chain
  misc_feature (1)..(223): NCBI GI NO: 232033 NR Description: ELONGATION FACTOR 1-BETA' (EF-1-BETA')
  misc_feature (1)..(223): NCBI GI NO: 6015064 NR Description: ELONGATION FACTOR 1-BETA (EF-1-BETA)
  misc_feature (1)..(223): NCBI GI NO: 38232568 NR Description: translational elongation factor 1 subunit Bbeta
  misc_feature (1)..(223): NCBI GI NO: 6166140 NR Description: ELONGATION FACTOR 1-BETA (EF-1-BETA)
MAVTFSDLHTEQGVKSVEEHLAGKTYISGDQLTVDDVKVYAAIVEKPSDAFPNASKWYDSVASHLAKSFPGKAVGVSIGGSAASAPAQAEAPAAVADDDDDMDLFGDETEEEKKAAEEREASKKDTKKPKESGKSSVLMEVKPWDDETDMKKLEECVRAVEMPGLLWGASKLVPVGYGIKKLTIMLTIVDDLVSPDNLIEDYLTCEPNNEYIQSVDIVAFNKI

SEQ ID NO: 7516 - protein, 122 aa, Glycine max
  peptide (1)..(122): Ceres Seq. ID no. 14302546
  misc_feature (33)..(122): Pfam Name: Pfam Description:  EF-1 guanine nucleotide exchange domain
  misc_feature (1)..(122): NCBI GI NO: 30687350 NR Description: elongation factor 1B alpha-subunit
  misc_feature (1)..(122): NCBI GI NO: 15239877 NR Description: elongation factor 1B alpha-subunit (emb|CAB64729
  misc_feature (1)..(122): NCBI GI NO: 27754711 NR Description: putative elongation factor 1B alpha-subunit
  misc_feature (1)..(122): NCBI GI NO: 38175744 NR Description: putative translation elongation factor eEF-1 beta'chain
  misc_feature (1)..(122): NCBI GI NO: 232031 NR Description: ELONGATION FACTOR 1-BETA' (EF-1-BETA')
  misc_feature (1)..(122): NCBI GI NO: 34899162 NR Description: putative translation elongation factor eEF-1 beta'chain
  misc_feature (1)..(122): NCBI GI NO: 232033 NR Description: ELONGATION FACTOR 1-BETA' (EF-1-BETA')
  misc_feature (1)..(122): NCBI GI NO: 6015064 NR Description: ELONGATION FACTOR 1-BETA (EF-1-BETA)
  misc_feature (1)..(122): NCBI GI NO: 38232568 NR Description: translational elongation factor 1 subunit Bbeta
  misc_feature (1)..(122): NCBI GI NO: 6166140 NR Description: ELONGATION FACTOR 1-BETA (EF-1-BETA)
MDLFGDETEEEKKAAEEREASKKDTKKPKESGKSSVLMEVKPWDDETDMKKLEECVRAVEMPGLLWGASKLVPVGYGIKKLTIMLTIVDDLVSPDNLIEDYLTCEPNNEYIQSVDIVAFNKI

SEQ ID NO: 7517 - DNA, 1268 bp, Glycine max
  misc_feature (1)..(1268): Ceres Seq. ID no. 14302757
agaaaagagttgtttcagtttcgagcgcaaacaagaatgaagggagattggttggaattggagttggagaaggaaataggagacgccatttcccgaacccgattcgcgccccactctaacaccctcctcatctcttcttgggactccagtcttcgcctcttcgacgtcgacgcctctctcctcagactccaagctccctcgcaagctcccctcctcgattgctgcttccaggacgacgctgtggccttcgccgccgcctctgatggactaatccgaaggtatgacttgcattcaggacttgttgatacactgggtagtcacgatgatatggcaacatgtattggatattccaatgaaacatgtcagttggtcacatccggatttgacaaaaagttactgttatgggacatgcatatgaagaagacttctttatgtttgagaagtctagatgcagaggtggactccatgtctgtctctggatttaatgttaccgtagccattggagcatcaatgcttgtttatgatttacgttactttgaccaaccagttgagtcaaaagaggcattcaatggaacacacttaagatgtgtcagttcaattccagatgcagaaggattcgcagttgggtctgtagacggacgagtatcactgcagatttccaatccattcagttcaaacgacattagatatatattccggtgtcatccaaaatcaaaggatggacggcattatttggtatcagtgaacgacattgcattcagtccacttgtatctggtgcctttgccactggtgacaatgaaggttatgttaccatatgggatgctggaagtaggagaagactagttgagttgcccaggtatccaaatagtgttgcatccttatcatacaaccacacaggtcagcttctggctgtagcatcaagccatacttaccaagaagcaaaggaaatagaaaaaccacctcgtatattcatccatagagtggacaacattgatattggatcaatttctgctagtaagagaagttgaagcacttatgctatgcttgctgacgaagatttgtgtcatcagagacacaagtggaggcaccggtgaagaaaatagatgctctttaaaaagggatactgggagatcaagaaaaatattggaggaaaatattaaaagagtttgattgataaagtattatcattaagagtttgatttttggcggtgtttaataaaatcatgtactgtatttttatgtataaaaaattaagttatcatttttt

SEQ ID NO: 7518 - protein, 342 aa, Glycine max
  peptide (1)..(342): Ceres Seq. ID no. 14302758
  misc_feature (13)..(328): NCBI GI NO: 18409261 NR Description: transducin / WD-40 repeat protein family
  misc_feature (13)..(328): NCBI GI NO: 21593642 NR Description: mitotic checkpoint protein, putative
  misc_feature (13)..(328): NCBI GI NO: 12597795 NR Description: mitotic checkpoint protein, putative
  misc_feature (21)..(333): NCBI GI NO: 15222841 NR Description: mitotic checkpoint protein, putative
  misc_feature (15)..(333): NCBI GI NO: 28564814 NR Description: putative mitotic checkpoint protein
  misc_feature (21)..(333): NCBI GI NO: 18402300 NR Description: mitotic checkpoint protein [Arabidopsis thaliana]
  misc_feature (10)..(332): NCBI GI NO: 3986296 NR Description: mitotic checkpoint [Xenopus laevis]
  misc_feature (19)..(332): NCBI GI NO: 13122448 NR Description: WD repeat protein Bub3 [Xenopus laevis]
  misc_feature (19)..(332): NCBI GI NO: 37362190 NR Description: BUB3 budding uninhibited by benzimidazoles 3-like
  misc_feature (19)..(332): NCBI GI NO: 4757880 NR Description: BUB3 budding uninhibited by benzimidazoles 3 homolog
RKELFQFRAQTRMKGDWLELELEKEIGDAISRTRFAPHSNTLLISSWDSSLRLFDVDASLLRLQAPSQAPLLDCCFQDDAVAFAAASDGLIRRYDLHSGLVDTLGSHDDMATCIGYSNETCQLVTSGFDKKLLLWDMHMKKTSLCLRSLDAEVDSMSVSGFNVTVAIGASMLVYDLRYFDQPVESKEAFNGTHLRCVSSIPDAEGFAVGSVDGRVSLQISNPFSSNDIRYIFRCHPKSKDGRHYLVSVNDIAFSPLVSGAFATGDNEGYVTIWDAGSRRRLVELPRYPNSVASLSYNHTGQLLAVASSHTYQEAKEIEKPPRIFIHRVDNIDIGSISASKRS

SEQ ID NO: 7519 - protein, 330 aa, Glycine max
  peptide (1)..(330): Ceres Seq. ID no. 14302759
  misc_feature (1)..(316): NCBI GI NO: 18409261 NR Description: transducin / WD-40 repeat protein family
  misc_feature (1)..(316): NCBI GI NO: 21593642 NR Description: mitotic checkpoint protein, putative
  misc_feature (1)..(316): NCBI GI NO: 12597795 NR Description: mitotic checkpoint protein, putative
  misc_feature (9)..(321): NCBI GI NO: 15222841 NR Description: mitotic checkpoint protein, putative
  misc_feature (3)..(321): NCBI GI NO: 28564814 NR Description: putative mitotic checkpoint protein
  misc_feature (9)..(321): NCBI GI NO: 18402300 NR Description: mitotic checkpoint protein [Arabidopsis thaliana]
  misc_feature (1)..(320): NCBI GI NO: 3986296 NR Description: mitotic checkpoint [Xenopus laevis]
  misc_feature (7)..(320): NCBI GI NO: 13122448 NR Description: WD repeat protein Bub3 [Xenopus laevis]
  misc_feature (7)..(320): NCBI GI NO: 37362190 NR Description: BUB3 budding uninhibited by benzimidazoles 3-like
  misc_feature (7)..(320): NCBI GI NO: 4757880 NR Description: BUB3 budding uninhibited by benzimidazoles 3 homolog
MKGDWLELELEKEIGDAISRTRFAPHSNTLLISSWDSSLRLFDVDASLLRLQAPSQAPLLDCCFQDDAVAFAAASDGLIRRYDLHSGLVDTLGSHDDMATCIGYSNETCQLVTSGFDKKLLLWDMHMKKTSLCLRSLDAEVDSMSVSGFNVTVAIGASMLVYDLRYFDQPVESKEAFNGTHLRCVSSIPDAEGFAVGSVDGRVSLQISNPFSSNDIRYIFRCHPKSKDGRHYLVSVNDIAFSPLVSGAFATGDNEGYVTIWDAGSRRRLVELPRYPNSVASLSYNHTGQLLAVASSHTYQEAKEIEKPPRIFIHRVDNIDIGSISASKRS

SEQ ID NO: 7520 - protein, 233 aa, Glycine max
  peptide (1)..(233): Ceres Seq. ID no. 14302760
  misc_feature (1)..(219): NCBI GI NO: 18409261 NR Description: transducin / WD-40 repeat protein family
  misc_feature (1)..(219): NCBI GI NO: 21593642 NR Description: mitotic checkpoint protein, putative
  misc_feature (1)..(219): NCBI GI NO: 12597795 NR Description: mitotic checkpoint protein, putative
  misc_feature (1)..(224): NCBI GI NO: 15222841 NR Description: mitotic checkpoint protein, putative
  misc_feature (1)..(224): NCBI GI NO: 28564814 NR Description: putative mitotic checkpoint protein
  misc_feature (1)..(224): NCBI GI NO: 18402300 NR Description: mitotic checkpoint protein [Arabidopsis thaliana]
  misc_feature (1)..(223): NCBI GI NO: 3986296 NR Description: mitotic checkpoint [Xenopus laevis]
  misc_feature (1)..(223): NCBI GI NO: 13122448 NR Description: WD repeat protein Bub3 [Xenopus laevis]
  misc_feature (1)..(223): NCBI GI NO: 37362190 NR Description: BUB3 budding uninhibited by benzimidazoles 3-like
  misc_feature (1)..(223): NCBI GI NO: 4757880 NR Description: BUB3 budding uninhibited by benzimidazoles 3 homolog
MATCIGYSNETCQLVTSGFDKKLLLWDMHMKKTSLCLRSLDAEVDSMSVSGFNVTVAIGASMLVYDLRYFDQPVESKEAFNGTHLRCVSSIPDAEGFAVGSVDGRVSLQISNPFSSNDIRYIFRCHPKSKDGRHYLVSVNDIAFSPLVSGAFATGDNEGYVTIWDAGSRRRLVELPRYPNSVASLSYNHTGQLLAVASSHTYQEAKEIEKPPRIFIHRVDNIDIGSISASKRS

SEQ ID NO: 7521 - DNA, 1719 bp, Glycine max
  misc_feature (1)..(1719): Ceres Seq. ID no. 14311219
acaaaacacaactcgtcacatcacatcacatcacatctattttcattacttcatcattttcactgcaattttcacaccacacacacaccacaatcatggaagttgatagtaggtttctgaacactggcctcctccttgtggccacaatccttgtggtcaagctcatctcagccttcatagtgcccaaatccagaaagagggtacccccaattgtgaaggggtggcccttaattggaggactcatccgtttcctcaaaggtccaatctttatgctccgtgacgagtaccctaagcttggaagtgtcttcactctcaaactcttccacaagaacatcaccttcctcattggccctgaggtttctgcacacttcttcaaggcctcagagactgatctcagccagcaagaggtgtatcagttcaatgtgccaacttttggacctggggtggtctttgatgttgattactctgtgaggcaagaacagttcaggttcttcactgaggctcttagggccaacaagctcaagggttatgtcaatcagatggttgcagaagctgaggactatttctcaaagtggggaccaagtggtgaggttgatttgaagtatgagcttgagcatctgatcatcttgacagccagtagatgtctcttggggcgtgaagttcgtgacaagctctttgatgatgtctctgcattgttccacgaccttgataatgggatgcttccaatcagtgttctcttcccatacctgccaatcccagctcacaagcgccgtgaccaggcacgcaagaagcttgctgaaatctttgcaagcatcataacatctcgcaaaagtgcaagcaaatcagaagaagacatgctgcagtgcttcattgactcaaaatacaaagatggtcgctcaacaacagaagctgaagtgactgggcttctcattgctgcactttttgccggtcaacacacaagctcgattacctccacttggactggggcatatctgctgtctaacaaccagtacctttcagctgtgcaggaggagcagaagatgttgatagaaaagcatggggacagagttgatcatgatgttttggctgaaatggatgtgctgtataggtgcatcaaagaagctttgagactccatcctcctctaatcatgctgatgagaagctcacacactgattttagtgtcacaacacgagaggggaaagagtatgacattcccaagggtcatataattgccacatcacctgcttttgcaaacaggctaggtcatgttttcaaagaccctgataggtatgatcccgatcgatttgctgtggggagggaagaggacaaggtggcaggtgcattctcatacatttcatttggagggggcagacatggatgccttggggagccatttgcatatctgcagataaaagcaatatggactcatctgcttaggaattttgagctggagttggtgtcaccttttccagagatcgattggaatgccatggttgtgggagtgaaggggaaagtgatggtccgatataagcggaaggagctttcagttaatcaataggaccacataattcagtgtctggcatgattttattttaagcagttattgttagtcttttctggttcagcttctgtcaaagttcgttgtttatttggcaatgaatatctagaatcttgattttgatttttttttcttctaattctattaagtgattttaact

SEQ ID NO: 7522 - protein, 518 aa, Glycine max
  peptide (1)..(518): Ceres Seq. ID no. 14311220
  misc_feature (32)..(515): NCBI GI NO: 18000074 NR Description: obtusifoliol-14-demethylase [Nicotiana tabacum]
  misc_feature (32)..(515): NCBI GI NO: 27461067 NR Description: obtusifoliol-14-demethylase [Nicotiana tabacum]
  misc_feature (32)..(515): NCBI GI NO: 15221075 NR Description: obtusifoliol 14-demethylase (CYP51)
  misc_feature (39)..(517): NCBI GI NO: 27542762 NR Description: cytochrome P450-like protein [Sorghum bicolor]
  misc_feature (39)..(517): NCBI GI NO: 5921924 NR Description: Cytochrome P450 51
  misc_feature (66)..(517): NCBI GI NO: 6166036 NR Description: Cytochrome P450 51
  misc_feature (92)..(517): NCBI GI NO: 4586676 NR Description: sterol 14-demethylase
  misc_feature (39)..(515): NCBI GI NO: 15227817 NR Description: obtusifoliol 14-alpha demethylase, putative
  misc_feature (206)..(517): NCBI GI NO: 7489685 NR Description: probable obtusifoliol 14-alpha-demethylase CYP51 -wheat
  misc_feature (25)..(515): NCBI GI NO: 34901524 NR Description: putative cytochrome P450
KTQLVTSHHITSIFITSSFSLQFSHHTHTTIMEVDSRFLNTGLLLVATILVVKLISAFIVPKSRKRVPPIVKGWPLIGGLIRFLKGPIFMLRDEYPKLGSVFTLKLFHKNITFLIGPEVSAHFFKASETDLSQQEVYQFNVPTFGPGVVFDVDYSVRQEQFRFFTEALRANKLKGYVNQMVAEAEDYFSKWGPSGEVDLKYELEHLIILTASRCLLGREVRDKLFDDVSALFHDLDNGMLPISVLFPYLPIPAHKRRDQARKKLAEIFASIITSRKSASKSEEDMLQCFIDSKYKDGRSTTEAEVTGLLIAALFAGQHTSSITSTWTGAYLLSNNQYLSAVQEEQKMLIEKHGDRVDHDVLAEMDVLYRCIKEALRLHPPLIMLMRSSHTDFSVTTREGKEYDIPKGHIIATSPAFANRLGHVFKDPDRYDPDRFAVGREEDKVAGAFSYISFGGGRHGCLGEPFAYLQIKAIWTHLLRNFELELVSPFPEIDWNAMVVGVKGKVMVRYKRKELSVNQ

SEQ ID NO: 7523 - protein, 487 aa, Glycine max
  peptide (1)..(487): Ceres Seq. ID no. 14311221
  misc_feature (1)..(484): NCBI GI NO: 18000074 NR Description: obtusifoliol-14-demethylase [Nicotiana tabacum]
  misc_feature (1)..(484): NCBI GI NO: 27461067 NR Description: obtusifoliol-14-demethylase [Nicotiana tabacum]
  misc_feature (1)..(484): NCBI GI NO: 15221075 NR Description: obtusifoliol 14-demethylase (CYP51)
  misc_feature (8)..(486): NCBI GI NO: 27542762 NR Description: cytochrome P450-like protein [Sorghum bicolor]
  misc_feature (8)..(486): NCBI GI NO: 5921924 NR Description: Cytochrome P450 51
  misc_feature (35)..(486): NCBI GI NO: 6166036 NR Description: Cytochrome P450 51
  misc_feature (61)..(486): NCBI GI NO: 4586676 NR Description: sterol 14-demethylase
  misc_feature (8)..(484): NCBI GI NO: 15227817 NR Description: obtusifoliol 14-alpha demethylase, putative
  misc_feature (175)..(486): NCBI GI NO: 7489685 NR Description: probable obtusifoliol 14-alpha-demethylase CYP51 -wheat
  misc_feature (1)..(484): NCBI GI NO: 34901524 NR Description: putative cytochrome P450
MEVDSRFLNTGLLLVATILVVKLISAFIVPKSRKRVPPIVKGWPLIGGLIRFLKGPIFMLRDEYPKLGSVFTLKLFHKNITFLIGPEVSAHFFKASETDLSQQEVYQFNVPTFGPGVVFDVDYSVRQEQFRFFTEALRANKLKGYVNQMVAEAEDYFSKWGPSGEVDLKYELEHLIILTASRCLLGREVRDKLFDDVSALFHDLDNGMLPISVLFPYLPIPAHKRRDQARKKLAEIFASIITSRKSASKSEEDMLQCFIDSKYKDGRSTTEAEVTGLLIAALFAGQHTSSITSTWTGAYLLSNNQYLSAVQEEQKMLIEKHGDRVDHDVLAEMDVLYRCIKEALRLHPPLIMLMRSSHTDFSVTTREGKEYDIPKGHIIATSPAFANRLGHVFKDPDRYDPDRFAVGREEDKVAGAFSYISFGGGRHGCLGEPFAYLQIKAIWTHLLRNFELELVSPFPEIDWNAMVVGVKGKVMVRYKRKELSVNQ

SEQ ID NO: 7524 - protein, 429 aa, Glycine max
  peptide (1)..(429): Ceres Seq. ID no. 14311222
  misc_feature (1)..(426): NCBI GI NO: 18000074 NR Description: obtusifoliol-14-demethylase [Nicotiana tabacum]
  misc_feature (1)..(426): NCBI GI NO: 27461067 NR Description: obtusifoliol-14-demethylase [Nicotiana tabacum]
  misc_feature (1)..(426): NCBI GI NO: 15221075 NR Description: obtusifoliol 14-demethylase (CYP51)
  misc_feature (1)..(428): NCBI GI NO: 27542762 NR Description: cytochrome P450-like protein [Sorghum bicolor]
  misc_feature (1)..(428): NCBI GI NO: 5921924 NR Description: Cytochrome P450 51
  misc_feature (1)..(428): NCBI GI NO: 6166036 NR Description: Cytochrome P450 51
  misc_feature (3)..(428): NCBI GI NO: 4586676 NR Description: sterol 14-demethylase
  misc_feature (1)..(426): NCBI GI NO: 15227817 NR Description: obtusifoliol 14-alpha demethylase, putative
  misc_feature (117)..(428): NCBI GI NO: 7489685 NR Description: probable obtusifoliol 14-alpha-demethylase CYP51 -wheat
  misc_feature (1)..(426): NCBI GI NO: 34901524 NR Description: putative cytochrome P450
MLRDEYPKLGSVFTLKLFHKNITFLIGPEVSAHFFKASETDLSQQEVYQFNVPTFGPGVVFDVDYSVRQEQFRFFTEALRANKLKGYVNQMVAEAEDYFSKWGPSGEVDLKYELEHLIILTASRCLLGREVRDKLFDDVSALFHDLDNGMLPISVLFPYLPIPAHKRRDQARKKLAEIFASIITSRKSASKSEEDMLQCFIDSKYKDGRSTTEAEVTGLLIAALFAGQHTSSITSTWTGAYLLSNNQYLSAVQEEQKMLIEKHGDRVDHDVLAEMDVLYRCIKEALRLHPPLIMLMRSSHTDFSVTTREGKEYDIPKGHIIATSPAFANRLGHVFKDPDRYDPDRFAVGREEDKVAGAFSYISFGGGRHGCLGEPFAYLQIKAIWTHLLRNFELELVSPFPEIDWNAMVVGVKGKVMVRYKRKELSVNQ

SEQ ID NO: 7525 - DNA, 736 bp, Glycine max
  misc_feature (1)..(736): Ceres Seq. ID no. 13582048
gagatgacgatgtcgtcgccggcctccacccacctcctccgctccgcgcccgcggcgcccctgctccctcgccgcgcctccctgcagctctcctgcgtcgccagcggagccgcgccaaggagtaggagacggagcggccgcctggaggtagtccgcgcggccaccgcggaggtggccgaggccgccggcgcccccgcctacaccaccgagtccctcatcctctacttcaaggcggagggcaccatggaggagaggtctatccccaagatcacccaggctctcgaggggatggacggcgtcagtgacctggaggtgctcatcgaagaaggcatcggaagtgttgtgttaacgaaggcgacaacagtccaagctactggggtcgcctcaaacctggtggaagccatccagggagttggtttcaagctgcaaactctgagcctcagcttcgaggactttgacaaggaggatgctgctgctgtttcgggagaaggagcagacgtccaagccagcgagtgagcttcacagcgtcgtgcctgcgctgagtgcacacgatgtgctctggtcgttggggttcaatatttcttcggacgtttttctttagttgtcatacactcgctcttagcaatttttcaagctgcacgttttaccttctggcatgactacgtaccctatgtgggcttttagaaatgctgcatcttcccattaaaaatagagaagaaaaagaaattctgcgtct

SEQ ID NO: 7526 - protein, 171 aa, Glycine max
  peptide (1)..(171): Ceres Seq. ID no. 13582049
  misc_feature (8)..(154): NCBI GI NO: 18417512 NR Description: heavy-metal-associated domain-containing protein
  misc_feature (8)..(154): NCBI GI NO: 11346179 NR Description: hypothetical protein F2G14_30 - Arabidopsisthaliana
EMTMSSPASTHLLRSAPAAPLLPRRASLQLSCVASGAAPRSRRRSGRLEVVRAATAEVAEAAGAPAYTTESLILYFKAEGTMEERSIPKITQALEGMDGVSDLEVLIEEGIGSVVLTKATTVQATGVASNLVEAIQGVGFKLQTLSLSFEDFDKEDAAAVSGEGADVQASE

SEQ ID NO: 7527 - protein, 170 aa, Glycine max
  peptide (1)..(170): Ceres Seq. ID no. 13582050
  misc_feature (7)..(153): NCBI GI NO: 18417512 NR Description: heavy-metal-associated domain-containing protein
  misc_feature (7)..(153): NCBI GI NO: 11346179 NR Description: hypothetical protein F2G14_30 - Arabidopsisthaliana
MTMSSPASTHLLRSAPAAPLLPRRASLQLSCVASGAAPRSRRRSGRLEVVRAATAEVAEAAGAPAYTTESLILYFKAEGTMEERSIPKITQALEGMDGVSDLEVLIEEGIGSVVLTKATTVQATGVASNLVEAIQGVGFKLQTLSLSFEDFDKEDAAAVSGEGADVQASE

SEQ ID NO: 7528 - protein, 168 aa, Glycine max
  peptide (1)..(168): Ceres Seq. ID no. 13582051
  misc_feature (5)..(151): NCBI GI NO: 18417512 NR Description: heavy-metal-associated domain-containing protein
  misc_feature (5)..(151): NCBI GI NO: 11346179 NR Description: hypothetical protein F2G14_30 - Arabidopsisthaliana
MSSPASTHLLRSAPAAPLLPRRASLQLSCVASGAAPRSRRRSGRLEVVRAATAEVAEAAGAPAYTTESLILYFKAEGTMEERSIPKITQALEGMDGVSDLEVLIEEGIGSVVLTKATTVQATGVASNLVEAIQGVGFKLQTLSLSFEDFDKEDAAAVSGEGADVQASE

SEQ ID NO: 7529 - DNA, 961 bp, Glycine max
  misc_feature (1)..(961): Ceres Seq. ID no. 13582052
acaaaatagatttggctgtcgtttcgtccctccctcttccgttgaacgaacatcggcgttttcaccgacgaatccaactttctttccatttctctctacgattcaggtctttcacttggattcagaatagtacttttgtttcttctagattattagcgacagagatggatgattgggaagctgaagactttcaaccaactcctgctaaagttgaactgaaaagtaactgggatgatgaggatgttgatgagaatgacatcaaggactcttgggaggaagaggatgatgatgagcctactccggcagctgtagtaaagcctgctccaaagaaagcagcaaaagttgttgaaaagaaggctaaatctgttgaagaaccatcaaaggaagagccttttgatcctattgctgacaaacttcgcatgcagaggctagtggaggaagctgattaccaggcaactgctgaactctttggagcaaagactgaagcaaaaagcgttgatattttcattcccaagtctgaaagcgatttcttggaatatgctgagatgatatctcgtaagcttgtaccttatgagaaaagctttcactatattgggctgctcaaagcagtgatgagactttctgtggccaatatgaaagcagctgatgttaaagacgttgcttcctccatttcggcaataggaaacgaaaaactcaaggctgagaaagatgctgctgccggcaaaaagaagtcaggtaagaagaaacaactgcacgtggataagcctgatgatgatcttgtttcgggtccttatggcgccatggacgacgatgatttcatgtaaaagaaaatggcttggagattgcacttactacctatgtaggatattgcaactaagaagaggtttaaatcattttacgtttttttttaaattatctattgaagcaacacaaattagtaaaacagaattgcctttttctc

SEQ ID NO: 7530 - protein, 273 aa, Glycine max
  peptide (1)..(273): Ceres Seq. ID no. 13582053
  misc_feature (55)..(273): NCBI GI NO: 30693092 NR Description: expressed protein [Arabidopsis thaliana]
  misc_feature (55)..(273): NCBI GI NO: 18408426 NR Description: expressed protein [Arabidopsis thaliana]
  misc_feature (56)..(273): NCBI GI NO: 27374242 NR Description: CG12131-PA [Drosophila erecta]
  misc_feature (56)..(273): NCBI GI NO: 19921950 NR Description: CG12131-PA [Drosophila melanogaster]
  misc_feature (56)..(273): NCBI GI NO: 27374365 NR Description: Adam-PA [Drosophila willistoni]
  misc_feature (56)..(273): NCBI GI NO: 26349519 NR Description: unnamed protein product [Mus musculus]
  misc_feature (56)..(273): NCBI GI NO: 34856798 NR Description: similar to Eukaryotic translation initiation factor3 subunit 1
  misc_feature (56)..(273): NCBI GI NO: 10435304 NR Description: unnamed protein product [Homo sapiens]
  misc_feature (56)..(273): NCBI GI NO: 23503065 NR Description: Eukaryotic translation initiation factor 3 subunit1
  misc_feature (56)..(273): NCBI GI NO: 32766433 NR Description: Unknown (protein for MGC:63801) [Danio rerio]
KIDLAVVSSLPLPLNEHRRFHRRIQLSFHFSLRFRSFTWIQNSTFVSSRLLATEMDDWEAEDFQPTPAKVELKSNWDDEDVDENDIKDSWEEEDDDEPTPAAVVKPAPKKAAKVVEKKAKSVEEPSKEEPFDPIADKLRMQRLVEEADYQATAELFGAKTEAKSVDIFIPKSESDFLEYAEMISRKLVPYEKSFHYIGLLKAVMRLSVANMKAADVKDVASSISAIGNEKLKAEKDAAAGKKKSGKKKQLHVDKPDDDLVSGPYGAMDDDDFM

SEQ ID NO: 7531 - protein, 219 aa, Glycine max
  peptide (1)..(219): Ceres Seq. ID no. 13582054
  misc_feature (1)..(219): NCBI GI NO: 30693092 NR Description: expressed protein [Arabidopsis thaliana]
  misc_feature (1)..(219): NCBI GI NO: 18408426 NR Description: expressed protein [Arabidopsis thaliana]
  misc_feature (2)..(219): NCBI GI NO: 27374242 NR Description: CG12131-PA [Drosophila erecta]
  misc_feature (2)..(219): NCBI GI NO: 19921950 NR Description: CG12131-PA [Drosophila melanogaster]
  misc_feature (2)..(219): NCBI GI NO: 27374365 NR Description: Adam-PA [Drosophila willistoni]
  misc_feature (2)..(219): NCBI GI NO: 26349519 NR Description: unnamed protein product [Mus musculus]
  misc_feature (2)..(219): NCBI GI NO: 34856798 NR Description: similar to Eukaryotic translation initiation factor3 subunit 1
  misc_feature (2)..(219): NCBI GI NO: 10435304 NR Description: unnamed protein product [Homo sapiens]
  misc_feature (2)..(219): NCBI GI NO: 23503065 NR Description: Eukaryotic translation initiation factor 3 subunit1
  misc_feature (2)..(219): NCBI GI NO: 32766433 NR Description: Unknown (protein for MGC:63801) [Danio rerio]
MDDWEAEDFQPTPAKVELKSNWDDEDVDENDIKDSWEEEDDDEPTPAAVVKPAPKKAAKVVEKKAKSVEEPSKEEPFDPIADKLRMQRLVEEADYQATAELFGAKTEAKSVDIFIPKSESDFLEYAEMISRKLVPYEKSFHYIGLLKAVMRLSVANMKAADVKDVASSISAIGNEKLKAEKDAAAGKKKSGKKKQLHVDKPDDDLVSGPYGAMDDDDFM

SEQ ID NO: 7532 - DNA, 1276 bp, Glycine max
  misc_feature (1)..(1276): Ceres Seq. ID no. 13595503
acctagaacatcccaatcaaaaaatcaaagccctgctgaatggcgccaccggcaccacccaagtcaagtcagggtcaggtgatgaataatgcaaggattcacttcttttccattctcctcgctctccaatacggtgctcaacctttgatctccaaacgcttcatcagacgtgaagttattgtgacttcatctgttttgacttgtgagcttgcaaaggttatatgtgcagtgttttttatggcaaaagatggtagtctgaggaaattgtataaagagtggactttggttggtgcgttgactgcatcaggacttcctgcagctatatatgcattgcaaaatagtttgctgcaaatttcttacaagaatcttgattcactcacattctcaatgctgaatcagaccaaaatatttttcaccgcgctctttgcatatttcatattgaggcaaaaacaatcgattgagcaaattggagccttgttcttgttaatagttgcggcagttcttttaagtgttggcgaaggctctaccaaaggttctgctattggcaatgctgatcaaattttattttatggaattattcctgtattagttgcttcagtgctctctggattggcttcatccttgtgtcaatgggcctctcaggttaagaaacactcatcatacttgatgactatagaaatgtctattgttggaagtctatgtttgcttgccagtactttgaaatctccagatggggaagctatgagacaacatgggtttttctatggttggactcctcttactttgatcccagtaattttcaatgcccttggaggaattcttgtcggtttagttacaagccatgctggtggtgttcggaaggggtttgtcattgtttctgctttactcattacagcattgctacagtttattttcgatggaaagacaccttcattgtattgccttttggctcttccactagtggtcactagcatttcaatataccagaaatacccctaccaggttaagaagaaggagtcatagaatctgaccatggggaatttatttcattagttccccccgaaactactttgtttttttatccagaatatatagcatattgtaaatgatagaacatagaaggcaagcattcttcttgatgtcttctggatctcaatagaattaggatgttatacagagctatttttttttttttgaatattctggaatctttaaatgatcaattatttgtctcctaaaaaaaaaaaaaaaaaagcttatcgataccgtcgacctc

SEQ ID NO: 7533 - protein, 327 aa, Glycine max
  peptide (1)..(327): Ceres Seq. ID no. 13595504
  misc_feature (71)..(284): Pfam Name: Pfam Description:  Nucleotide-sugar transporter
  misc_feature (19)..(326): NCBI GI NO: 18424900 NR Description: expressed protein [Arabidopsis thaliana]
  misc_feature (19)..(326): NCBI GI NO: 18086579 NR Description: AT5g65000/MXK3_23 [Arabidopsis thaliana]
  misc_feature (67)..(326): NCBI GI NO: 8843764 NR Description: gene_id:MXK3
  misc_feature (17)..(315): NCBI GI NO: 22204205 NR Description: SI:bZ30I22
  misc_feature (16)..(321): NCBI GI NO: 38176083 NR Description: Hypothetical protein ZC250.3
  misc_feature (8)..(325): NCBI GI NO: 25146317 NR Description: Integral membrane protein DUF6 family member (39
  misc_feature (17)..(321): NCBI GI NO: 39593097 NR Description: Hypothetical protein CBG09317
  misc_feature (8)..(325): NCBI GI NO: 7503366 NR Description: hypothetical protein F44C8
  misc_feature (49)..(315): NCBI GI NO: 6912668 NR Description: solute carrier family 35
  misc_feature (17)..(315): NCBI GI NO: 37725001 NR Description: solute carrier family 35 member 3 [Bos taurus]
MAPPAPPKSSQGQVMNNARIHFFSILLALQYGAQPLISKRFIRREVIVTSSVLTCELAKVICAVFFMAKDGSLRKLYKEWTLVGALTASGLPAAIYALQNSLLQISYKNLDSLTFSMLNQTKIFFTALFAYFILRQKQSIEQIGALFLLIVAAVLLSVGEGSTKGSAIGNADQILFYGIIPVLVASVLSGLASSLCQWASQVKKHSSYLMTIEMSIVGSLCLLASTLKSPDGEAMRQHGFFYGWTPLTLIPVIFNALGGILVGLVTSHAGGVRKGFVIVSALLITALLQFIFDGKTPSLYCLLALPLVVTSISIYQKYPYQVKKKES

SEQ ID NO: 7534 - protein, 313 aa, Glycine max
  peptide (1)..(313): Ceres Seq. ID no. 13595505
  misc_feature (57)..(270): Pfam Name: Pfam Description:  Nucleotide-sugar transporter
  misc_feature (5)..(312): NCBI GI NO: 18424900 NR Description: expressed protein [Arabidopsis thaliana]
  misc_feature (5)..(312): NCBI GI NO: 18086579 NR Description: AT5g65000/MXK3_23 [Arabidopsis thaliana]
  misc_feature (53)..(312): NCBI GI NO: 8843764 NR Description: gene_id:MXK3
  misc_feature (3)..(301): NCBI GI NO: 22204205 NR Description: SI:bZ30I22
  misc_feature (2)..(307): NCBI GI NO: 38176083 NR Description: Hypothetical protein ZC250.3
  misc_feature (1)..(311): NCBI GI NO: 25146317 NR Description: Integral membrane protein DUF6 family member (39
  misc_feature (3)..(307): NCBI GI NO: 39593097 NR Description: Hypothetical protein CBG09317
  misc_feature (1)..(311): NCBI GI NO: 7503366 NR Description: hypothetical protein F44C8
  misc_feature (35)..(301): NCBI GI NO: 6912668 NR Description: solute carrier family 35
  misc_feature (3)..(301): NCBI GI NO: 37725001 NR Description: solute carrier family 35 member 3 [Bos taurus]
MNNARIHFFSILLALQYGAQPLISKRFIRREVIVTSSVLTCELAKVICAVFFMAKDGSLRKLYKEWTLVGALTASGLPAAIYALQNSLLQISYKNLDSLTFSMLNQTKIFFTALFAYFILRQKQSIEQIGALFLLIVAAVLLSVGEGSTKGSAIGNADQILFYGIIPVLVASVLSGLASSLCQWASQVKKHSSYLMTIEMSIVGSLCLLASTLKSPDGEAMRQHGFFYGWTPLTLIPVIFNALGGILVGLVTSHAGGVRKGFVIVSALLITALLQFIFDGKTPSLYCLLALPLVVTSISIYQKYPYQVKKKES

SEQ ID NO: 7535 - protein, 261 aa, Glycine max
  peptide (1)..(261): Ceres Seq. ID no. 13595506
  misc_feature (5)..(218): Pfam Name: Pfam Description:  Nucleotide-sugar transporter
  misc_feature (1)..(260): NCBI GI NO: 18424900 NR Description: expressed protein [Arabidopsis thaliana]
  misc_feature (1)..(260): NCBI GI NO: 18086579 NR Description: AT5g65000/MXK3_23 [Arabidopsis thaliana]
  misc_feature (1)..(260): NCBI GI NO: 8843764 NR Description: gene_id:MXK3
  misc_feature (1)..(249): NCBI GI NO: 22204205 NR Description: SI:bZ30I22
  misc_feature (1)..(255): NCBI GI NO: 38176083 NR Description: Hypothetical protein ZC250.3
  misc_feature (1)..(259): NCBI GI NO: 25146317 NR Description: Integral membrane protein DUF6 family member (39
  misc_feature (1)..(255): NCBI GI NO: 39593097 NR Description: Hypothetical protein CBG09317
  misc_feature (1)..(259): NCBI GI NO: 7503366 NR Description: hypothetical protein F44C8
  misc_feature (1)..(249): NCBI GI NO: 6912668 NR Description: solute carrier family 35
  misc_feature (1)..(249): NCBI GI NO: 37725001 NR Description: solute carrier family 35 member 3 [Bos taurus]
MAKDGSLRKLYKEWTLVGALTASGLPAAIYALQNSLLQISYKNLDSLTFSMLNQTKIFFTALFAYFILRQKQSIEQIGALFLLIVAAVLLSVGEGSTKGSAIGNADQILFYGIIPVLVASVLSGLASSLCQWASQVKKHSSYLMTIEMSIVGSLCLLASTLKSPDGEAMRQHGFFYGWTPLTLIPVIFNALGGILVGLVTSHAGGVRKGFVIVSALLITALLQFIFDGKTPSLYCLLALPLVVTSISIYQKYPYQVKKKES

SEQ ID NO: 7536 - DNA, 881 bp, Glycine max
  misc_feature (1)..(881): Ceres Seq. ID no. 13595627
atcgaaaaacaccaaacaacacactaacatacacatcatctcctctctcttctcttatcttctccgctatgaagctcgccactagcctcagctccaagttcctccgcctcagccctaaacgtatcttccgcgccaagtccaagtcctcctccgtctccagatccgaaccttcttccttcagctccggtgcttcatccgacggctcctacagcgacctcaagccaggtcccgccgccactcccgtcagtgtcctccccggagaacaagatttttactccgagctgatacaggcctttaagctcatagaccgcgacgacgacggtgtggtttcaagaaaagaactagctgcgctgcttagcgggctcagtcctgagcctccgagtcaagaagaggttactctgatgcttcaagaagtcgatggaggaggagacggttgtatcagcctcgaggagcttgctagccgcgtggcgggatcctcctctgactctgatgaaagctcggtcgagatgagagaggtgtttgagttttttgacgtggatcacgacgggaggatatcggcggaggagcttcatagagtttttggagttatcggagacgagcggtgcacgttagaggagtgtgtgcgtatgatagcgacggttgatgggaacggtgacggttttgtttgctttgatgacttttgccgcatgatggaagcttcaggctccagcgatgagtgatcatcattgagtcatgtttgtatgattgatgataatgacatcgttatgctctcctttgtttacacattattttttactattactgtaatttgggtataattttgtcacggcaaagcacttcaaatttttaccgtcaagaatcaatcaatcactataccagtg

SEQ ID NO: 7537 - protein, 238 aa, Glycine max
  peptide (1)..(238): Ceres Seq. ID no. 13595628
  misc_feature (23)..(230): NCBI GI NO: 15227349 NR Description: calmodulin, putative [Arabidopsis thaliana]
  misc_feature (23)..(230): NCBI GI NO: 21536925 NR Description: calmodulin-like protein [Arabidopsis thaliana]
  misc_feature (23)..(230): NCBI GI NO: 322474 NR Description: calmodulin-related protein
  misc_feature (32)..(231): NCBI GI NO: 15228219 NR Description: calmodulin, putative [Arabidopsis thaliana]
  misc_feature (93)..(236): NCBI GI NO: 21618074 NR Description: calmodulin-related protein [Arabidopsis thaliana]
  misc_feature (93)..(236): NCBI GI NO: 18408502 NR Description: calmodulin-related protein, putative
  misc_feature (15)..(236): NCBI GI NO: 28301674 NR Description: calcium-binding protein [Lotus japonicus]
  misc_feature (80)..(238): NCBI GI NO: 34895640 NR Description: OSJNBa0083M16.33
  misc_feature (67)..(235): NCBI GI NO: 19386815 NR Description: B1147A04.10
  misc_feature (64)..(235): NCBI GI NO: 15221781 NR Description: polcalcin
RKTPNNTLTYTSSPLSSLIFSAMKLATSLSSKFLRLSPKRIFRAKSKSSSVSRSEPSSFSSGASSDGSYSDLKPGPAATPVSVLPGEQDFYSELIQAFKLIDRDDDGVVSRKELAALLSGLSPEPPSQEEVTLMLQEVDGGGDGCISLEELASRVAGSSSDSDESSVEMREVFEFFDVDHDGRISAEELHRVFGVIGDERCTLEECVRMIATVDGNGDGFVCFDDFCRMMEASGSSDE

SEQ ID NO: 7538 - protein, 216 aa, Glycine max
  peptide (1)..(216): Ceres Seq. ID no. 13595629
  misc_feature (1)..(208): NCBI GI NO: 15227349 NR Description: calmodulin, putative [Arabidopsis thaliana]
  misc_feature (1)..(208): NCBI GI NO: 21536925 NR Description: calmodulin-like protein [Arabidopsis thaliana]
  misc_feature (1)..(208): NCBI GI NO: 322474 NR Description: calmodulin-related protein
  misc_feature (10)..(209): NCBI GI NO: 15228219 NR Description: calmodulin, putative [Arabidopsis thaliana]
  misc_feature (71)..(214): NCBI GI NO: 21618074 NR Description: calmodulin-related protein [Arabidopsis thaliana]
  misc_feature (71)..(214): NCBI GI NO: 18408502 NR Description: calmodulin-related protein, putative
  misc_feature (1)..(214): NCBI GI NO: 28301674 NR Description: calcium-binding protein [Lotus japonicus]
  misc_feature (58)..(216): NCBI GI NO: 34895640 NR Description: OSJNBa0083M16.33
  misc_feature (45)..(213): NCBI GI NO: 19386815 NR Description: B1147A04.10
  misc_feature (42)..(213): NCBI GI NO: 15221781 NR Description: polcalcin
MKLATSLSSKFLRLSPKRIFRAKSKSSSVSRSEPSSFSSGASSDGSYSDLKPGPAATPVSVLPGEQDFYSELIQAFKLIDRDDDGVVSRKELAALLSGLSPEPPSQEEVTLMLQEVDGGGDGCISLEELASRVAGSSSDSDESSVEMREVFEFFDVDHDGRISAEELHRVFGVIGDERCTLEECVRMIATVDGNGDGFVCFDDFCRMMEASGSSDE

SEQ ID NO: 7539 - DNA, 1262 bp, Glycine max
  misc_feature (1)..(1262): Ceres Seq. ID no. 13595840
atatttatttctcctgctgcgacgactggtacatgatcagcagttcccccattttaagttagattattatcacacctcgtgaacacagattgcagttggtgcggaggatcgatctcgccatgaatttcaattgcactgctaacaaggagcaaaagaaaaccgtagaccaatctatcttattgtgctgcaagttctttgtctctgaatcacgcaacaatgccactctcaatgcaatagaacgagctgcaaggtcaaacccagaaactgtgattgtgaacatgtttcatgatcgagcttataacagggcaaggtacgaccttgtgtcgtatgttttgcatgactgcacaggaaatcccatatacagccccttgcatcaaactgtcatagccatggctgaggctacattcaatgccgtcaaccttgaattccatgaaggtgctcaccctcgcttgggcgcagtggacgacattgttttccatccacttggtcatgcgtcgctcgacgaggcagcgtggctcgccaaagcagtggcagcagacattggcaaccgattcagtgtgccagtgtttctgtacgctgcagcccacccaacagggaaggaacttgacgccataaggcgagagcttggatattacaggccaaattctaggggcagccaatgggccgggtgggcaatgcccgaaacgcttcctctaagcccagatgaagggcctaacgtcgtttcaagagctaaaggcatcacaatgattggtgcacgcccttgggtcacactctacaacgttccaattttgtgcactgatgtgtcagtagcaagaaggattgcaaggaaggtgagtgctcgtggcggtggcctccccactgtgcaaacgattgcgcttgtccatgaggactcaactgagatagcctgcatgcttttggactccaagcaggttggagcggatagggttcaaaatagggttgagatgctggccgcacaagagggactggacatagaacaaggttatttcactgacatttctccagaaatgatcgtagagaaatacatgaaattaatcaatagtgctaacaaatcgtgatcatgcatgtgtgtaactcattgaacttgttgatgagtaatcataaatgatcgaaggctgtaattttcagtaagtgtaaaacaaaggttatgaattgtgattccaaaatggttggctgggataacaaactaagggtaacaaatatatctatctgtatttatatatcaaaataataacctttcgccc

SEQ ID NO: 7540 - protein, 318 aa, Glycine max
  peptide (1)..(318): Ceres Seq. ID no. 13595841
  misc_feature (219)..(267): Pfam Name: Pfam Description:  Formiminotransferase domain
  misc_feature (18)..(316): NCBI GI NO: 5734618 NR Description: Similar to Arabidopsis thaliana chromosome II BACF5H14 genomic sequence
  misc_feature (18)..(316): NCBI GI NO: 34898040 NR Description: OSJNBa0038F22.18
  misc_feature (17)..(315): NCBI GI NO: 18399493 NR Description: expressed protein [Arabidopsis thaliana]
  misc_feature (9)..(315): NCBI GI NO: 25411995 NR Description: hypothetical protein At2g20830
  misc_feature (155)..(316): NCBI GI NO: 34897974 NR Description: hypothetical protein~similar to Oryza sativachromosome 6
  misc_feature (18)..(64): NCBI GI NO: 34897974 NR Description: hypothetical protein~similar to Oryza sativachromosome 6
  misc_feature (19)..(291): NCBI GI NO: 34540165 NR Description: formiminotransferase- cyclodeaminase-related protein
  misc_feature (18)..(302): NCBI GI NO: 13540922 NR Description: Glutamate formiminotransferase
  misc_feature (18)..(313): NCBI GI NO: 16082441 NR Description: probable glutamate formiminotransferase
  misc_feature (22)..(291): NCBI GI NO: 28211902 NR Description: glutamate formiminotransferase
MNFNCTANKEQKKTVDQSILLCCKFFVSESRNNATLNAIERAARSNPETVIVNMFHDRAYNRARYDLVSYVLHDCTGNPIYSPLHQTVIAMAEATFNAVNLEFHEGAHPRLGAVDDIVFHPLGHASLDEAAWLAKAVAADIGNRFSVPVFLYAAAHPTGKELDAIRRELGYYRPNSRGSQWAGWAMPETLPLSPDEGPNVVSRAKGITMIGARPWVTLYNVPILCTDVSVARRIARKVSARGGGLPTVQTIALVHEDSTEIACMLLDSKQVGADRVQNRVEMLAAQEGLDIEQGYFTDISPEMIVEKYMKLINSANKS

SEQ ID NO: 7541 - protein, 265 aa, Glycine max
  peptide (1)..(265): Ceres Seq. ID no. 13595842
  misc_feature (166)..(214): Pfam Name: Pfam Description:  Formiminotransferase domain
  misc_feature (1)..(263): NCBI GI NO: 5734618 NR Description: Similar to Arabidopsis thaliana chromosome II BACF5H14 genomic sequence
  misc_feature (1)..(263): NCBI GI NO: 34898040 NR Description: OSJNBa0038F22.18
  misc_feature (1)..(262): NCBI GI NO: 18399493 NR Description: expressed protein [Arabidopsis thaliana]
  misc_feature (1)..(262): NCBI GI NO: 25411995 NR Description: hypothetical protein At2g20830
  misc_feature (102)..(263): NCBI GI NO: 34897974 NR Description: hypothetical protein~similar to Oryza sativachromosome 6
  misc_feature (1)..(11): NCBI GI NO: 34897974 NR Description: hypothetical protein~similar to Oryza sativachromosome 6
  misc_feature (1)..(238): NCBI GI NO: 34540165 NR Description: formiminotransferase- cyclodeaminase-related protein
  misc_feature (1)..(249): NCBI GI NO: 13540922 NR Description: Glutamate formiminotransferase
  misc_feature (1)..(260): NCBI GI NO: 16082441 NR Description: probable glutamate formiminotransferase
  misc_feature (1)..(238): NCBI GI NO: 28211902 NR Description: glutamate formiminotransferase
MFHDRAYNRARYDLVSYVLHDCTGNPIYSPLHQTVIAMAEATFNAVNLEFHEGAHPRLGAVDDIVFHPLGHASLDEAAWLAKAVAADIGNRFSVPVFLYAAAHPTGKELDAIRRELGYYRPNSRGSQWAGWAMPETLPLSPDEGPNVVSRAKGITMIGARPWVTLYNVPILCTDVSVARRIARKVSARGGGLPTVQTIALVHEDSTEIACMLLDSKQVGADRVQNRVEMLAAQEGLDIEQGYFTDISPEMIVEKYMKLINSANKS

SEQ ID NO: 7542 - protein, 228 aa, Glycine max
  peptide (1)..(228): Ceres Seq. ID no. 13595843
  misc_feature (129)..(177): Pfam Name: Pfam Description:  Formiminotransferase domain
  misc_feature (1)..(226): NCBI GI NO: 5734618 NR Description: Similar to Arabidopsis thaliana chromosome II BACF5H14 genomic sequence
  misc_feature (1)..(226): NCBI GI NO: 34898040 NR Description: OSJNBa0038F22.18
  misc_feature (1)..(225): NCBI GI NO: 18399493 NR Description: expressed protein [Arabidopsis thaliana]
  misc_feature (1)..(225): NCBI GI NO: 25411995 NR Description: hypothetical protein At2g20830
  misc_feature (65)..(226): NCBI GI NO: 34897974 NR Description: hypothetical protein~similar to Oryza sativachromosome 6
  misc_feature (1)..(201): NCBI GI NO: 34540165 NR Description: formiminotransferase- cyclodeaminase-related protein
  misc_feature (1)..(212): NCBI GI NO: 13540922 NR Description: Glutamate formiminotransferase
  misc_feature (1)..(223): NCBI GI NO: 16082441 NR Description: probable glutamate formiminotransferase
  misc_feature (1)..(201): NCBI GI NO: 28211902 NR Description: glutamate formiminotransferase
  misc_feature (1)..(223): NCBI GI NO: 20806959 NR Description: Glutamate formiminotransferase
MAEATFNAVNLEFHEGAHPRLGAVDDIVFHPLGHASLDEAAWLAKAVAADIGNRFSVPVFLYAAAHPTGKELDAIRRELGYYRPNSRGSQWAGWAMPETLPLSPDEGPNVVSRAKGITMIGARPWVTLYNVPILCTDVSVARRIARKVSARGGGLPTVQTIALVHEDSTEIACMLLDSKQVGADRVQNRVEMLAAQEGLDIEQGYFTDISPEMIVEKYMKLINSANKS

SEQ ID NO: 7543 - DNA, 1236 bp, Glycine max
  misc_feature (1)..(1236): Ceres Seq. ID no. 13595507
gcggtctcggttttctgcaattggctggcggcctggcgctccaccccgtgcgtccttcagtccttctatccaaaagcgacggagagactcccggcggcgagcaggttgtcctgttgttctatccgattgtgcactgctggttgtcctgctctccagctgactgcagtggtgttcttctcgcagtttgaagatggatctcaaggatagcctctccagatttaagcagcagcaggagaggtgccagtcatctttggccagcatagctgcaagccaagcttcaaccacaaaaccaaagcacagggcccaaccgattaatgctccatctgctccagcaaggcctgcacaacctattaaattttcaaacgatacagaaaggctgcaagacattaattcgattaggaaatctcctgttggggcacagatcaaacttgtcattgaattgctttacaagacaagacaagcttttacggcagagcaaataaatgatgcaacttacgttgatatcaatggtaataaggctgtctttgacagtctgaggaataacctcaaagtacactatgatgggagacgtttctcgtacaagtccaagcatgatctggaggggaaagatcaactacttgatttgataaggtgtcaccaggagggtcttgctgttgtggaagtgaaggatgcatacccaagtgtattggaagatttgcaggctctgaaggcagcaggtgaagtttggctgttgtcaaacatggattcacaggaggacattgtttaccctaatgatccaaaagtgaagatcaaggttgatgatgacctgaaggagctcttccgtgggattgagttaccgcgtgatatggttgatatcgaaaaggagctccagaagaacggcatgaagccgatgaccgacaccacgaaacgacgagcagcagcccagatccatggcgtgaaaccaaaggctaagcctaagaagaagcaacgcgagataactaaacggaccaagctcacgaatgcccatctgcctgagctgttccaacatcttaaatcttgattgtgccgttatcagcaactccgatgtatttcgtttcatcctacctctagttaatgtcatcgattatatgtgcctgcaaccctagtttgtggttatgtgagctccaagatcttgatctgagagccctgttgtatgtagcataatctgacttggaagagtttgagattgttttttatcataatcctctcaaacctgcc

SEQ ID NO: 7544 - protein, 282 aa, Glycine max
  peptide (1)..(282): Ceres Seq. ID no. 13595508
  misc_feature (1)..(282): NCBI GI NO: 37534050 NR Description: putative Transcription initiation factor IIE
  misc_feature (1)..(280): NCBI GI NO: 15235379 NR Description: expressed protein [Arabidopsis thaliana]
  misc_feature (1)..(278): NCBI GI NO: 15233477 NR Description: expressed protein [Arabidopsis thaliana]
  misc_feature (1)..(277): NCBI GI NO: 39545898 NR Description: TFIIE-beta 1 [Arabidopsis thaliana]
  misc_feature (14)..(273): NCBI GI NO: 228298 NR Description: transcription factor IIE:SUBUNIT=small 34kD
  misc_feature (14)..(273): NCBI GI NO: 228300 NR Description: transcription factor IIE:SUBUNIT=beta
  misc_feature (14)..(273): NCBI GI NO: 4504195 NR Description: general transcription factor IIE
  misc_feature (27)..(273): NCBI GI NO: 18043581 NR Description: general transcription factor II E, polypeptide 2
  misc_feature (23)..(273): NCBI GI NO: 34878722 NR Description: similar to general transcription factor II E
  misc_feature (14)..(273): NCBI GI NO: 11611843 NR Description: general transcription factor [Homo sapiens]
MDLKDSLSRFKQQQERCQSSLASIAASQASTTKPKHRAQPINAPSAPARPAQPIKFSNDTERLQDINSIRKSPVGAQIKLVIELLYKTRQAFTAEQINDATYVDINGNKAVFDSLRNNLKVHYDGRRFSYKSKHDLEGKDQLLDLIRCHQEGLAVVEVKDAYPSVLEDLQALKAAGEVWLLSNMDSQEDIVYPNDPKVKIKVDDDLKELFRGIELPRDMVDIEKELQKNGMKPMTDTTKRRAAAQIHGVKPKAKPKKKQREITKRTKLTNAHLPELFQHLKS

SEQ ID NO: 7545 - DNA, 990 bp, Glycine max
  misc_feature (1)..(990): Ceres Seq. ID no. 14301994
gcacagcttgttccttaattaaagcaaaaaaaaaatcacaatggttaaaacctctctccctctcaccgctttcttcttcctcctcctcatctcctcctccttagccgcagacaccggccggctctttctcaccgtcgtcaaccactgtcccttcaccgtctggccagccattcagcccaacgccggccaccccgtcctcgagaaaggtggcttcgctctcccaaccaacacccaccgctctttctccccaccaaccacccactggtccggtcgtatctggggtcgaaccggctgctcccactacaacggcaaattctcttgcgtcaccggagactgcggaaaccgtctcgagtgcaacggtctcggtggcgcaactccggcttctctcgctcagttcgacctccaccacggtggacacagagacttatcctcctacggtgtctctctagtcgacggtttcaacgttccgatgacagttactcctcacgaaggccgtggagtttgtcccgttgttggttgtcgcgaagacctcttgagaacgtgcccggctcatcttcagctccggtcgggacacggtggacacgtggtggcctgtaagagtgggtgtgaggcgttccgcacggatgagttgtgctgtaggaaccattacaatagtcctcaaacatgtcgtgcttcgagccattcgctgttctttaagcacgcgtgtccttcgactatgacgttcgctcatgatagtccatcgcttatgcatgattgttcttctcctagagagctcaaagtcatcttctgccactaatgtgtctctcttgttcggtttattctgtatggttgtactagtgatatcgcactaatctcttatctttctggtttgattggtttagtttgtgatttcccgcgtcagttatgttgttgttcaaaaactatgtagtccaactatgcgattatgtattattatcttttgaattgattctgcttagttatcttcttcat

SEQ ID NO: 7546 - protein, 251 aa, Glycine max
  peptide (1)..(251): Ceres Seq. ID no. 14301995
  misc_feature (34)..(251): Pfam Name: Pfam Description:  Thaumatin family
  misc_feature (1)..(251): NCBI GI NO: 27373045 NR Description: cytokinin-binding protein [Brassica oleracea]
  misc_feature (1)..(251): NCBI GI NO: 15226956 NR Description: osmotin-like protein, putative
  misc_feature (1)..(251): NCBI GI NO: 21554129 NR Description: putative thaumatin [Arabidopsis thaliana]
  misc_feature (1)..(251): NCBI GI NO: 27373047 NR Description: cytokinin binding protein [Arabidopsis thaliana]
  misc_feature (3)..(251): NCBI GI NO: 2501182 NR Description: OSMOTIN-LIKE PROTEIN PRECURSOR
  misc_feature (12)..(251): NCBI GI NO: 5823278 NR Description: osmotin-like protein [Benincasa hispida]
  misc_feature (14)..(251): NCBI GI NO: 34908134 NR Description: osmotin-like protein
  misc_feature (5)..(250): NCBI GI NO: 15222875 NR Description: thaumatin family [Arabidopsis thaliana]
  misc_feature (5)..(250): NCBI GI NO: 4105697 NR Description: thaumatin-like protein [Arabidopsis thaliana]
  misc_feature (5)..(250): NCBI GI NO: 15221033 NR Description: thaumatin-like protein [Arabidopsis thaliana]
MVKTSLPLTAFFFLLLISSSLAADTGRLFLTVVNHCPFTVWPAIQPNAGHPVLEKGGFALPTNTHRSFSPPTTHWSGRIWGRTGCSHYNGKFSCVTGDCGNRLECNGLGGATPASLAQFDLHHGGHRDLSSYGVSLVDGFNVPMTVTPHEGRGVCPVVGCREDLLRTCPAHLQLRSGHGGHVVACKSGCEAFRTDELCCRNHYNSPQTCRASSHSLFFKHACPSTMTFAHDSPSLMHDCSSPRELKVIFCH

SEQ ID NO: 7547 - DNA, 788 bp, Glycine max
  misc_feature (1)..(788): Ceres Seq. ID no. 15224680
cacgagacccagacccgcagaccgccttcccccccactcctctccgcttccagactcctcttcgccgccgattcgtcccgccgccccatccgctccgtcgcgacgccatgtcggtgacgctgcacacgaacctgggggacatcaaggtggaggttttctgcgaccaggtgccgcggacggcggagaactttttagccctgtgcgcgagcggctactacgacggcaccgtcttccaccgcaacatcaaggggttcatggtgcagggcggcgacccgacgggcaccggcaagggcggcgcctcgatctggggcggcaagttcgcggacgagttccgggaggcgctcaagcacggcgcccggggcaccctgtccatggccaactccgggcccaacaccaacggcagccagttcttcatcacctacgccaagcagccccacctcaacggccactacaccgtgttcgccaaggtcatccacggcttcgacgtgcttgacctcatggagaagacccccaccggccccgccgaccgccccctcgccgagatcaggctcaaccgcgtcaccgtccacgccaaccccctcgccgggtaggcctttcttctctcctggatggctggcctggcctggcctggcctctgctgctaatctaggaaccggaaccaaatttggctctgtaatatcatcatcgtctggttacctgaattctacctacctgcctacccgcaagaacatgatgctgctagtatactggtgtgttgaatgatgatactgcaatgcaagcgtttggct

SEQ ID NO: 7548 - protein, 195 aa, Glycine max
  peptide (1)..(195): Ceres Seq. ID no. 15224681
  misc_feature (36)..(194): NCBI GI NO: 6006361 NR Description: ESTs AU030008
  misc_feature (36)..(195): NCBI GI NO: 30678211 NR Description: expressed protein [Arabidopsis thaliana]
  misc_feature (36)..(194): NCBI GI NO: 28316722 NR Description: peptidylprolyl cis-trans isomerase-like protein 3
  misc_feature (36)..(194): NCBI GI NO: 14043400 NR Description: PPIL3 protein [Homo sapiens]
  misc_feature (36)..(194): NCBI GI NO: 19557636 NR Description: peptidylprolyl isomerase-like protein 3 isoformPPIL3b
  misc_feature (36)..(194): NCBI GI NO: 21746159 NR Description: peptidylprolyl isomerase-like 3
  misc_feature (36)..(194): NCBI GI NO: 28190012 NR Description: CYP10L [Mus musculus]
  misc_feature (36)..(194): NCBI GI NO: 29028318 NR Description: cyclophilin [Homo sapiens]
  misc_feature (36)..(194): NCBI GI NO: 23508361 NR Description: cyclophilin, putative [Plasmodium falciparum 3D7]
  misc_feature (36)..(194): NCBI GI NO: 24652460 NR Description: CG11777-PA [Drosophila melanogaster]
RDPDPQTAFPPTPLRFQTPLRRRFVPPPHPLRRDAMSVTLHTNLGDIKVEVFCDQVPRTAENFLALCASGYYDGTVFHRNIKGFMVQGGDPTGTGKGGASIWGGKFADEFREALKHGARGTLSMANSGPNTNGSQFFITYAKQPHLNGHYTVFAKVIHGFDVLDLMEKTPTGPADRPLAEIRLNRVTVHANPLAG

SEQ ID NO: 7549 - protein, 163 aa, Glycine max
  peptide (1)..(163): Ceres Seq. ID no. 15224682
TRPRPADRLPPHSSPLPDSSSPPIRPAAPSAPSRRHVGDAAHEPGGHQGGGFLRPGAADGGELFSPVRERLLRRHRLPPQHQGVHGAGRRPDGHRQGRRLDLGRQVRGRVPGGAQARRPGHPVHGQLRAQHQRQPVLHHLRQAAPPQRPLHRVRQGHPRLRRA

SEQ ID NO: 7550 - protein, 160 aa, Glycine max
  peptide (1)..(160): Ceres Seq. ID no. 15224683
  misc_feature (1)..(159): NCBI GI NO: 6006361 NR Description: ESTs AU030008
  misc_feature (1)..(160): NCBI GI NO: 30678211 NR Description: expressed protein [Arabidopsis thaliana]
  misc_feature (1)..(159): NCBI GI NO: 28316722 NR Description: peptidylprolyl cis-trans isomerase-like protein 3
  misc_feature (1)..(159): NCBI GI NO: 14043400 NR Description: PPIL3 protein [Homo sapiens]
  misc_feature (1)..(159): NCBI GI NO: 19557636 NR Description: peptidylprolyl isomerase-like protein 3 isoformPPIL3b
  misc_feature (1)..(159): NCBI GI NO: 21746159 NR Description: peptidylprolyl isomerase-like 3
  misc_feature (1)..(159): NCBI GI NO: 28190012 NR Description: CYP10L [Mus musculus]
  misc_feature (1)..(159): NCBI GI NO: 29028318 NR Description: cyclophilin [Homo sapiens]
  misc_feature (1)..(159): NCBI GI NO: 23508361 NR Description: cyclophilin, putative [Plasmodium falciparum 3D7]
  misc_feature (1)..(159): NCBI GI NO: 24652460 NR Description: CG11777-PA [Drosophila melanogaster]
MSVTLHTNLGDIKVEVFCDQVPRTAENFLALCASGYYDGTVFHRNIKGFMVQGGDPTGTGKGGASIWGGKFADEFREALKHGARGTLSMANSGPNTNGSQFFITYAKQPHLNGHYTVFAKVIHGFDVLDLMEKTPTGPADRPLAEIRLNRVTVHANPLAG

SEQ ID NO: 7551 - DNA, 832 bp, Glycine max
  misc_feature (1)..(832): Ceres Seq. ID no. 13595127
acctagaacatcctaatcgaaaaagcagcgtggtaggcgccgcaactcgaccaaaccacacgaaggggaaacccaaattccctcccaacttctctacctctccggcctccacccaggagagccctaagccggaagcgccttacccttaagctctcttgacctctccccatggcgtccgcgtggtgcctcttggcgccggccgccaccggcgcggcgccgggcgctctcggcgtctccgcctccgaatccagaggcgtcttcgccgcgcgggcggcggtccctgagaggacgcggcgcaggtgggactcgctcgtggtgtgcgtggcccccgacgaggagaagattacgcggcgctcgcccctcgatttccccatcgaatgggagaaacctaagcctgggaggagacctgacatcttcccaaagttcagccctatgaaaacaccattgccccatccattaccagctgatgatcctctggatgatgatgaggaagaagaagaggaagaagcacaacctcaagaagaaccacaggaggatgatcctgacaaggaggatcctgaggaagatgacccagacaagccaactgagtaattttggatgaggtggcctgtggtagatagaagccgtgtcgtatcttccagagaatatgtggcgtctgagctattcagaaatgttagttgtgtcggattatataggctctagacataagtttgctcagcagggacctttgagcttttctgaagctatacaaattttgttccactagtttcaatttgaatttatatgtattcttctgaaaggtatttgcctatacgacacaataagctgttgc

SEQ ID NO: 7552 - protein, 140 aa, Glycine max
  peptide (1)..(140): Ceres Seq. ID no. 15221491
  misc_feature (5)..(136): NCBI GI NO: 18404214 NR Description: expressed protein [Arabidopsis thaliana]
  misc_feature (5)..(136): NCBI GI NO: 21553725 NR Description: unknown [Arabidopsis thaliana]
  misc_feature (1)..(137): NCBI GI NO: 18398354 NR Description: expressed protein [Arabidopsis thaliana]
  misc_feature (52)..(136): NCBI GI NO: 26452533 NR Description: unknown protein [Arabidopsis thaliana]
MASAWCLLAPAATGAAPGALGVSASESRGVFAARAAVPERTRRRWDSLVVCVAPDEEKITRRSPLDFPIEWEKPKPGRRPDIFPKFSPMKTPLPHPLPADDPLDDDEEEEEEEAQPQEEPQEDDPDKEDPEEDDPDKPTE

SEQ ID NO: 7553 - DNA, 659 bp, Glycine max
  misc_feature (1)..(659): Ceres Seq. ID no. 14301996
tcaaattctcttctgggtttcctaaattctcaacctttttctccaaattcggcttcttaaaatcatggttcgctgtagcaacaacctcgttggcatactcaacttcatcgtcttcctcctctctatccccatcttagctggaggaatctggcttagccaaaacgaaagtggaatccctaacctctacagcctccactcttggattggtattggtgtcatttctctttatggcttccaggtaaaccttagaagtgggttgcttccgtggcacgcaatcctaggcctatttgtttatatactcgcggttgggaacgcagctttagggtttctggagaagctgactttcctggagagtggtgctaagctcgacaagtacgggccagaagcgtttcttgtgaacttcacagccattgtcaccattctctttggtgccttggtggtactcactgcttctgctaagtctccctcctccattgacgatgctgataactacagctattctgctatatgaaaacgctttatacatttcttcagttcctcgcatatctttgctgctacttgtgctgtcaaaagattatataattatatgatgtatttgtagtgaaaacactttgtgtttgtgattccgctgattatgagtttgattacttctggtgtgc

SEQ ID NO: 7554 - protein, 148 aa, Glycine max
  peptide (1)..(148): Ceres Seq. ID no. 14301997
  misc_feature (11)..(135): Pfam Name: Pfam Description:  Cytochrome b561
  misc_feature (11)..(148): NCBI GI NO: 21553731 NR Description: cytochrome b561 [Arabidopsis thaliana]
  misc_feature (11)..(148): NCBI GI NO: 7486819 NR Description: hypothetical protein M7J2
  misc_feature (11)..(148): NCBI GI NO: 12597245 NR Description: cytochrome b561 [Arabidopsis thaliana]
  misc_feature (11)..(148): NCBI GI NO: 18416576 NR Description: expressed protein [Arabidopsis thaliana]
  misc_feature (11)..(148): NCBI GI NO: 25407597 NR Description: hypothetical protein AT4g25570
  misc_feature (33)..(144): NCBI GI NO: 38346996 NR Description: OSJNBb0039L24.15
  misc_feature (5)..(148): NCBI GI NO: 37535830 NR Description: putative cytochrome b-561
  misc_feature (34)..(133): NCBI GI NO: 38637027 NR Description: putative cytochrome b561
  misc_feature (33)..(97): NCBI GI NO: 6822123 NR Description: putative cytochrome B 561
  misc_feature (34)..(127): NCBI GI NO: 15240965 NR Description: cytochrome b-561 (gb|AAD45585.1)
MVRCSNNLVGILNFIVFLLSIPILAGGIWLSQNESGIPNLYSLHSWIGIGVISLYGFQVNLRSGLLPWHAILGLFVYILAVGNAALGFLEKLTFLESGAKLDKYGPEAFLVNFTAIVTILFGALVVLTASAKSPSSIDDADNYSYSAI

SEQ ID NO: 7555 - DNA, 1183 bp, Glycine max
  misc_feature (1)..(1183): Ceres Seq. ID no. 13595509
cttcctctcctcagatcgttcctcttcgtctccttcaatcactcgtaagactcttccgagacggtgtgttcgctctttgattgaatggaaagtgaagacatgcattcgaaacctgacggtgggaatcagatcgtttcagagtcggttcatcatcactccataaatagtttaaacccttggcaacgtgctgctgctgcctgcaatgcaagttctttagtggaggaagctggagataagtctatagctttggagaaccaaaacaattgggaatcaactaatggttccaagtcaccatctcataaagatgaaaatggtaacaaggaatcaccacaagtcacatcctctccccaacaatcagctggagattacagtgaaaaaagtcaagaacttgtgcatgttggcgtcacaggacctcctcaccctcaacttgttagccacacaggatgggcatcctcaaatccataccaggatccttattatgctggaatgatgggagcctatcccatggcttatgttccatatggtgggatgcctcattcaagaatgccactgcctcctgaggtggcacaggaaccagtttatgtgaatgctaaacagtaccaggcgatacttaggcgaaggcaggcacgcgccaaggcagagcttgaaatgaagctaatcaaatccagaaagccttatctccatgaatctcggcatcagcatgctatgaggaggcctaggggcactggaggccggtttgcaaagaaaacaaacaccgaagtttcacagccgaaacctggagaaaagaacaatgctactcagtccccgacgtcatctcactctgaccaacctgaagcctggaatgatgagtgtagaaaacagtctgaagagatgcaaagctcagcttctaagagaagggaagaagcagactgttcagggcaacaatggaacagcatttcctcaaaccatacttctgaagctcgtctagccatcaaatgacatctccactggcaactcattcttggctctctctttgttggcttatttggtagcagccattgaagagtcccctgtacaaatacttctgtgtttttcttcttttgtgatatgtcaaatgttactgctttcttttgtcaactctctttagcacatttttgaatcaaaaactatgtgtttaaaattaaattccaaagtgtgcaaactg

SEQ ID NO: 7556 - protein, 297 aa, Glycine max
  peptide (1)..(297): Ceres Seq. ID no. 13595510
  misc_feature (162)..(218): Pfam Name: CBF-B/NF-YA Pfam Description: CCAAT-binding transcription factor
  misc_feature (1)..(297): NCBI GI NO: 1173618 NR Description: CCAAT-binding factor B subunit homolog
  misc_feature (1)..(297): NCBI GI NO: 1586551 NR Description: CCAAT-binding factor:SUBUNIT=B
  misc_feature (2)..(297): NCBI GI NO: 7488444 NR Description: CCAAT-binding factor B chain homolog
  misc_feature (1)..(297): NCBI GI NO: 18402799 NR Description: CCAAT-binding factor B chain -related
  misc_feature (6)..(297): NCBI GI NO: 9293997 NR Description: CCAAT-binding transcription factor B subunit
  misc_feature (6)..(260): NCBI GI NO: 30684143 NR Description: CCAAT box binding factor/ transcription factorHap2a
  misc_feature (6)..(260): NCBI GI NO: 18416875 NR Description: CCAAT box binding factor/ transcription factorHap2a
  misc_feature (6)..(236): NCBI GI NO: 27552556 NR Description: putative CCAAT-binding transcription factor
  misc_feature (74)..(249): NCBI GI NO: 38640734 NR Description: transcription factor WAPB [Triticum aestivum]
  misc_feature (62)..(242): NCBI GI NO: 28209479 NR Description: putative CCAAT-binding transcription factor
MESEDMHSKPDGGNQIVSESVHHHSINSLNPWQRAAAACNASSLVEEAGDKSIALENQNNWESTNGSKSPSHKDENGNKESPQVTSSPQQSAGDYSEKSQELVHVGVTGPPHPQLVSHTGWASSNPYQDPYYAGMMGAYPMAYVPYGGMPHSRMPLPPEVAQEPVYVNAKQYQAILRRRQARAKAELEMKLIKSRKPYLHESRHQHAMRRPRGTGGRFAKKTNTEVSQPKPGEKNNATQSPTSSHSDQPEAWNDECRKQSEEMQSSASKRREEADCSGQQWNSISSNHTSEARLAIK

SEQ ID NO: 7557 - protein, 292 aa, Glycine max
  peptide (1)..(292): Ceres Seq. ID no. 13595511
  misc_feature (157)..(213): Pfam Name: CBF-B/NF-YA Pfam Description: CCAAT-binding transcription factor
  misc_feature (1)..(292): NCBI GI NO: 1173618 NR Description: CCAAT-binding factor B subunit homolog
  misc_feature (1)..(292): NCBI GI NO: 1586551 NR Description: CCAAT-binding factor:SUBUNIT=B
  misc_feature (1)..(292): NCBI GI NO: 7488444 NR Description: CCAAT-binding factor B chain homolog
  misc_feature (1)..(292): NCBI GI NO: 18402799 NR Description: CCAAT-binding factor B chain -related
  misc_feature (1)..(292): NCBI GI NO: 9293997 NR Description: CCAAT-binding transcription factor B subunit
  misc_feature (1)..(255): NCBI GI NO: 30684143 NR Description: CCAAT box binding factor/ transcription factorHap2a
  misc_feature (1)..(255): NCBI GI NO: 18416875 NR Description: CCAAT box binding factor/ transcription factorHap2a
  misc_feature (1)..(231): NCBI GI NO: 27552556 NR Description: putative CCAAT-binding transcription factor
  misc_feature (69)..(244): NCBI GI NO: 38640734 NR Description: transcription factor WAPB [Triticum aestivum]
  misc_feature (57)..(237): NCBI GI NO: 28209479 NR Description: putative CCAAT-binding transcription factor
MHSKPDGGNQIVSESVHHHSINSLNPWQRAAAACNASSLVEEAGDKSIALENQNNWESTNGSKSPSHKDENGNKESPQVTSSPQQSAGDYSEKSQELVHVGVTGPPHPQLVSHTGWASSNPYQDPYYAGMMGAYPMAYVPYGGMPHSRMPLPPEVAQEPVYVNAKQYQAILRRRQARAKAELEMKLIKSRKPYLHESRHQHAMRRPRGTGGRFAKKTNTEVSQPKPGEKNNATQSPTSSHSDQPEAWNDECRKQSEEMQSSASKRREEADCSGQQWNSISSNHTSEARLAIK

SEQ ID NO: 7558 - protein, 163 aa, Glycine max
  peptide (1)..(163): Ceres Seq. ID no. 13595512
  misc_feature (28)..(84): Pfam Name: CBF-B/NF-YA Pfam Description: CCAAT-binding transcription factor
  misc_feature (1)..(163): NCBI GI NO: 1173618 NR Description: CCAAT-binding factor B subunit homolog
  misc_feature (1)..(163): NCBI GI NO: 1586551 NR Description: CCAAT-binding factor:SUBUNIT=B
  misc_feature (1)..(163): NCBI GI NO: 7488444 NR Description: CCAAT-binding factor B chain homolog
  misc_feature (1)..(163): NCBI GI NO: 18402799 NR Description: CCAAT-binding factor B chain -related
  misc_feature (1)..(163): NCBI GI NO: 9293997 NR Description: CCAAT-binding transcription factor B subunit
  misc_feature (1)..(126): NCBI GI NO: 30684143 NR Description: CCAAT box binding factor/ transcription factorHap2a
  misc_feature (1)..(126): NCBI GI NO: 18416875 NR Description: CCAAT box binding factor/ transcription factorHap2a
  misc_feature (1)..(102): NCBI GI NO: 27552556 NR Description: putative CCAAT-binding transcription factor
  misc_feature (1)..(115): NCBI GI NO: 38640734 NR Description: transcription factor WAPB [Triticum aestivum]
  misc_feature (1)..(108): NCBI GI NO: 28209479 NR Description: putative CCAAT-binding transcription factor
MMGAYPMAYVPYGGMPHSRMPLPPEVAQEPVYVNAKQYQAILRRRQARAKAELEMKLIKSRKPYLHESRHQHAMRRPRGTGGRFAKKTNTEVSQPKPGEKNNATQSPTSSHSDQPEAWNDECRKQSEEMQSSASKRREEADCSGQQWNSISSNHTSEARLAIK

SEQ ID NO: 7559 - DNA, 816 bp, Glycine max
  misc_feature (1)..(816): Ceres Seq. ID no. 13595433
ttttttcttcggttcggggttttagcagtgaagtagcgaaaatggcgtctacatcgtgttttgatccttatcaacttgagcgagttgcagatattttcacaggccaagatctaagatccgagttacaaagcaaaatggcgatggtttcaggaagacgttctacgctaaaccccaacgcgcctctctttgtcccagcagccgttagacaagtggaagatttctctccggagtggtggcagttggtgacgacctccacttggtaccacgactactggatcagccagcaccaaggagctgacggattctacgacaacggagagagtggtgaagtcgatgtagctgatcttcttccagagtcgtttgatttcgatgatattgaagatgtcttcgaggccgagtttgatcatcaaggttacggtggatatgttggacaacagatgtatcatgcaccttctgactttggtttagggaagaatggtgagatggtgaggaaatcgagtgggaacaggagtcctaggtcgattgttgaaccggcgaagtatgcagagaagccagcgaaatgggggaaccagaaggttgctccacgaaacattcaccagcctcgttgaagtgcaaagttaactaggcagagtatgttgtatctttagccacttgtacctttgtaatttttagtattttctgctttccacaagagagaacctgtaacttctttgtacctttatgatgttcagtctcaaacttgttatctcaaaaaaaaatgtaaaaacataaaaaaattgtaaaatttgaagagtaatgagaaatagagtttcacat

SEQ ID NO: 7560 - protein, 201 aa, Glycine max
  peptide (1)..(201): Ceres Seq. ID no. 13595434
  misc_feature (45)..(201): NCBI GI NO: 15227351 NR Description: ERD15 protein [Arabidopsis thaliana]
  misc_feature (45)..(201): NCBI GI NO: 21592689 NR Description: ERD15 protein [Arabidopsis thaliana]
  misc_feature (45)..(201): NCBI GI NO: 8489786 NR Description: dehydration-induced protein ERD15
  misc_feature (53)..(201): NCBI GI NO: 34395186 NR Description: unknown protein
  misc_feature (53)..(201): NCBI GI NO: 34899128 NR Description: P0496C02.30
  misc_feature (46)..(93): NCBI GI NO: 18414176 NR Description: expressed protein [Arabidopsis thaliana]
  misc_feature (46)..(93): NCBI GI NO: 21592596 NR Description: unknown [Arabidopsis thaliana]
FSSVRGFSSEVAKMASTSCFDPYQLERVADIFTGQDLRSELQSKMAMVSGRRSTLNPNAPLFVPAAVRQVEDFSPEWWQLVTTSTWYHDYWISQHQGADGFYDNGESGEVDVADLLPESFDFDDIEDVFEAEFDHQGYGGYVGQQMYHAPSDFGLGKNGEMVRKSSGNRSPRSIVEPAKYAEKPAKWGNQKVAPRNIHQPR

SEQ ID NO: 7561 - protein, 188 aa, Glycine max
  peptide (1)..(188): Ceres Seq. ID no. 13595435
  misc_feature (32)..(188): NCBI GI NO: 15227351 NR Description: ERD15 protein [Arabidopsis thaliana]
  misc_feature (32)..(188): NCBI GI NO: 21592689 NR Description: ERD15 protein [Arabidopsis thaliana]
  misc_feature (32)..(188): NCBI GI NO: 8489786 NR Description: dehydration-induced protein ERD15
  misc_feature (40)..(188): NCBI GI NO: 34395186 NR Description: unknown protein
  misc_feature (40)..(188): NCBI GI NO: 34899128 NR Description: P0496C02.30
  misc_feature (33)..(80): NCBI GI NO: 18414176 NR Description: expressed protein [Arabidopsis thaliana]
  misc_feature (33)..(80): NCBI GI NO: 21592596 NR Description: unknown [Arabidopsis thaliana]
MASTSCFDPYQLERVADIFTGQDLRSELQSKMAMVSGRRSTLNPNAPLFVPAAVRQVEDFSPEWWQLVTTSTWYHDYWISQHQGADGFYDNGESGEVDVADLLPESFDFDDIEDVFEAEFDHQGYGGYVGQQMYHAPSDFGLGKNGEMVRKSSGNRSPRSIVEPAKYAEKPAKWGNQKVAPRNIHQPR

SEQ ID NO: 7562 - protein, 157 aa, Glycine max
  peptide (1)..(157): Ceres Seq. ID no. 13595436
  misc_feature (1)..(157): NCBI GI NO: 15227351 NR Description: ERD15 protein [Arabidopsis thaliana]
  misc_feature (1)..(157): NCBI GI NO: 21592689 NR Description: ERD15 protein [Arabidopsis thaliana]
  misc_feature (1)..(157): NCBI GI NO: 8489786 NR Description: dehydration-induced protein ERD15
  misc_feature (9)..(157): NCBI GI NO: 34395186 NR Description: unknown protein
  misc_feature (9)..(157): NCBI GI NO: 34899128 NR Description: P0496C02.30
  misc_feature (2)..(49): NCBI GI NO: 18414176 NR Description: expressed protein [Arabidopsis thaliana]
  misc_feature (2)..(49): NCBI GI NO: 21592596 NR Description: unknown [Arabidopsis thaliana]
MAMVSGRRSTLNPNAPLFVPAAVRQVEDFSPEWWQLVTTSTWYHDYWISQHQGADGFYDNGESGEVDVADLLPESFDFDDIEDVFEAEFDHQGYGGYVGQQMYHAPSDFGLGKNGEMVRKSSGNRSPRSIVEPAKYAEKPAKWGNQKVAPRNIHQPR

SEQ ID NO: 7563 - DNA, 1460 bp, Glycine max
  misc_feature (1)..(1460): Ceres Seq. ID no. 13595513
aatttatagatcgagcgagttcaacaccttattaatttgttttgtttctttcttttgatttccttagagggagggaaagagtgacacaaacaaagcaatgaaggagaagaagagaggtttcaaagaatggttcacatcatcccaagttctattgggtatgatactagtacaaatttttcttactgggttgcagttactatcaaggatcatattggttcgtggctttttcatcttttccctcattgtatatcgtcaccttgttgctgctatttgtgttgccccctttgcattctactttgaaagaggccgcacaaagaaatatactttgaaagtttggttttggctctttgttaacgcattgacagggatggttctggctcaaggattattctattatggtttgagagatacttctgccacttactctgtcaattttctcaacttggttcctatatccaccttctttacctctatcatatttagatgggagaaattgggtctgcacacttgggcgggtagagctaagtgtggaggggcaattttgtgtgttgggggagcattagctagtctttacaaagggaaggaattttatcttggtcatcatagtcatcatgttcaaattgttgttgcggcacacaaaactcacatgcttcggggcactttccttttgatttgcagttgcttctcatacacaacatggtttattgttcaagtccaattgcttaaagtatttccactaaggtatacaggaacaatgctagcatgcattttggcagcaattcaaggaggaataataggtatttgcatagattccagaaaagctgcttggagattagagtggaatttacaattggtcactatattgtactcgggagcactagctacagctgctacattcagcctactatcttgggtaattacaatcaaaggaccaagttatcccccaatgttcaatcccctaggtcttatttttgtggccttttcagaagctatcatacttggcgaaccattaaccgttggaatgttgctaggcatgattttgatcatggtaggattatacttctttttgtggggcaaaaacaatgagactaaacgcatggttcaacaaccaattgtatcaattgcagaagtatcaaacgtgactgatttgtctactggggcagaatcagtggccacaatagtgccaaattcttcacctacaaattcagtaattctagaacttgaaaagtctgacaaaaactaaaaaaaataaataatcctttgaatgtatgagagctaaagttcaaggcagagattagaaaagtgcaatattttttaaccatagtatgtgaaaggtacaacacaatgtttaaatttaaaggattgtgttgtaaaattgatagttagctttggccttcatcacaaagtggataaaatagactaaaatgcttgacatataaattaccctactaaaatgctcg

SEQ ID NO: 7564 - protein, 381 aa, Glycine max
  peptide (1)..(381): Ceres Seq. ID no. 13595514
  misc_feature (196)..(325): Pfam Name: Pfam Description:  Integral membrane protein DUF6
  misc_feature (9)..(330): NCBI GI NO: 37532092 NR Description: nodulin-like protein
  misc_feature (21)..(330): NCBI GI NO: 22795291 NR Description: nodulin-like protein
  misc_feature (21)..(327): NCBI GI NO: 37532154 NR Description: nodulin-like protein
  misc_feature (19)..(330): NCBI GI NO: 37573001 NR Description: putative nodulin MtN21
  misc_feature (21)..(308): NCBI GI NO: 22795260 NR Description: nodulin-like protein
  misc_feature (21)..(331): NCBI GI NO: 38345836 NR Description: OSJNBa0070M12.19
  misc_feature (19)..(334): NCBI GI NO: 28932880 NR Description: nodulin-like protein [Gossypium hirsutum]
  misc_feature (19)..(334): NCBI GI NO: 28932732 NR Description: putative nodulin protein [Gossypium hirsutum]
  misc_feature (14)..(330): NCBI GI NO: 38605909 NR Description: OSJNBb0088C09.3
  misc_feature (19)..(330): NCBI GI NO: 34894456 NR Description: putative MtN21
MKEKKRGFKEWFTSSQVLLGMILVQIFLTGLQLLSRIILVRGFFIFSLIVYRHLVAAICVAPFAFYFERGRTKKYTLKVWFWLFVNALTGMVLAQGLFYYGLRDTSATYSVNFLNLVPISTFFTSIIFRWEKLGLHTWAGRAKCGGAILCVGGALASLYKGKEFYLGHHSHHVQIVVAAHKTHMLRGTFLLICSCFSYTTWFIVQVQLLKVFPLRYTGTMLACILAAIQGGIIGICIDSRKAAWRLEWNLQLVTILYSGALATAATFSLLSWVITIKGPSYPPMFNPLGLIFVAFSEAIILGEPLTVGMLLGMILIMVGLYFFLWGKNNETKRMVQQPIVSIAEVSNVTDLSTGAESVATIVPNSSPTNSVILELEKSDKN

SEQ ID NO: 7565 - protein, 361 aa, Glycine max
  peptide (1)..(361): Ceres Seq. ID no. 13595515
  misc_feature (176)..(305): Pfam Name: Pfam Description:  Integral membrane protein DUF6
  misc_feature (1)..(310): NCBI GI NO: 37532092 NR Description: nodulin-like protein
  misc_feature (1)..(310): NCBI GI NO: 22795291 NR Description: nodulin-like protein
  misc_feature (1)..(307): NCBI GI NO: 37532154 NR Description: nodulin-like protein
  misc_feature (1)..(310): NCBI GI NO: 37573001 NR Description: putative nodulin MtN21
  misc_feature (1)..(288): NCBI GI NO: 22795260 NR Description: nodulin-like protein
  misc_feature (1)..(311): NCBI GI NO: 38345836 NR Description: OSJNBa0070M12.19
  misc_feature (1)..(314): NCBI GI NO: 28932880 NR Description: nodulin-like protein [Gossypium hirsutum]
  misc_feature (1)..(314): NCBI GI NO: 28932732 NR Description: putative nodulin protein [Gossypium hirsutum]
  misc_feature (1)..(310): NCBI GI NO: 38605909 NR Description: OSJNBb0088C09.3
  misc_feature (1)..(310): NCBI GI NO: 34894456 NR Description: putative MtN21
MILVQIFLTGLQLLSRIILVRGFFIFSLIVYRHLVAAICVAPFAFYFERGRTKKYTLKVWFWLFVNALTGMVLAQGLFYYGLRDTSATYSVNFLNLVPISTFFTSIIFRWEKLGLHTWAGRAKCGGAILCVGGALASLYKGKEFYLGHHSHHVQIVVAAHKTHMLRGTFLLICSCFSYTTWFIVQVQLLKVFPLRYTGTMLACILAAIQGGIIGICIDSRKAAWRLEWNLQLVTILYSGALATAATFSLLSWVITIKGPSYPPMFNPLGLIFVAFSEAIILGEPLTVGMLLGMILIMVGLYFFLWGKNNETKRMVQQPIVSIAEVSNVTDLSTGAESVATIVPNSSPTNSVILELEKSDKN

SEQ ID NO: 7566 - protein, 291 aa, Glycine max
  peptide (1)..(291): Ceres Seq. ID no. 13595516
  misc_feature (106)..(235): Pfam Name: Pfam Description:  Integral membrane protein DUF6
  misc_feature (1)..(240): NCBI GI NO: 37532092 NR Description: nodulin-like protein
  misc_feature (1)..(240): NCBI GI NO: 22795291 NR Description: nodulin-like protein
  misc_feature (1)..(237): NCBI GI NO: 37532154 NR Description: nodulin-like protein
  misc_feature (1)..(240): NCBI GI NO: 37573001 NR Description: putative nodulin MtN21
  misc_feature (1)..(218): NCBI GI NO: 22795260 NR Description: nodulin-like protein
  misc_feature (1)..(241): NCBI GI NO: 38345836 NR Description: OSJNBa0070M12.19
  misc_feature (1)..(244): NCBI GI NO: 28932880 NR Description: nodulin-like protein [Gossypium hirsutum]
  misc_feature (1)..(244): NCBI GI NO: 28932732 NR Description: putative nodulin protein [Gossypium hirsutum]
  misc_feature (1)..(240): NCBI GI NO: 38605909 NR Description: OSJNBb0088C09.3
  misc_feature (1)..(240): NCBI GI NO: 34894456 NR Description: putative MtN21
MVLAQGLFYYGLRDTSATYSVNFLNLVPISTFFTSIIFRWEKLGLHTWAGRAKCGGAILCVGGALASLYKGKEFYLGHHSHHVQIVVAAHKTHMLRGTFLLICSCFSYTTWFIVQVQLLKVFPLRYTGTMLACILAAIQGGIIGICIDSRKAAWRLEWNLQLVTILYSGALATAATFSLLSWVITIKGPSYPPMFNPLGLIFVAFSEAIILGEPLTVGMLLGMILIMVGLYFFLWGKNNETKRMVQQPIVSIAEVSNVTDLSTGAESVATIVPNSSPTNSVILELEKSDKN

SEQ ID NO: 7567 - DNA, 809 bp, Glycine max
  misc_feature (1)..(809): Ceres Seq. ID no. 15227150
actgcccttccgaagcctctcccaaaccctcccgccgccgccgccgccgcccgccaccgaacagcagccatgccgcccaagctcgacccgtcgcaggtggtggaggtctacgtccgggtgaccggaggcgaggtcggcgcggcgtcttcgcttgcccccaagatcggccccctcggtctctcccccaagaagatcggtgaggacatcgccaaggagacggccaaggactggaagggcctccgcgtcaccgtcaagctcaccgtccagaaccgtcaggccaaggtctccgtcgtcccttccgccgcggcgctcgtcatcaagtccctcaaggagcccgagagggacaggaagaaggtgaagaacatcaagcacaacggcaacatcagcctcgacgacgtcatcgagatcgccaagatcatgaagcccaggtccatggccaaggagatggccgggactgtcaaggagatcctcggcacctgcgtcagcgtcggctgcaccgtcgacgggaaggaccccaaggacctgcagacggagatcgacgacggcgaggtcgagatcccctccgcttaaaggccgatgtcgaggtgattatcatctgatgatatggaagtcataccctgttgcaaatgttgcctatgtacctcccaaacgatgtgatccctcctctttttgtcatgttttagcagtaatcctgtgagacctcattgttactactgcatatttggtctttgcaatgtagtttgtgcacttcagttaacttaatctataccattcagtggtgagaagtttgttcaaaaaaaaaaaaaaaa

SEQ ID NO: 7568 - protein, 189 aa, Glycine max
  peptide (1)..(189): Ceres Seq. ID no. 15227151
  misc_feature (99)..(167): Pfam Name: Pfam Description:  Ribosomal protein L11, RNA binding domain
  misc_feature (24)..(189): NCBI GI NO: 38567975 NR Description: OSJNBa0093F12.16
  misc_feature (24)..(187): NCBI GI NO: 40287508 NR Description: 60S ribosomal protein L12 [Capsicum annuum]
  misc_feature (24)..(188): NCBI GI NO: 15239409 NR Description: 60S ribosomal protein L12 (RPL12C)
  misc_feature (24)..(187): NCBI GI NO: 15228098 NR Description: 60S ribosomal protein L12 (RPL12A)
  misc_feature (24)..(187): NCBI GI NO: 15231814 NR Description: 60S ribosomal protein L12 (RPL12B)
  misc_feature (24)..(187): NCBI GI NO: 6094002 NR Description: 60S RIBOSOMAL PROTEIN L12
  misc_feature (24)..(165): NCBI GI NO: 3986695 NR Description: ribosomal protein L12 [Cichorium intybus]
  misc_feature (33)..(189): NCBI GI NO: 1710485 NR Description: 60S RIBOSOMAL PROTEIN L12
  misc_feature (24)..(187): NCBI GI NO: 19075397 NR Description: 60s ribosomal protein l12
  misc_feature (24)..(188): NCBI GI NO: 31235341 NR Description: ENSANGP00000019214 [Anopheles gambiae]
TALPKPLPNPPAAAAAARHRTAAMPPKLDPSQVVEVYVRVTGGEVGAASSLAPKIGPLGLSPKKIGEDIAKETAKDWKGLRVTVKLTVQNRQAKVSVVPSAAALVIKSLKEPERDRKKVKNIKHNGNISLDDVIEIAKIMKPRSMAKEMAGTVKEILGTCVSVGCTVDGKDPKDLQTEIDDGEVEIPSA

SEQ ID NO: 7569 - protein, 166 aa, Glycine max
  peptide (1)..(166): Ceres Seq. ID no. 15227152
  misc_feature (76)..(144): Pfam Name: Pfam Description:  Ribosomal protein L11, RNA binding domain
  misc_feature (1)..(166): NCBI GI NO: 38567975 NR Description: OSJNBa0093F12.16
  misc_feature (1)..(164): NCBI GI NO: 40287508 NR Description: 60S ribosomal protein L12 [Capsicum annuum]
  misc_feature (1)..(165): NCBI GI NO: 15239409 NR Description: 60S ribosomal protein L12 (RPL12C)
  misc_feature (1)..(164): NCBI GI NO: 15228098 NR Description: 60S ribosomal protein L12 (RPL12A)
  misc_feature (1)..(164): NCBI GI NO: 15231814 NR Description: 60S ribosomal protein L12 (RPL12B)
  misc_feature (1)..(164): NCBI GI NO: 6094002 NR Description: 60S RIBOSOMAL PROTEIN L12
  misc_feature (1)..(142): NCBI GI NO: 3986695 NR Description: ribosomal protein L12 [Cichorium intybus]
  misc_feature (10)..(166): NCBI GI NO: 1710485 NR Description: 60S RIBOSOMAL PROTEIN L12
  misc_feature (1)..(164): NCBI GI NO: 19075397 NR Description: 60s ribosomal protein l12
  misc_feature (1)..(165): NCBI GI NO: 31235341 NR Description: ENSANGP00000019214 [Anopheles gambiae]
MPPKLDPSQVVEVYVRVTGGEVGAASSLAPKIGPLGLSPKKIGEDIAKETAKDWKGLRVTVKLTVQNRQAKVSVVPSAAALVIKSLKEPERDRKKVKNIKHNGNISLDDVIEIAKIMKPRSMAKEMAGTVKEILGTCVSVGCTVDGKDPKDLQTEIDDGEVEIPSA

SEQ ID NO: 7570 - DNA, 1479 bp, Glycine max
  misc_feature (1)..(1479): Ceres Seq. ID no. 13582321
aattactagttctttctggctctgccgctgtctgtttgcgaacgccattacgttatacttgcatctaaacagcatttcacaggtgacgatactgattgagaggtagaaatgcctggtttcagcagtgtaggaaccttcaagatatttgtcgggaacttggcagaaaaaacagtatctgctgatattagacccttattcgagaaatatggaaaagttatcgaatgtgatgtggttaaggattttggatttgtgcatatggaaaatgaagagtcaggcagagacgccattcaaaatctaaatggttatctggtccatggatcagcaatgaaagtggaagctgccaccagtaggaaggggccgaacacacccacaacgaaaattttcgtgggcaacctctcagataacacaagagcacctcaagttcgctcactctttactaaatacggcacagttgtggaatgtgacattgtcagaaactatggatttgtgcacattgattgtccagacgtaaacaaaatggtagaggaactgaatggtcaagtggttgatggacagccaatgaaagtacaaatatcaacaagcaaagttcgccaaaggcctggaatgggcaatccagaacaatgctacagaatgggcccagatcgtttccgtggaagaatgggctttggaagagacccttacccacccccaccaccacccccattcctgagagacaggatgcttagtggaggatttggcggaaaggacagttactacgaccgctattatgacaggccagctgcacgatttgatgaccgggactcatttgataggaggttgccccctcttcctccacgagacttaggaccacgcagagattttatgcctccccctcccatcccaccccgtgagccactccctccccttggtcttaggggcccaccctcctccctgagagactcctttgaacgttccatgtatagccgtcggtcaccaccaccgccttctgccagatatggccgcctctatgatgactattccagggactcatatgatgatcgcagaattggcctgcgaggggcgtcaccgcgccggttcacgccgtattaattactcgctcgggtaatgattggtgagcgagcggtaacggagcggtacgtatcaacagccgacgaccgttccatatgttgacgattacatcttattttatttaagaacctttattgatgtcacactgttggtgactgtcatcacgccatttaatttgtttactatagataatatgtataatgtagttgacgtacattaagtcaaatccgtgcggcttacaatgcattaaaagtcgtgctcggataactgttgtgtgttttgtatgagtcatgttttatatatgtagtaaccgagcaaatgttttgctttctgtcttattaaagaaataaaaccaaaaaaaaaaaaaaaaaagcttatcgataccgtcgacctcgagggggggcccggtac

SEQ ID NO: 7571 - protein, 326 aa, Glycine max
  peptide (1)..(326): Ceres Seq. ID no. 13582322
  misc_feature (91)..(153): Pfam Name: a.k.a. RRM, RBD, or RNP domain Pfam Description: RNA recognition motif.
  misc_feature (1)..(310): NCBI GI NO: 17647581 NR Description: lark CG8597-PA [Drosophila melanogaster]
  misc_feature (11)..(178): NCBI GI NO: 28277979 NR Description: Similar to RNA binding motif protein 4
  misc_feature (11)..(178): NCBI GI NO: 4506445 NR Description: RNA binding motif protein 4 [Homo sapiens]
  misc_feature (11)..(178): NCBI GI NO: 7657502 NR Description: RNA binding motif protein 4 [Mus musculus]
  misc_feature (11)..(178): NCBI GI NO: 13899354 NR Description: hypothetical protein similar to RNA-binding proteinlark
  misc_feature (11)..(178): NCBI GI NO: 27754120 NR Description: RBM4-like protein [Mus musculus]
  misc_feature (11)..(178): NCBI GI NO: 26340398 NR Description: unnamed protein product [Mus musculus]
  misc_feature (11)..(178): NCBI GI NO: 13182931 NR Description: RNA-binding protein lark [Oryctolagus cuniculus]
  misc_feature (11)..(325): NCBI GI NO: 38648979 NR Description: Unknown (protein for MGC:75893)
  misc_feature (11)..(292): NCBI GI NO: 27881945 NR Description: Similar to RNA binding motif protein 4
MPGFSSVGTFKIFVGNLAEKTVSADIRPLFEKYGKVIECDVVKDFGFVHMENEESGRDAIQNLNGYLVHGSAMKVEAATSRKGPNTPTTKIFVGNLSDNTRAPQVRSLFTKYGTVVECDIVRNYGFVHIDCPDVNKMVEELNGQVVDGQPMKVQISTSKVRQRPGMGNPEQCYRMGPDRFRGRMGFGRDPYPPPPPPPFLRDRMLSGGFGGKDSYYDRYYDRPAARFDDRDSFDRRLPPLPPRDLGPRRDFMPPPPIPPREPLPPLGLRGPPSSLRDSFERSMYSRRSPPPPSARYGRLYDDYSRDSYDDRRIGLRGASPRRFTPY

SEQ ID NO: 7572 - protein, 277 aa, Glycine max
  peptide (1)..(277): Ceres Seq. ID no. 13582323
  misc_feature (42)..(104): Pfam Name: a.k.a. RRM, RBD, or RNP domain Pfam Description: RNA recognition motif.
  misc_feature (1)..(261): NCBI GI NO: 17647581 NR Description: lark CG8597-PA [Drosophila melanogaster]
  misc_feature (1)..(129): NCBI GI NO: 28277979 NR Description: Similar to RNA binding motif protein 4
  misc_feature (1)..(129): NCBI GI NO: 4506445 NR Description: RNA binding motif protein 4 [Homo sapiens]
  misc_feature (1)..(129): NCBI GI NO: 7657502 NR Description: RNA binding motif protein 4 [Mus musculus]
  misc_feature (1)..(129): NCBI GI NO: 26340398 NR Description: unnamed protein product [Mus musculus]
  misc_feature (1)..(129): NCBI GI NO: 27754120 NR Description: RBM4-like protein [Mus musculus]
  misc_feature (1)..(129): NCBI GI NO: 13899354 NR Description: hypothetical protein similar to RNA-binding proteinlark
  misc_feature (1)..(129): NCBI GI NO: 13182931 NR Description: RNA-binding protein lark [Oryctolagus cuniculus]
  misc_feature (1)..(276): NCBI GI NO: 38648979 NR Description: Unknown (protein for MGC:75893)
  misc_feature (1)..(243): NCBI GI NO: 27881945 NR Description: Similar to RNA binding motif protein 4
MENEESGRDAIQNLNGYLVHGSAMKVEAATSRKGPNTPTTKIFVGNLSDNTRAPQVRSLFTKYGTVVECDIVRNYGFVHIDCPDVNKMVEELNGQVVDGQPMKVQISTSKVRQRPGMGNPEQCYRMGPDRFRGRMGFGRDPYPPPPPPPFLRDRMLSGGFGGKDSYYDRYYDRPAARFDDRDSFDRRLPPLPPRDLGPRRDFMPPPPIPPREPLPPLGLRGPPSSLRDSFERSMYSRRSPPPPSARYGRLYDDYSRDSYDDRRIGLRGASPRRFTPY

SEQ ID NO: 7573 - protein, 254 aa, Glycine max
  peptide (1)..(254): Ceres Seq. ID no. 13582324
  misc_feature (19)..(81): Pfam Name: a.k.a. RRM, RBD, or RNP domain Pfam Description: RNA recognition motif.
  misc_feature (1)..(238): NCBI GI NO: 17647581 NR Description: lark CG8597-PA [Drosophila melanogaster]
  misc_feature (1)..(106): NCBI GI NO: 28277979 NR Description: Similar to RNA binding motif protein 4
  misc_feature (1)..(106): NCBI GI NO: 4506445 NR Description: RNA binding motif protein 4 [Homo sapiens]
  misc_feature (1)..(106): NCBI GI NO: 27754120 NR Description: RBM4-like protein [Mus musculus]
  misc_feature (1)..(106): NCBI GI NO: 7657502 NR Description: RNA binding motif protein 4 [Mus musculus]
  misc_feature (1)..(106): NCBI GI NO: 13182931 NR Description: RNA-binding protein lark [Oryctolagus cuniculus]
  misc_feature (1)..(106): NCBI GI NO: 13899354 NR Description: hypothetical protein similar to RNA-binding proteinlark
  misc_feature (1)..(106): NCBI GI NO: 26340398 NR Description: unnamed protein product [Mus musculus]
  misc_feature (1)..(253): NCBI GI NO: 38648979 NR Description: Unknown (protein for MGC:75893)
  misc_feature (1)..(220): NCBI GI NO: 27881945 NR Description: Similar to RNA binding motif protein 4
MKVEAATSRKGPNTPTTKIFVGNLSDNTRAPQVRSLFTKYGTVVECDIVRNYGFVHIDCPDVNKMVEELNGQVVDGQPMKVQISTSKVRQRPGMGNPEQCYRMGPDRFRGRMGFGRDPYPPPPPPPFLRDRMLSGGFGGKDSYYDRYYDRPAARFDDRDSFDRRLPPLPPRDLGPRRDFMPPPPIPPREPLPPLGLRGPPSSLRDSFERSMYSRRSPPPPSARYGRLYDDYSRDSYDDRRIGLRGASPRRFTPY

SEQ ID NO: 7574 - DNA, 1349 bp, Glycine max
  misc_feature (1)..(1349): Ceres Seq. ID no. 13595142
acttttcgagaaaaatttacttccttagaaaatgtcgcgtgcgatgtgcaacccatcaatggtgagtaggagtgttctagggtcccaaacgagttcaaaatcggtgacagagacaatgagtggttcccacgagtttgtgatcaagggttactcactaacgaaaggaatgggcattgggaaatacatcgtgagtgagactttcatagtgggagggttccaatgggccatatactttttccctgatggtagggaccccaaagataatgccgcttatgtctctgtcttcgttgcactccattccaagagcaccaatgttcgtgcgttgttcgatctcacgttgctcgacctatgcaagaaaggagagcacaaggttcatagccacttcagtcactccctcacgattgggccttacactctcataaaccatggcagcatgtggggctatacgcggtttttcaaacggagacaccttgagacgtcaaattttctcaaggatgattgcttgaagataaattgcactattgcggttttagtgtcgtccatagattcttctcagttaaacacaatacaggttcctgaatctgatattggtgaacattttgggatgttgttagaggatgaggaatcatttgatgttactttctcggttggtggagaaaggtttcatgctcataagcttgtattggcagctcgatcaaccatgtttgaaactcaattttttaatgctatgaagaaggatgatcaggagatagttgttattgacatggaacctaaggttttcaaggctttacttcattttgtttatagagacactcttttggaagatgaagagctctttatgttggattcgtcattctttccttcgttttctgaatcatttatagcaaagttgttagctgctggagaaaagtatggtttgccaagactaatgttaatgtgtgaatctatactttgtaaagacatatctgtagattctgttgcctatatttttgctcttgcggaccattattgtgctacccacttgaagtccatctgtcaaaaattttctgctgaaaactttgatgcggtgatgcattctgatggttttgagtatcttaagaaaaattgcccattactgcaatcagaactgctaaagactggagtaggatgcgagaaagaatttagttgagagggaaaatactaaattgtatgtgcttaatccaaggtctagtttagaggagtgacgacctaagatccaagtttggaagagaccagaaaaatataaaagaagattatatatatagttttgcagtaatctttttatatattatattatgttactttataaatgaattgaaattacattcttc

SEQ ID NO: 7575 - protein, 378 aa, Glycine max
  peptide (1)..(378): Ceres Seq. ID no. 13595143
  misc_feature (37)..(166): Pfam Name: Pfam Description:  MATH domain
  misc_feature (20)..(378): NCBI GI NO: 21536509 NR Description: unknown [Arabidopsis thaliana]
  misc_feature (20)..(378): NCBI GI NO: 30678912 NR Description: expressed protein [Arabidopsis thaliana]
  misc_feature (12)..(378): NCBI GI NO: 34900034 NR Description: OJ1641_C04.24
  misc_feature (11)..(378): NCBI GI NO: 28269444 NR Description: unknown protein
  misc_feature (1)..(375): NCBI GI NO: 14596183 NR Description: Unknown protein [Arabidopsis thaliana]
  misc_feature (1)..(375): NCBI GI NO: 15242126 NR Description: expressed protein [Arabidopsis thaliana]
  misc_feature (1)..(375): NCBI GI NO: 21536843 NR Description: unknown [Arabidopsis thaliana]
  misc_feature (18)..(372): NCBI GI NO: 11282376 NR Description: hypothetical protein F23N14
  misc_feature (18)..(372): NCBI GI NO: 30691638 NR Description: expressed protein [Arabidopsis thaliana]
  misc_feature (18)..(368): NCBI GI NO: 23617108 NR Description: contains ESTsAU056959
MSRAMCNPSMVSRSVLGSQTSSKSVTETMSGSHEFVIKGYSLTKGMGIGKYIVSETFIVGGFQWAIYFFPDGRDPKDNAAYVSVFVALHSKSTNVRALFDLTLLDLCKKGEHKVHSHFSHSLTIGPYTLINHGSMWGYTRFFKRRHLETSNFLKDDCLKINCTIAVLVSSIDSSQLNTIQVPESDIGEHFGMLLEDEESFDVTFSVGGERFHAHKLVLAARSTMFETQFFNAMKKDDQEIVVIDMEPKVFKALLHFVYRDTLLEDEELFMLDSSFFPSFSESFIAKLLAAGEKYGLPRLMLMCESILCKDISVDSVAYIFALADHYCATHLKSICQKFSAENFDAVMHSDGFEYLKKNCPLLQSELLKTGVGCEKEFS

SEQ ID NO: 7576 - protein, 374 aa, Glycine max
  peptide (1)..(374): Ceres Seq. ID no. 13595144
  misc_feature (33)..(162): Pfam Name: Pfam Description:  MATH domain
  misc_feature (16)..(374): NCBI GI NO: 21536509 NR Description: unknown [Arabidopsis thaliana]
  misc_feature (16)..(374): NCBI GI NO: 30678912 NR Description: expressed protein [Arabidopsis thaliana]
  misc_feature (8)..(374): NCBI GI NO: 34900034 NR Description: OJ1641_C04.24
  misc_feature (7)..(374): NCBI GI NO: 28269444 NR Description: unknown protein
  misc_feature (1)..(371): NCBI GI NO: 14596183 NR Description: Unknown protein [Arabidopsis thaliana]
  misc_feature (1)..(371): NCBI GI NO: 15242126 NR Description: expressed protein [Arabidopsis thaliana]
  misc_feature (1)..(371): NCBI GI NO: 21536843 NR Description: unknown [Arabidopsis thaliana]
  misc_feature (14)..(368): NCBI GI NO: 11282376 NR Description: hypothetical protein F23N14
  misc_feature (14)..(368): NCBI GI NO: 30691638 NR Description: expressed protein [Arabidopsis thaliana]
  misc_feature (14)..(364): NCBI GI NO: 23617108 NR Description: contains ESTsAU056959
MCNPSMVSRSVLGSQTSSKSVTETMSGSHEFVIKGYSLTKGMGIGKYIVSETFIVGGFQWAIYFFPDGRDPKDNAAYVSVFVALHSKSTNVRALFDLTLLDLCKKGEHKVHSHFSHSLTIGPYTLINHGSMWGYTRFFKRRHLETSNFLKDDCLKINCTIAVLVSSIDSSQLNTIQVPESDIGEHFGMLLEDEESFDVTFSVGGERFHAHKLVLAARSTMFETQFFNAMKKDDQEIVVIDMEPKVFKALLHFVYRDTLLEDEELFMLDSSFFPSFSESFIAKLLAAGEKYGLPRLMLMCESILCKDISVDSVAYIFALADHYCATHLKSICQKFSAENFDAVMHSDGFEYLKKNCPLLQSELLKTGVGCEKEFS

SEQ ID NO: 7577 - protein, 369 aa, Glycine max
  peptide (1)..(369): Ceres Seq. ID no. 13595145
  misc_feature (28)..(157): Pfam Name: Pfam Description:  MATH domain
  misc_feature (11)..(369): NCBI GI NO: 21536509 NR Description: unknown [Arabidopsis thaliana]
  misc_feature (11)..(369): NCBI GI NO: 30678912 NR Description: expressed protein [Arabidopsis thaliana]
  misc_feature (3)..(369): NCBI GI NO: 34900034 NR Description: OJ1641_C04.24
  misc_feature (2)..(369): NCBI GI NO: 28269444 NR Description: unknown protein
  misc_feature (1)..(366): NCBI GI NO: 14596183 NR Description: Unknown protein [Arabidopsis thaliana]
  misc_feature (1)..(366): NCBI GI NO: 15242126 NR Description: expressed protein [Arabidopsis thaliana]
  misc_feature (1)..(366): NCBI GI NO: 21536843 NR Description: unknown [Arabidopsis thaliana]
  misc_feature (9)..(363): NCBI GI NO: 11282376 NR Description: hypothetical protein F23N14
  misc_feature (9)..(363): NCBI GI NO: 30691638 NR Description: expressed protein [Arabidopsis thaliana]
  misc_feature (9)..(359): NCBI GI NO: 23617108 NR Description: contains ESTsAU056959
MVSRSVLGSQTSSKSVTETMSGSHEFVIKGYSLTKGMGIGKYIVSETFIVGGFQWAIYFFPDGRDPKDNAAYVSVFVALHSKSTNVRALFDLTLLDLCKKGEHKVHSHFSHSLTIGPYTLINHGSMWGYTRFFKRRHLETSNFLKDDCLKINCTIAVLVSSIDSSQLNTIQVPESDIGEHFGMLLEDEESFDVTFSVGGERFHAHKLVLAARSTMFETQFFNAMKKDDQEIVVIDMEPKVFKALLHFVYRDTLLEDEELFMLDSSFFPSFSESFIAKLLAAGEKYGLPRLMLMCESILCKDISVDSVAYIFALADHYCATHLKSICQKFSAENFDAVMHSDGFEYLKKNCPLLQSELLKTGVGCEKEFS

SEQ ID NO: 7578 - DNA, 1097 bp, Glycine max
  misc_feature (1)..(1097): Ceres Seq. ID no. 14302536
atccagaaataatcactttctccattcgattcttcctcttgctcttgcacccaatctcctcgctacgtagttagctaatctaaccatcagtccaccaaagccaatccactgagtgcgagagctccatctccatctcgatctcgaccaaggagaggaagctagctagctagcaacaggcagcagcaatggcgggcgtgggtcgtaacatggtggcgccgctgctggtgctgaacctcatcatgtacctcattgtcatcggcttcgcaagctggaacctcaaccacttcatcaacggcctcaccaaccgccccggcgtcggcggcaacggagccaccttctacttcctcgtctttgccatcctcgcgggcgtcgtcggcgccgcatccaagctcgccggcgtgcaccacgtccgcacatggcgcggtgacagcctcgccacctccgcctcgtcctcgctcgtggcatgggccatcaccgccttggcgttcgggctggcgtgcaaggagatccacatcggcgggtaccgcgggtggcgcctcagggtgctggaggcgttcgtcattatcctggccttcacgcagctgctttacgtgctggcgctgcactccggcctcttcgggaaccagttgggtggcaaccatgctggtgggtacccggcggagcatgcgtacggcgcaggcggcgacccgcacaacaagggcatgggcatgggcaccggcggcgtcgccagggtctgaatcgggtagagacctcgccgtgctccatcgcttggcggttgacagtgacgggcggataataaggtgtgtgtgtgtgtgtgtgtgtgtgtgtgtgttccgtcccgtatggtgtgagcgtacgttgtatgcagacatggtgtgcacggtaggcatgtagtgacggcgtgcgtgcgtacatgtgtagtactgcaggatgggcccttcttcttagtgtgttttgtgtttattatgtagtccgagatcaagatggagatcgatcagtccatgctatgcttcttcattctccgaccagacaattgcaatgcatgtctgggtgtggatgaatggctgcacttgtttaatttagtactactactctac

SEQ ID NO: 7579 - protein, 183 aa, Glycine max
  peptide (1)..(183): Ceres Seq. ID no. 14302537
  misc_feature (14)..(143): Pfam Name: Pfam Description:  AWPM-19-like family
  misc_feature (1)..(183): NCBI GI NO: 6851373 NR Description: plasma membrane associated protein
  misc_feature (1)..(183): NCBI GI NO: 7489659 NR Description: ABA-induced plasma membrane protein PM 19 - wheat
  misc_feature (1)..(165): NCBI GI NO: 4097340 NR Description: hydrophobic LEA-like protein [Oryza sativa]
  misc_feature (1)..(177): NCBI GI NO: 7488688 NR Description: maturation protein PM3 - soybean
  misc_feature (4)..(172): NCBI GI NO: 18390408 NR Description: expressed protein [Arabidopsis thaliana]
  misc_feature (1)..(142): NCBI GI NO: 34911480 NR Description: putative plasma membrane associated protein
  misc_feature (1)..(140): NCBI GI NO: 15218953 NR Description: plasma membrane associated protein -related
  misc_feature (12)..(110): NCBI GI NO: 34904644 NR Description: putative ABA-induced plasma membrane protein
  misc_feature (121)..(145): NCBI GI NO: 34904644 NR Description: putative ABA-induced plasma membrane protein
  misc_feature (1)..(143): NCBI GI NO: 15239619 NR Description: plasma membrane associated protein -related
MAGVGRNMVAPLLVLNLIMYLIVIGFASWNLNHFINGLTNRPGVGGNGATFYFLVFAILAGVVGAASKLAGVHHVRTWRGDSLATSASSSLVAWAITALAFGLACKEIHIGGYRGWRLRVLEAFVIILAFTQLLYVLALHSGLFGNQLGGNHAGGYPAEHAYGAGGDPHNKGMGMGTGGVARV

SEQ ID NO: 7580 - protein, 176 aa, Glycine max
  peptide (1)..(176): Ceres Seq. ID no. 14302538
  misc_feature (7)..(136): Pfam Name: Pfam Description:  AWPM-19-like family
  misc_feature (1)..(176): NCBI GI NO: 6851373 NR Description: plasma membrane associated protein
  misc_feature (1)..(176): NCBI GI NO: 7489659 NR Description: ABA-induced plasma membrane protein PM 19 - wheat
  misc_feature (1)..(158): NCBI GI NO: 4097340 NR Description: hydrophobic LEA-like protein [Oryza sativa]
  misc_feature (1)..(170): NCBI GI NO: 7488688 NR Description: maturation protein PM3 - soybean
  misc_feature (1)..(165): NCBI GI NO: 18390408 NR Description: expressed protein [Arabidopsis thaliana]
  misc_feature (1)..(135): NCBI GI NO: 34911480 NR Description: putative plasma membrane associated protein
  misc_feature (1)..(133): NCBI GI NO: 15218953 NR Description: plasma membrane associated protein -related
  misc_feature (5)..(103): NCBI GI NO: 34904644 NR Description: putative ABA-induced plasma membrane protein
  misc_feature (114)..(138): NCBI GI NO: 34904644 NR Description: putative ABA-induced plasma membrane protein
  misc_feature (1)..(136): NCBI GI NO: 15239619 NR Description: plasma membrane associated protein -related
MVAPLLVLNLIMYLIVIGFASWNLNHFINGLTNRPGVGGNGATFYFLVFAILAGVVGAASKLAGVHHVRTWRGDSLATSASSSLVAWAITALAFGLACKEIHIGGYRGWRLRVLEAFVIILAFTQLLYVLALHSGLFGNQLGGNHAGGYPAEHAYGAGGDPHNKGMGMGTGGVARV

SEQ ID NO: 7581 - protein, 165 aa, Glycine max
  peptide (1)..(165): Ceres Seq. ID no. 14302539
  misc_feature (1)..(125): Pfam Name: Pfam Description:  AWPM-19-like family
  misc_feature (1)..(165): NCBI GI NO: 6851373 NR Description: plasma membrane associated protein
  misc_feature (1)..(165): NCBI GI NO: 7489659 NR Description: ABA-induced plasma membrane protein PM 19 - wheat
  misc_feature (1)..(147): NCBI GI NO: 4097340 NR Description: hydrophobic LEA-like protein [Oryza sativa]
  misc_feature (1)..(159): NCBI GI NO: 7488688 NR Description: maturation protein PM3 - soybean
  misc_feature (1)..(154): NCBI GI NO: 18390408 NR Description: expressed protein [Arabidopsis thaliana]
  misc_feature (1)..(124): NCBI GI NO: 34911480 NR Description: putative plasma membrane associated protein
  misc_feature (1)..(122): NCBI GI NO: 15218953 NR Description: plasma membrane associated protein -related
  misc_feature (1)..(92): NCBI GI NO: 34904644 NR Description: putative ABA-induced plasma membrane protein
  misc_feature (103)..(127): NCBI GI NO: 34904644 NR Description: putative ABA-induced plasma membrane protein
  misc_feature (1)..(125): NCBI GI NO: 15239619 NR Description: plasma membrane associated protein -related
MYLIVIGFASWNLNHFINGLTNRPGVGGNGATFYFLVFAILAGVVGAASKLAGVHHVRTWRGDSLATSASSSLVAWAITALAFGLACKEIHIGGYRGWRLRVLEAFVIILAFTQLLYVLALHSGLFGNQLGGNHAGGYPAEHAYGAGGDPHNKGMGMGTGGVARV

SEQ ID NO: 7582 - DNA, 1759 bp, Glycine max
  misc_feature (1)..(1759): Ceres Seq. ID no. 13595521
aacggttccctttgttttctttttttctctgctagttgagcaaaaatggaggaagcgagtcctaaaattttcattccaaacacgatccagggagtgagtgagcacgtgacggggcagattgaactgctctgggagttagtgaaagtgccattgatagtgcctctgctgaagcttggagtgtacatttgtttagcaatgtcacttatgcttttcatggagaggctctacatgggcatcgtcatcattctagtgaaactcttctggaaaaaacccgaacagcgttacaactacaagcccctccaagacgacgtcgaattgggctccttcatcttccccacggtcctaatacaaatcccaatgttcaacgaaaaagaggtttacaaggtgtccatcggagcagcttgtgggctttcatggcccagtgaccgtctcgttatccaagtcctggacgattcaactgacactgtcattaaggaaatggtggagcaagaatgtttgagatgggcaagtaaaggcatcaacataacgtaccaaataagggagaacagaacgggttacaaagctggtgcgttgaaagaaggcctcaagcgaagctatgtggagcattgcgagtacgtggcaatattcgacgcggatttcaggccagagccagactttctcaggcgagcgattccattcttggtggggaaccctgagattgccctggttcaagctcgttggaggtttgtgaatgcgaatgagtgcttgttgacaagaatgcaagagatgtcactggattatcatttcacagtagagcaagaagttgggtcagccactcatgctttctttggtttcaatgggacagcgggtatatggagaattgctgctatcaatgaagctggagggtggaaagacagaacaacggtggaggacatggatcttgctgttcgtgccagccttaggggctggaagtttttgtacctcggagaccttcaggcgaaaagtgagcttccaagtactcttagagccttccgcttccagcagcatcgatggtcttgtggtcctgctaatctattccgcaaaatggtgatggagatagtaaggaacaagaaagtaaaattctggaagaaagtgtacgttatatacagcttcttctttgttcgtaaaatcatagctcacatggtcacattcttcttctactgtgtggtgcttcccttgacaattttggtccctgaagttcgtgttccaatttggggagctgtttatattccttccatcatcaccaccctcaactcagtaggcacaccaaggtccattcatctgttgttctactggatcctttttgagaatgcgatgtcattgcaccgtacgaaggcgaccttcataggcctgctagaggccgggagagccaatgagtgggtcgttactgaaaaacttggtgactctgtcaataataagaacaaaagcaatgtcaccaaagcaatcagaaaatctcgattcaaatttggtgaaagacttcatttattggagcttggattcgctgccttcctcttcctttgtggatgctatgactatgtgcacggcaagaactactactttttgtacctcttccttcagaccataaccttctcaatcgtaggatttggctatgttggcaccattgtttagtacttgttaagctaaaatcttcagtgacttaagtttcagagtcactagtgttcatgtcttactagtttctctcctcaataaaatgcaaaaggtagggctgatttctcaagct

SEQ ID NO: 7583 - protein, 533 aa, Glycine max
  peptide (1)..(533): Ceres Seq. ID no. 13595522
  misc_feature (100)..(278): Pfam Name: Pfam Description:  Glycosyl transferase
  misc_feature (1)..(533): NCBI GI NO: 15242959 NR Description: glycosyltransferase family 2
  misc_feature (7)..(533): NCBI GI NO: 34148025 NR Description: glycosyltransferase 10 [Ipomoea trifida]
  misc_feature (7)..(533): NCBI GI NO: 34148021 NR Description: glycosyltransferase 1 [Ipomoea trifida]
  misc_feature (27)..(533): NCBI GI NO: 34148023 NR Description: glycosyltransferase 5 [Ipomoea trifida]
  misc_feature (1)..(533): NCBI GI NO: 15237519 NR Description: glycosyltransferase family 2
  misc_feature (24)..(533): NCBI GI NO: 16519223 NR Description: cellulose synthase-like protein OsCslA9
  misc_feature (12)..(533): NCBI GI NO: 30688411 NR Description: glycosyltransferase family 2
  misc_feature (51)..(533): NCBI GI NO: 30688416 NR Description: glycosyltransferase family 2
  misc_feature (18)..(533): NCBI GI NO: 18403914 NR Description: glycosyltransferase family 2
  misc_feature (18)..(533): NCBI GI NO: 21536839 NR Description: putative glucosyltransferase
MEEASPKIFIPNTIQGVSEHVTGQIELLWELVKVPLIVPLLKLGVYICLAMSLMLFMERLYMGIVIILVKLFWKKPEQRYNYKPLQDDVELGSFIFPTVLIQIPMFNEKEVYKVSIGAACGLSWPSDRLVIQVLDDSTDTVIKEMVEQECLRWASKGINITYQIRENRTGYKAGALKEGLKRSYVEHCEYVAIFDADFRPEPDFLRRAIPFLVGNPEIALVQARWRFVNANECLLTRMQEMSLDYHFTVEQEVGSATHAFFGFNGTAGIWRIAAINEAGGWKDRTTVEDMDLAVRASLRGWKFLYLGDLQAKSELPSTLRAFRFQQHRWSCGPANLFRKMVMEIVRNKKVKFWKKVYVIYSFFFVRKIIAHMVTFFFYCVVLPLTILVPEVRVPIWGAVYIPSIITTLNSVGTPRSIHLLFYWILFENAMSLHRTKATFIGLLEAGRANEWVVTEKLGDSVNNKNKSNVTKAIRKSRFKFGERLHLLELGFAAFLFLCGCYDYVHGKNYYFLYLFLQTITFSIVGFGYVGTIV

SEQ ID NO: 7584 - protein, 483 aa, Glycine max
  peptide (1)..(483): Ceres Seq. ID no. 13595523
  misc_feature (50)..(228): Pfam Name: Pfam Description:  Glycosyl transferase
  misc_feature (1)..(483): NCBI GI NO: 15242959 NR Description: glycosyltransferase family 2
  misc_feature (1)..(483): NCBI GI NO: 34148025 NR Description: glycosyltransferase 10 [Ipomoea trifida]
  misc_feature (1)..(483): NCBI GI NO: 34148021 NR Description: glycosyltransferase 1 [Ipomoea trifida]
  misc_feature (1)..(483): NCBI GI NO: 34148023 NR Description: glycosyltransferase 5 [Ipomoea trifida]
  misc_feature (1)..(483): NCBI GI NO: 15237519 NR Description: glycosyltransferase family 2
  misc_feature (1)..(483): NCBI GI NO: 16519223 NR Description: cellulose synthase-like protein OsCslA9
  misc_feature (1)..(483): NCBI GI NO: 30688411 NR Description: glycosyltransferase family 2
  misc_feature (1)..(483): NCBI GI NO: 30688416 NR Description: glycosyltransferase family 2
  misc_feature (1)..(483): NCBI GI NO: 18403914 NR Description: glycosyltransferase family 2
  misc_feature (1)..(483): NCBI GI NO: 21536839 NR Description: putative glucosyltransferase
MSLMLFMERLYMGIVIILVKLFWKKPEQRYNYKPLQDDVELGSFIFPTVLIQIPMFNEKEVYKVSIGAACGLSWPSDRLVIQVLDDSTDTVIKEMVEQECLRWASKGINITYQIRENRTGYKAGALKEGLKRSYVEHCEYVAIFDADFRPEPDFLRRAIPFLVGNPEIALVQARWRFVNANECLLTRMQEMSLDYHFTVEQEVGSATHAFFGFNGTAGIWRIAAINEAGGWKDRTTVEDMDLAVRASLRGWKFLYLGDLQAKSELPSTLRAFRFQQHRWSCGPANLFRKMVMEIVRNKKVKFWKKVYVIYSFFFVRKIIAHMVTFFFYCVVLPLTILVPEVRVPIWGAVYIPSIITTLNSVGTPRSIHLLFYWILFENAMSLHRTKATFIGLLEAGRANEWVVTEKLGDSVNNKNKSNVTKAIRKSRFKFGERLHLLELGFAAFLFLCGCYDYVHGKNYYFLYLFLQTITFSIVGFGYVGTIV

SEQ ID NO: 7585 - protein, 480 aa, Glycine max
  peptide (1)..(480): Ceres Seq. ID no. 13595524
  misc_feature (47)..(225): Pfam Name: Pfam Description:  Glycosyl transferase
  misc_feature (1)..(480): NCBI GI NO: 15242959 NR Description: glycosyltransferase family 2
  misc_feature (1)..(480): NCBI GI NO: 34148025 NR Description: glycosyltransferase 10 [Ipomoea trifida]
  misc_feature (1)..(480): NCBI GI NO: 34148021 NR Description: glycosyltransferase 1 [Ipomoea trifida]
  misc_feature (1)..(480): NCBI GI NO: 34148023 NR Description: glycosyltransferase 5 [Ipomoea trifida]
  misc_feature (1)..(480): NCBI GI NO: 15237519 NR Description: glycosyltransferase family 2
  misc_feature (1)..(480): NCBI GI NO: 16519223 NR Description: cellulose synthase-like protein OsCslA9
  misc_feature (1)..(480): NCBI GI NO: 30688411 NR Description: glycosyltransferase family 2
  misc_feature (1)..(480): NCBI GI NO: 30688416 NR Description: glycosyltransferase family 2
  misc_feature (1)..(480): NCBI GI NO: 18403914 NR Description: glycosyltransferase family 2
  misc_feature (1)..(480): NCBI GI NO: 21536839 NR Description: putative glucosyltransferase
MLFMERLYMGIVIILVKLFWKKPEQRYNYKPLQDDVELGSFIFPTVLIQIPMFNEKEVYKVSIGAACGLSWPSDRLVIQVLDDSTDTVIKEMVEQECLRWASKGINITYQIRENRTGYKAGALKEGLKRSYVEHCEYVAIFDADFRPEPDFLRRAIPFLVGNPEIALVQARWRFVNANECLLTRMQEMSLDYHFTVEQEVGSATHAFFGFNGTAGIWRIAAINEAGGWKDRTTVEDMDLAVRASLRGWKFLYLGDLQAKSELPSTLRAFRFQQHRWSCGPANLFRKMVMEIVRNKKVKFWKKVYVIYSFFFVRKIIAHMVTFFFYCVVLPLTILVPEVRVPIWGAVYIPSIITTLNSVGTPRSIHLLFYWILFENAMSLHRTKATFIGLLEAGRANEWVVTEKLGDSVNNKNKSNVTKAIRKSRFKFGERLHLLELGFAAFLFLCGCYDYVHGKNYYFLYLFLQTITFSIVGFGYVGTIV

SEQ ID NO: 7586 - DNA, 1412 bp, Glycine max
  misc_feature (1)..(1412): Ceres Seq. ID no. 13595525
atttaaaatttgccgaagaatccaattcagcgatctccgaagagctccatttgttgcactccaattggaaaaaagaagtgaacttgcgatctgggtatccaattttcgaactctttcgatggggaatgatgcagggtcaccgcagggtccggttacgtgtgggtcgtggattcggaggcccgagaatttgaatttggtggtgttgggaaggtccagacgtggcagttcttgtccttctctcttagagattttctccttcgatcccaaaaccacttctttgtctacctctcctctgaccacttatgtgttggaagcagaggaaggtgatcctgttgccattacagttcacccaagtggggatgattttgtgtgcgctctcagcaatggtagctgcaaattgtttgagctgtatggtcgtgaaacaaacatgaagttgttggctaaggaactggctcctctacagggtattggtcctcagaaatgtatttcttttagtgttgatgggtctaaatttgctgctggcggaatggatggacatctcagaatcatggagtggcctagtatgcgtgtgattttggatgaacctagagcacacaattcagttcaggatatggattttagtctagattcagaatttctagcttcaacttctactgatggttcagcaagaatctggaagactgaagatggtgttcctttgaatactttgtctcgcaactcggatgaaaagattgaattatgtcgattttccaaggacggaaccaaaccatttttattttgctctgttcaaaaaggtgatacttctgtcactgcggtttatgatattagcacatggaataaaattgggcataagaggctgattagaaagtctgcttcagtaatgtcaattagcaatgatgggaaatacctttctctgggcagtaaagatggagacatatgtgtagttgaagtaaagaaaatgcagatataccattatagcaagagactgcacctgggtacaaatattgcatcgcttgagttctgtcccggggaaagggttgtacttacaacctcagtagaatggggagcgctggtcactaagctgactgtacctaaagattggaaagaatggcagatctatttggtgctattgggactatttttagcatcagctgttgcattttacatattctttgagaactctgattcattctggaactttcccatgggcaaagaccaaccagcaagaccaaggtttaaacctgtgttaaaagatccccagtcttatgatgatcaaaatatttgggggccagtagatatgtgatcacacagacgttcttgattttagtcttcagtgctgttttggaagctgtaactggtatcaacatttatttttattttttttattactggtatcaacatttatttaagcc

SEQ ID NO: 7587 - protein, 433 aa, Glycine max
  peptide (1)..(433): Ceres Seq. ID no. 13595526
  misc_feature (43)..(411): NCBI GI NO: 18409509 NR Description: transducin / WD-40 repeat protein family
  misc_feature (45)..(428): NCBI GI NO: 34394605 NR Description: transducin / WD-40 repeat protein-like
  misc_feature (49)..(393): NCBI GI NO: 34897162 NR Description: putative membrane protein
  misc_feature (162)..(411): NCBI GI NO: 26450470 NR Description: unknown protein [Arabidopsis thaliana]
  misc_feature (69)..(388): NCBI GI NO: 11358859 NR Description: St12p protein [imported] - Arabidopsis thaliana
  misc_feature (69)..(388): NCBI GI NO: 15226281 NR Description: SEC12p protein / St12p protein
  misc_feature (65)..(389): NCBI GI NO: 18423177 NR Description: St12p protein [Arabidopsis thaliana]
  misc_feature (65)..(382): NCBI GI NO: 8777388 NR Description: protein transport protein SEC12p-like
  misc_feature (69)..(361): NCBI GI NO: 322598 NR Description: St12p protein - Arabidopsis thaliana
  misc_feature (69)..(270): NCBI GI NO: 17473926 NR Description: putative protein transport protein SEC12p
FKICRRIQFSDLRRAPFVALQLEKRSELAIWVSNFRTLSMGNDAGSPQGPVTCGSWIRRPENLNLVVLGRSRRGSSCPSLLEIFSFDPKTTSLSTSPLTTYVLEAEEGDPVAITVHPSGDDFVCALSNGSCKLFELYGRETNMKLLAKELAPLQGIGPQKCISFSVDGSKFAAGGMDGHLRIMEWPSMRVILDEPRAHNSVQDMDFSLDSEFLASTSTDGSARIWKTEDGVPLNTLSRNSDEKIELCRFSKDGTKPFLFCSVQKGDTSVTAVYDISTWNKIGHKRLIRKSASVMSISNDGKYLSLGSKDGDICVVEVKKMQIYHYSKRLHLGTNIASLEFCPGERVVLTTSVEWGALVTKLTVPKDWKEWQIYLVLLGLFLASAVAFYIFFENSDSFWNFPMGKDQPARPRFKPVLKDPQSYDDQNIWGPVDM

SEQ ID NO: 7588 - protein, 394 aa, Glycine max
  peptide (1)..(394): Ceres Seq. ID no. 13595527
  misc_feature (4)..(372): NCBI GI NO: 18409509 NR Description: transducin / WD-40 repeat protein family
  misc_feature (6)..(389): NCBI GI NO: 34394605 NR Description: transducin / WD-40 repeat protein-like
  misc_feature (10)..(354): NCBI GI NO: 34897162 NR Description: putative membrane protein
  misc_feature (123)..(372): NCBI GI NO: 26450470 NR Description: unknown protein [Arabidopsis thaliana]
  misc_feature (30)..(349): NCBI GI NO: 11358859 NR Description: St12p protein [imported] - Arabidopsis thaliana
  misc_feature (30)..(349): NCBI GI NO: 15226281 NR Description: SEC12p protein / St12p protein
  misc_feature (26)..(350): NCBI GI NO: 18423177 NR Description: St12p protein [Arabidopsis thaliana]
  misc_feature (26)..(343): NCBI GI NO: 8777388 NR Description: protein transport protein SEC12p-like
  misc_feature (30)..(322): NCBI GI NO: 322598 NR Description: St12p protein - Arabidopsis thaliana
  misc_feature (30)..(231): NCBI GI NO: 17473926 NR Description: putative protein transport protein SEC12p
MGNDAGSPQGPVTCGSWIRRPENLNLVVLGRSRRGSSCPSLLEIFSFDPKTTSLSTSPLTTYVLEAEEGDPVAITVHPSGDDFVCALSNGSCKLFELYGRETNMKLLAKELAPLQGIGPQKCISFSVDGSKFAAGGMDGHLRIMEWPSMRVILDEPRAHNSVQDMDFSLDSEFLASTSTDGSARIWKTEDGVPLNTLSRNSDEKIELCRFSKDGTKPFLFCSVQKGDTSVTAVYDISTWNKIGHKRLIRKSASVMSISNDGKYLSLGSKDGDICVVEVKKMQIYHYSKRLHLGTNIASLEFCPGERVVLTTSVEWGALVTKLTVPKDWKEWQIYLVLLGLFLASAVAFYIFFENSDSFWNFPMGKDQPARPRFKPVLKDPQSYDDQNIWGPVDM

SEQ ID NO: 7589 - protein, 291 aa, Glycine max
  peptide (1)..(291): Ceres Seq. ID no. 13595528
  misc_feature (1)..(269): NCBI GI NO: 18409509 NR Description: transducin / WD-40 repeat protein family
  misc_feature (1)..(286): NCBI GI NO: 34394605 NR Description: transducin / WD-40 repeat protein-like
  misc_feature (1)..(251): NCBI GI NO: 34897162 NR Description: putative membrane protein
  misc_feature (20)..(269): NCBI GI NO: 26450470 NR Description: unknown protein [Arabidopsis thaliana]
  misc_feature (1)..(246): NCBI GI NO: 11358859 NR Description: St12p protein [imported] - Arabidopsis thaliana
  misc_feature (1)..(246): NCBI GI NO: 15226281 NR Description: SEC12p protein / St12p protein
  misc_feature (1)..(247): NCBI GI NO: 18423177 NR Description: St12p protein [Arabidopsis thaliana]
  misc_feature (1)..(240): NCBI GI NO: 8777388 NR Description: protein transport protein SEC12p-like
  misc_feature (1)..(219): NCBI GI NO: 322598 NR Description: St12p protein - Arabidopsis thaliana
  misc_feature (1)..(128): NCBI GI NO: 17473926 NR Description: putative protein transport protein SEC12p
MKLLAKELAPLQGIGPQKCISFSVDGSKFAAGGMDGHLRIMEWPSMRVILDEPRAHNSVQDMDFSLDSEFLASTSTDGSARIWKTEDGVPLNTLSRNSDEKIELCRFSKDGTKPFLFCSVQKGDTSVTAVYDISTWNKIGHKRLIRKSASVMSISNDGKYLSLGSKDGDICVVEVKKMQIYHYSKRLHLGTNIASLEFCPGERVVLTTSVEWGALVTKLTVPKDWKEWQIYLVLLGLFLASAVAFYIFFENSDSFWNFPMGKDQPARPRFKPVLKDPQSYDDQNIWGPVDM

SEQ ID NO: 7590 - DNA, 787 bp, Glycine max
  misc_feature (1)..(787): Ceres Seq. ID no. 12611578
gatcgatagcagagcaattctcttgcaacttgataagatcgagatacttccagacacacgcgcacacatagggccggagatagaagaatagttatggcttcatcggcggtgagccacagccacggcgggcagcaccagcagcacctgccggcggcggcagggagcatgatggcgcgggtggaccggctggacctggtggtggggtacctggaggagatgcgccaccacagcggcggcagcggcaggtcgtccaccaccgcgaccagcacgctgtcatcgtcatccccgaccacgcctaggtcttcccggcctcatgggtgccggccggcggaggagctgctgcgggaggccaaggccaaggggagcctggtggagcgcatagcgttcctggaggaccgggtgctccggatggaggaggagcgcatggatctgtcgtccagcatggatacggcggagcagaccacgccgacctcgtcggggaggaggacgatgaggatgatgatgagcggcagcggcggggccggggatgagcatgggagtggcgggagcgggaagaaagggaagaaggggctcaagagcttggtcaagtcatgcgtccgagcaggcgccaagctcaagaccaaggaatagtctagtctttcttttgtttctttattattagtcgtgtgtgtacgtgcatatgttcacgtgtacgtacaccatgtacagtaaacgtatgtgtaaatgtgaatgtacacgttgtaataacgaaaaagtagtaatacatgcttgctgtattatcttcgcc

SEQ ID NO: 7591 - protein, 178 aa, Glycine max
  peptide (1)..(178): Ceres Seq. ID no. 12611579
  misc_feature (1)..(116): NCBI GI NO: 40737035 NR Description: hypothetical protein
MASSAVSHSHGGQHQQHLPAAAGSMMARVDRLDLVVGYLEEMRHHSGGSGRSSTTATSTLSSSSPTTPRSSRPHGCRPAEELLREAKAKGSLVERIAFLEDRVLRMEEERMDLSSSMDTAEQTTPTSSGRRTMRMMMSGSGGAGDEHGSGGSGKKGKKGLKSLVKSCVRAGAKLKTKE

SEQ ID NO: 7592 - protein, 154 aa, Glycine max
  peptide (1)..(154): Ceres Seq. ID no. 12611580
  misc_feature (1)..(92): NCBI GI NO: 40737035 NR Description: hypothetical protein
MMARVDRLDLVVGYLEEMRHHSGGSGRSSTTATSTLSSSSPTTPRSSRPHGCRPAEELLREAKAKGSLVERIAFLEDRVLRMEEERMDLSSSMDTAEQTTPTSSGRRTMRMMMSGSGGAGDEHGSGGSGKKGKKGLKSLVKSCVRAGAKLKTKE

SEQ ID NO: 7593 - protein, 153 aa, Glycine max
  peptide (1)..(153): Ceres Seq. ID no. 12611581
  misc_feature (1)..(91): NCBI GI NO: 40737035 NR Description: hypothetical protein
MARVDRLDLVVGYLEEMRHHSGGSGRSSTTATSTLSSSSPTTPRSSRPHGCRPAEELLREAKAKGSLVERIAFLEDRVLRMEEERMDLSSSMDTAEQTTPTSSGRRTMRMMMSGSGGAGDEHGSGGSGKKGKKGLKSLVKSCVRAGAKLKTKE

SEQ ID NO: 7594 - DNA, 1823 bp, Glycine max
  misc_feature (1)..(1823): Ceres Seq. ID no. 13595529
gtgttcacacttccaacccaatcgggctgtcaaaacgacgacgttgacagcccggttctctggagatagacagatagatataggtacattcccagtttcaggtctggaattttgattctagataaggacaagggttgctacttgttggtgttgtgctgtagtattggtttgacaagcttttgcgttgagttgagttgggttgagtttagtatctgcaatgagttcgttttctggagccattcaaagacctctggtggcggctgccgcagttgctgttgcttctttctctgctgatctctccgataaattgccatcacgtgattgttctacctccgatttggcacattctactccttgtagcaacatacaagaatcagattcatcctgggtttctcatatttcggactctaaacttgctaacctatcttttgtgacccagattccggtgcctgtgcctaatgttcaattccgggtaccgagtttgggacagaattgtgtttcaaatttgtaccattcttcggttgcttcatcaccacttcttcggaatttgtatcactctgctgacttgcctagagtctcgaggtctgctgcatattcccatggtatctccaattcaacttctgaggctgaggtcatgtataaatggcatttacccgaactgaatgctttggatgattctagttgttcattgacaaagtcaaggacagtggtggtcttgctgggatggttgggagcaaggcagaaacacttgaagaagtatgcggaatggtacactytaagggggtttcatgtggttaccttcacgtttccaatgggggaggtcctgagttatcagccgggtggaaaagcggagcaaaatgttcatttgcttgtggaccacttggctgagtggttagaaggggaaagtgataagaatcttgtctttcatactttcagcaacactggatggttaacatatggtgttattcttgaacattttcaaaaccaggatccaactatcacggaaaggattaagggatgcattgtagactctgcacctgttgcgtaccctgacccacaggtctgggcctcaggtttctctgctgcatttctcaagaagaatagtgtggctacaaaaggacgtgttttttccgatcaatctggcattaaagtatcaattggcagtgaagatgatttagggctcaaacctgctctaacagaagcagctttactactaattctaaagaaattttttgagatcattctggatcttccttcagtgaacaggaggctctctgatgttatgagcatgttatcatcaaaacaacccagctgtccacagttatacatgtatagctctgctgacagggttattcctgctgattcagtggaatcatttgtagaggctcagcgcagggctggacatgatgtgagggcatgcaattttgtctcctcaccccatgttgaccactttaggaatgacccaagattgtatacatctcagctcagtcagtttttggaggagtgtgttcttagccgttgtaaatcttactaattctttacattccttggcttactcatacaccatatagttcattcattttgatttttgaaagcagccattccattaatggatgttgccatggtggttaggactttatgaaaagtcaaccacctcaaggggattacacaattgttccctcacaggttataattgattcattgacatattgatagtgcaaatgaaagatatgttacacaattgttacctgacagcttataattgatccctcgatatattgatagtgcaaatgaaagattttgcaactttcttcggagggggg

SEQ ID NO: 7595 - protein, 438 aa, Glycine max
  peptide (1)..(438): Ceres Seq. ID no. 15221602
  misc_feature (161)..(427): Pfam Name: DUF829 Pfam Description: Eukaryotic protein of unknown function
  misc_feature (1)..(435): NCBI GI NO: 18402437 NR Description: expressed protein [Arabidopsis thaliana]
  misc_feature (103)..(430): NCBI GI NO: 18398681 NR Description: expressed protein [Arabidopsis thaliana]
  misc_feature (103)..(430): NCBI GI NO: 21536700 NR Description: unknown [Arabidopsis thaliana]
  misc_feature (103)..(272): NCBI GI NO: 25411844 NR Description: probable integral membrane protein
  misc_feature (107)..(274): NCBI GI NO: 39595723 NR Description: Hypothetical protein CBG12665
  misc_feature (368)..(429): NCBI GI NO: 39595723 NR Description: Hypothetical protein CBG12665
  misc_feature (160)..(274): NCBI GI NO: 12838701 NR Description: unnamed protein product [Mus musculus]
  misc_feature (365)..(431): NCBI GI NO: 12838701 NR Description: unnamed protein product [Mus musculus]
  misc_feature (160)..(274): NCBI GI NO: 21312110 NR Description: RIKEN cDNA 1110038M16 [Mus musculus]
  misc_feature (365)..(431): NCBI GI NO: 21312110 NR Description: RIKEN cDNA 1110038M16 [Mus musculus]
  misc_feature (187)..(187): Xaa is any aa, unknown or other
MSSFSGAIQRPLVAAAAVAVASFSADLSDKLPSRDCSTSDLAHSTPCSNIQESDSSWVSHISDSKLANLSFVTQIPVPVPNVQFRVPSLGQNCVSNLYHSSVASSPLLRNLYHSADLPRVSRSAAYSHGISNSTSEAEVMYKWHLPELNALDDSSCSLTKSRTVVVLLGWLGARQKHLKKYAEWYTXRGFHVVTFTFPMGEVLSYQPGGKAEQNVHLLVDHLAEWLEGESDKNLVFHTFSNTGWLTYGVILEHFQNQDPTITERIKGCIVDSAPVAYPDPQVWASGFSAAFLKKNSVATKGRVFSDQSGIKVSIGSEDDLGLKPALTEAALLLILKKFFEIILDLPSVNRRLSDVMSMLSSKQPSCPQLYMYSSADRVIPADSVESFVEAQRRAGHDVRACNFVSSPHVDHFRNDPRLYTSQLSQFLEECVLSRCKSY

SEQ ID NO: 7596 - protein, 299 aa, Glycine max
  peptide (1)..(299): Ceres Seq. ID no. 15221603
  misc_feature (22)..(288): Pfam Name: DUF829 Pfam Description: Eukaryotic protein of unknown function
  misc_feature (1)..(296): NCBI GI NO: 18402437 NR Description: expressed protein [Arabidopsis thaliana]
  misc_feature (1)..(291): NCBI GI NO: 18398681 NR Description: expressed protein [Arabidopsis thaliana]
  misc_feature (1)..(291): NCBI GI NO: 21536700 NR Description: unknown [Arabidopsis thaliana]
  misc_feature (1)..(133): NCBI GI NO: 25411844 NR Description: probable integral membrane protein
  misc_feature (1)..(135): NCBI GI NO: 39595723 NR Description: Hypothetical protein CBG12665
  misc_feature (229)..(290): NCBI GI NO: 39595723 NR Description: Hypothetical protein CBG12665
  misc_feature (21)..(135): NCBI GI NO: 12838701 NR Description: unnamed protein product [Mus musculus]
  misc_feature (226)..(292): NCBI GI NO: 12838701 NR Description: unnamed protein product [Mus musculus]
  misc_feature (21)..(135): NCBI GI NO: 21312110 NR Description: RIKEN cDNA 1110038M16 [Mus musculus]
  misc_feature (226)..(292): NCBI GI NO: 21312110 NR Description: RIKEN cDNA 1110038M16 [Mus musculus]
  misc_feature (48)..(48): Xaa is any aa, unknown or other
MYKWHLPELNALDDSSCSLTKSRTVVVLLGWLGARQKHLKKYAEWYTXRGFHVVTFTFPMGEVLSYQPGGKAEQNVHLLVDHLAEWLEGESDKNLVFHTFSNTGWLTYGVILEHFQNQDPTITERIKGCIVDSAPVAYPDPQVWASGFSAAFLKKNSVATKGRVFSDQSGIKVSIGSEDDLGLKPALTEAALLLILKKFFEIILDLPSVNRRLSDVMSMLSSKQPSCPQLYMYSSADRVIPADSVESFVEAQRRAGHDVRACNFVSSPHVDHFRNDPRLYTSQLSQFLEECVLSRCKSY

SEQ ID NO: 7597 - protein, 240 aa, Glycine max
  peptide (1)..(240): Ceres Seq. ID no. 15221604
  misc_feature (1)..(229): Pfam Name: DUF829 Pfam Description: Eukaryotic protein of unknown function
  misc_feature (1)..(237): NCBI GI NO: 18402437 NR Description: expressed protein [Arabidopsis thaliana]
  misc_feature (1)..(232): NCBI GI NO: 18398681 NR Description: expressed protein [Arabidopsis thaliana]
  misc_feature (1)..(232): NCBI GI NO: 21536700 NR Description: unknown [Arabidopsis thaliana]
  misc_feature (1)..(74): NCBI GI NO: 25411844 NR Description: probable integral membrane protein
  misc_feature (1)..(76): NCBI GI NO: 39595723 NR Description: Hypothetical protein CBG12665
  misc_feature (170)..(231): NCBI GI NO: 39595723 NR Description: Hypothetical protein CBG12665
  misc_feature (1)..(76): NCBI GI NO: 12838701 NR Description: unnamed protein product [Mus musculus]
  misc_feature (167)..(233): NCBI GI NO: 12838701 NR Description: unnamed protein product [Mus musculus]
  misc_feature (1)..(76): NCBI GI NO: 21312110 NR Description: RIKEN cDNA 1110038M16 [Mus musculus]
  misc_feature (167)..(233): NCBI GI NO: 21312110 NR Description: RIKEN cDNA 1110038M16 [Mus musculus]
MGEVLSYQPGGKAEQNVHLLVDHLAEWLEGESDKNLVFHTFSNTGWLTYGVILEHFQNQDPTITERIKGCIVDSAPVAYPDPQVWASGFSAAFLKKNSVATKGRVFSDQSGIKVSIGSEDDLGLKPALTEAALLLILKKFFEIILDLPSVNRRLSDVMSMLSSKQPSCPQLYMYSSADRVIPADSVESFVEAQRRAGHDVRACNFVSSPHVDHFRNDPRLYTSQLSQFLEECVLSRCKSY

SEQ ID NO: 7598 - DNA, 663 bp, Glycine max
  misc_feature (1)..(663): Ceres Seq. ID no. 13595251
atgcaaattcaccaccaccaccaaagcctaaactttaagcaaccaaaatccccctcttctctctatcctcccatccatcttccccatcaacaaaaatagtaacaaatcccatttccctctctctcccccaaaataaaacaaaaaaaaaatccattctttctccattttcaaccccatttccccccaaaaatccaatctttccccatacccacctcccaaaatctcttctttctccaaacccaaatccccaattcccccaaatccaaccaaagagaatcaaacacacaaaaaagaaaacaaatttgtagcttcccaccttcaatgtggcgaccgtggggcaaatcaactgttcgaattcacagcgcgtcttcatcaccctcttccacattctcttgttcttccttcaaagacattcaaaccctttgcctcgacgaacccccacaacaaaaccagcatcatcaacaattaccctctccttcccccacaagaaaaccctccgttttccaccgagtccgactcgccaactcgctcctccgaacctggtcaactcacctccacccccaaccccaacctcccaaactccccgaaccccccgaatccgaacctgatgttgtcgtctcgaaacccgaaccacaacaacctgcgatttattatttcccgggc

SEQ ID NO: 7599 - protein, 114 aa, Glycine max
  peptide (1)..(114): Ceres Seq. ID no. 13595252
  misc_feature (1)..(112): NCBI GI NO: 15237686 NR Description: expressed protein [Arabidopsis thaliana]
MWRPWGKSTVRIHSASSSPSSTFSCSSFKDIQTLCLDEPPQQNQHHQQLPSPSPTRKPSVFHRVRLANSLLRTWSTHLHPQPQPPKLPEPPESEPDVVVSKPEPQQPAIYYFPG

SEQ ID NO: 7600 - DNA, 1028 bp, Glycine max
  misc_feature (1)..(1028): Ceres Seq. ID no. 13639117
gatgatgtttccacggcaatgacagaacaaagatctttctttttctctctgtgtcaggaacttacctctttgaagttataataatattcaagtgaagctcgtcaaggtgaaacagagtttctctgaatcgaagtagcgactcgtgtttttgattccatggctttgacttcgtgcctaaagactggagtagttccgatgtctccgaccaccgggttgtatctttccggcagcctcttgaagtcggacagtggcttcgccgttccgacgaagttacagagtgttcgaaaaagtgatagagagaggttgagaatccaagccgtgttcagctttcctcctgcgttcctaacaagaaacggtcgagcagagaagcagaagcagctgaagcaagaccttctcgaagccattgagcctctcgaacgtggcgccaccgcctcgcctgatgaccagcttcggatcgatcagttggcgcgtaaagtggaagcagtgaatccaaccaaggagcctctgaagtctgatttgctcaatgggaaatgggagctcatttacacaacctctgcttctattctccaggctaagaaaccgaagttcttgagatcaataacaaactaccagtctatcaatgtggataccctcaaggttcaaaacatggagacttggcctttcttcaactcggtaactggagacataagacccctcaattcaaggaaggtcgctgtgcagctcaaagtgtttaaaattctcggccttattcctgtaaatgcacctgaaacagcacgtggtgaactagagattacttatgtggacgaggaactacggttgtcaaggggtgacaagggcaacttgtttatattgaagatgtttgatcccacttaccgaatccctctctgaagccaaatggttccaagcccatcatacatacatacatacccccatcgcttgttctgtctctctcttcatcatcatatgtatagaagaatgtttcttcttctacaaacataaaatcttaataagatcaaaacaagagtctc

SEQ ID NO: 7601 - protein, 243 aa, Glycine max
  peptide (1)..(243): Ceres Seq. ID no. 13639118
  misc_feature (73)..(233): Pfam Name: Pfam Description:  PAP_fibrillin
  misc_feature (1)..(243): NCBI GI NO: 30688146 NR Description: plastid-lipid associated protein PAP/fibrillinfamily
  misc_feature (27)..(243): NCBI GI NO: 17065226 NR Description: Unknown protein [Arabidopsis thaliana]
  misc_feature (1)..(220): NCBI GI NO: 15230986 NR Description: plastid-lipid associated protein PAP/fibrillinfamily
  misc_feature (220)..(243): NCBI GI NO: 15230986 NR Description: plastid-lipid associated protein PAP/fibrillinfamily
  misc_feature (1)..(140): NCBI GI NO: 9279613 NR Description: gene_id:MPE11.25~unknown protein
  misc_feature (173)..(220): NCBI GI NO: 9279613 NR Description: gene_id:MPE11.25~unknown protein
  misc_feature (220)..(243): NCBI GI NO: 9279613 NR Description: gene_id:MPE11.25~unknown protein
  misc_feature (76)..(197): NCBI GI NO: 16329838 NR Description: fibrillin [Synechocystis sp. PCC 6803]
  misc_feature (210)..(232): NCBI GI NO: 16329838 NR Description: fibrillin [Synechocystis sp. PCC 6803]
  misc_feature (76)..(197): NCBI GI NO: 5020103 NR Description: fibrillin [Nostoc sp. PCC 8009]
MALTSCLKTGVVPMSPTTGLYLSGSLLKSDSGFAVPTKLQSVRKSDRERLRIQAVFSFPPAFLTRNGRAEKQKQLKQDLLEAIEPLERGATASPDDQLRIDQLARKVEAVNPTKEPLKSDLLNGKWELIYTTSASILQAKKPKFLRSITNYQSINVDTLKVQNMETWPFFNSVTGDIRPLNSRKVAVQLKVFKILGLIPVNAPETARGELEITYVDEELRLSRGDKGNLFILKMFDPTYRIPL

SEQ ID NO: 7602 - protein, 230 aa, Glycine max
  peptide (1)..(230): Ceres Seq. ID no. 13639119
  misc_feature (60)..(220): Pfam Name: Pfam Description:  PAP_fibrillin
  misc_feature (1)..(230): NCBI GI NO: 30688146 NR Description: plastid-lipid associated protein PAP/fibrillinfamily
  misc_feature (14)..(230): NCBI GI NO: 17065226 NR Description: Unknown protein [Arabidopsis thaliana]
  misc_feature (1)..(207): NCBI GI NO: 15230986 NR Description: plastid-lipid associated protein PAP/fibrillinfamily
  misc_feature (207)..(230): NCBI GI NO: 15230986 NR Description: plastid-lipid associated protein PAP/fibrillinfamily
  misc_feature (1)..(127): NCBI GI NO: 9279613 NR Description: gene_id:MPE11.25~unknown protein
  misc_feature (160)..(207): NCBI GI NO: 9279613 NR Description: gene_id:MPE11.25~unknown protein
  misc_feature (207)..(230): NCBI GI NO: 9279613 NR Description: gene_id:MPE11.25~unknown protein
  misc_feature (63)..(184): NCBI GI NO: 16329838 NR Description: fibrillin [Synechocystis sp. PCC 6803]
  misc_feature (197)..(219): NCBI GI NO: 16329838 NR Description: fibrillin [Synechocystis sp. PCC 6803]
  misc_feature (63)..(184): NCBI GI NO: 5020103 NR Description: fibrillin [Nostoc sp. PCC 8009]
MSPTTGLYLSGSLLKSDSGFAVPTKLQSVRKSDRERLRIQAVFSFPPAFLTRNGRAEKQKQLKQDLLEAIEPLERGATASPDDQLRIDQLARKVEAVNPTKEPLKSDLLNGKWELIYTTSASILQAKKPKFLRSITNYQSINVDTLKVQNMETWPFFNSVTGDIRPLNSRKVAVQLKVFKILGLIPVNAPETARGELEITYVDEELRLSRGDKGNLFILKMFDPTYRIPL

SEQ ID NO: 7603 - DNA, 1605 bp, Glycine max
  misc_feature (1)..(1605): Ceres Seq. ID no. 14311136
ataaaactttgcccaaaaagaggatgttaaagctgggcctgaaataataatactactccaatattctcttctcaaacctactcttctatctttcgctctccccctctgcgtttctgacagtgttactgtgtgtgttttccgcggaaaatcaaaatgggtatcattgaaaagatcaaagaaattgaagccgagatggctcggacacagaaaaataaagccacagagtatcatcttgggcagctcaaggctaaaatagcaaaattaaggacacaattattggagcctccaaaaggttctagtggaggtggagaaggatttgaagttacaaaattcggtcatggacgtgttgcactgattggatttccaagtgtggggaagtctactcttttgacaatgttaacgggcacacattctgaagctgcatcttatgagtttactactttgacctgtattcctgggattatacactataatgatactaaaattcagttactcgatcttcctggaattattgaaggtgcatctgaaggcaagggacgtggaagacaggttattgctgttgctaaatcttcagacatagtattgatggttcttgatgcttccaaaagtgagggtcataggcaaatattgaccaaagagctcgaagctgtgggcttgcggttaaacaagagaccacctcagatatattttaaaaagaaaaagacggggggcatttcattcaacagcactttgcctttgactcatgtggatgagaagctttgttatcagattctgcacgagtacaagattcacaatgcagagatccttttccgtgaggatgctacagtggatgatctcatagatgtcattgaaggaaaccgaaaatacatgaagtgtgtatatgtctacaacaagatagatgttattggtattgatgatgtggacagattagcccgtcaaccaaattctgttgtcattagctgcaatttgaagctgaacttagacagactgcttgcaaggatgtgggatgaaatgggtctggttagagtttacacaaaaccacaaggccagcagcctgattttggtgatcctgtggttctttctgctgatagaggtggctgcactgtagaagacttctgcaaccatatacacagaagtttggtgaaggatgtgaagtatgttctggtctggggtactagtgcaaggcactacccgcagcactgtggtcttagtcacaatcttcatgacgaggatgttgttcagattgtgaagaaaaaggaaaaggaagagggaggaaggggacgatttaaatcacattccaatgctcctgccaggatatctgacagagagaagaaggcaccactgaagacataattatatgacacagcctgtgatttcatcattgatttttgcctagtggatgggaaaaatgactataggtgatgatacatccaaaggcaaaggttcttatcttgattgctcatgcaacataggattgaaaattcctcctgagcactaagtggggcacctatatttttttgtcacccaagtgttgtaacatcccctccccctcttttgaataatagtttttatcagttatgaagtgtgcatctatgatttgaagag

SEQ ID NO: 7604 - protein, 399 aa, Glycine max
  peptide (1)..(399): Ceres Seq. ID no. 14311137
  misc_feature (1)..(267): Pfam Name: Pfam Description:  GTP1/OBG family
  misc_feature (1)..(398): NCBI GI NO: 15218561 NR Description: GTP-binding protein -related
  misc_feature (1)..(398): NCBI GI NO: 15220113 NR Description: developmentally regulated GTP-binding protein
  misc_feature (1)..(398): NCBI GI NO: 2058456 NR Description: GTP-binding protein [Arabidopsis thaliana]
  misc_feature (1)..(398): NCBI GI NO: 13877991 NR Description: putative developmentally regulated GTP-bindingprotein
  misc_feature (1)..(398): NCBI GI NO: 8778457 NR Description: F1L3.17 [Arabidopsis thaliana]
  misc_feature (1)..(398): NCBI GI NO: 7441590 NR Description: GTP binding protein - garden pea
  misc_feature (1)..(367): NCBI GI NO: 34221970 NR Description: developmentally regulated GTP-binding protein drg2
  misc_feature (1)..(367): NCBI GI NO: 4557537 NR Description: developmentally regulated GTP binding protein 2
  misc_feature (1)..(367): NCBI GI NO: 12653443 NR Description: developmentally regulated GTP-binding protein 2
  misc_feature (1)..(367): NCBI GI NO: 17551942 NR Description: GTP-binding protein like (3J337)
MGIIEKIKEIEAEMARTQKNKATEYHLGQLKAKIAKLRTQLLEPPKGSSGGGEGFEVTKFGHGRVALIGFPSVGKSTLLTMLTGTHSEAASYEFTTLTCIPGIIHYNDTKIQLLDLPGIIEGASEGKGRGRQVIAVAKSSDIVLMVLDASKSEGHRQILTKELEAVGLRLNKRPPQIYFKKKKTGGISFNSTLPLTHVDEKLCYQILHEYKIHNAEILFREDATVDDLIDVIEGNRKYMKCVYVYNKIDVIGIDDVDRLARQPNSVVISCNLKLNLDRLLARMWDEMGLVRVYTKPQGQQPDFGDPVVLSADRGGCTVEDFCNHIHRSLVKDVKYVLVWGTSARHYPQHCGLSHNLHDEDVVQIVKKKEKEEGGRGRFKSHSNAPARISDREKKAPLKT

SEQ ID NO: 7605 - protein, 386 aa, Glycine max
  peptide (1)..(386): Ceres Seq. ID no. 14311138
  misc_feature (1)..(254): Pfam Name: Pfam Description:  GTP1/OBG family
  misc_feature (1)..(385): NCBI GI NO: 15218561 NR Description: GTP-binding protein -related
  misc_feature (1)..(385): NCBI GI NO: 15220113 NR Description: developmentally regulated GTP-binding protein
  misc_feature (1)..(385): NCBI GI NO: 2058456 NR Description: GTP-binding protein [Arabidopsis thaliana]
  misc_feature (1)..(385): NCBI GI NO: 13877991 NR Description: putative developmentally regulated GTP-bindingprotein
  misc_feature (1)..(385): NCBI GI NO: 8778457 NR Description: F1L3.17 [Arabidopsis thaliana]
  misc_feature (1)..(385): NCBI GI NO: 7441590 NR Description: GTP binding protein - garden pea
  misc_feature (1)..(354): NCBI GI NO: 34221970 NR Description: developmentally regulated GTP-binding protein drg2
  misc_feature (1)..(354): NCBI GI NO: 4557537 NR Description: developmentally regulated GTP binding protein 2
  misc_feature (1)..(354): NCBI GI NO: 12653443 NR Description: developmentally regulated GTP-binding protein 2
  misc_feature (1)..(354): NCBI GI NO: 17551942 NR Description: GTP-binding protein like (3J337)
MARTQKNKATEYHLGQLKAKIAKLRTQLLEPPKGSSGGGEGFEVTKFGHGRVALIGFPSVGKSTLLTMLTGTHSEAASYEFTTLTCIPGIIHYNDTKIQLLDLPGIIEGASEGKGRGRQVIAVAKSSDIVLMVLDASKSEGHRQILTKELEAVGLRLNKRPPQIYFKKKKTGGISFNSTLPLTHVDEKLCYQILHEYKIHNAEILFREDATVDDLIDVIEGNRKYMKCVYVYNKIDVIGIDDVDRLARQPNSVVISCNLKLNLDRLLARMWDEMGLVRVYTKPQGQQPDFGDPVVLSADRGGCTVEDFCNHIHRSLVKDVKYVLVWGTSARHYPQHCGLSHNLHDEDVVQIVKKKEKEEGGRGRFKSHSNAPARISDREKKAPLKT

SEQ ID NO: 7606 - protein, 319 aa, Glycine max
  peptide (1)..(319): Ceres Seq. ID no. 14311139
  misc_feature (1)..(187): Pfam Name: Pfam Description:  GTP1/OBG family
  misc_feature (1)..(318): NCBI GI NO: 15218561 NR Description: GTP-binding protein -related
  misc_feature (1)..(318): NCBI GI NO: 15220113 NR Description: developmentally regulated GTP-binding protein
  misc_feature (1)..(318): NCBI GI NO: 2058456 NR Description: GTP-binding protein [Arabidopsis thaliana]
  misc_feature (1)..(318): NCBI GI NO: 13877991 NR Description: putative developmentally regulated GTP-bindingprotein
  misc_feature (1)..(318): NCBI GI NO: 8778457 NR Description: F1L3.17 [Arabidopsis thaliana]
  misc_feature (1)..(318): NCBI GI NO: 7441590 NR Description: GTP binding protein - garden pea
  misc_feature (1)..(287): NCBI GI NO: 34221970 NR Description: developmentally regulated GTP-binding protein drg2
  misc_feature (1)..(287): NCBI GI NO: 4557537 NR Description: developmentally regulated GTP binding protein 2
  misc_feature (1)..(287): NCBI GI NO: 12653443 NR Description: developmentally regulated GTP-binding protein 2
  misc_feature (1)..(287): NCBI GI NO: 17551942 NR Description: GTP-binding protein like (3J337)
MLTGTHSEAASYEFTTLTCIPGIIHYNDTKIQLLDLPGIIEGASEGKGRGRQVIAVAKSSDIVLMVLDASKSEGHRQILTKELEAVGLRLNKRPPQIYFKKKKTGGISFNSTLPLTHVDEKLCYQILHEYKIHNAEILFREDATVDDLIDVIEGNRKYMKCVYVYNKIDVIGIDDVDRLARQPNSVVISCNLKLNLDRLLARMWDEMGLVRVYTKPQGQQPDFGDPVVLSADRGGCTVEDFCNHIHRSLVKDVKYVLVWGTSARHYPQHCGLSHNLHDEDVVQIVKKKEKEEGGRGRFKSHSNAPARISDREKKAPLKT

SEQ ID NO: 7607 - DNA, 789 bp, Glycine max
  misc_feature (1)..(789): Ceres Seq. ID no. 13595818
atcaatcaattccgctcctcccccttggatccaaacccttcccatcactctcgcttgactccttggaagcagagagaggaggaggaggaggaggaggaggagaccatgtcgtcgtccggtggcaagctcttcaccctggaggaggtcgccaagcacagctccaaggacgactgctggctcgtcatcggcggcaaggtgtacaatgtgaccaagtttcttgatgaccaccctggaggcgacgacgtcttgctgtcttcaactgccaaggacgcgaccgacgacttcgaggacgtgggacacagcacaaccgcccgggcgatgatggacgagtactacgtcggcgagatcgacgcgaccacgatacccaccaaggtcaagtacacgccgcccaagcagccgcactacaaccaggacaagacccccgagttcgtcatcaagatcctccagttcttggtccccctcgcgatactgggcctggccgtcgccgtacggatctacaccaaggcagactctgtctagcaccgtcatcttataccagtcagtcagtcattcggaagtgtccaagagctgaataagttttagtggggatttgcatattttgtaccagcgtcaccgtcctgtcatggaatctgggaactgctctcgacccgtcgttgcgttatggttctactaagacgtccgctgttgaatcgtgactcgggaaaaacggatagatacttggctatattttccatatcgctggtgaatgttcagacatacatattcttaatttgatgtgattagttgtgt

SEQ ID NO: 7608 - protein, 172 aa, Glycine max
  peptide (1)..(172): Ceres Seq. ID no. 13595819
  misc_feature (43)..(117): Pfam Name: Pfam Description:  Cytochrome b5-like Heme/Steroid binding domain
  misc_feature (39)..(171): NCBI GI NO: 34905998 NR Description: putative cytochrome B5
  misc_feature (36)..(171): NCBI GI NO: 14719320 NR Description: cytochrome B5 [Oryza sativa]
  misc_feature (36)..(171): NCBI GI NO: 1345881 NR Description: Cytochrome b5
  misc_feature (42)..(169): NCBI GI NO: 15225731 NR Description: cytochrome b5, putative [Arabidopsis thaliana]
  misc_feature (40)..(171): NCBI GI NO: 1076621 NR Description: cytochrome b5 - common tobacco
  misc_feature (40)..(171): NCBI GI NO: 1345882 NR Description: CYTOCHROME B5
  misc_feature (40)..(168): NCBI GI NO: 1345925 NR Description: Cytochrome b5, seed isoform
  misc_feature (40)..(171): NCBI GI NO: 1345879 NR Description: Cytochrome b5
  misc_feature (42)..(171): NCBI GI NO: 2647949 NR Description: cytochrome b5 [Olea europaea]
  misc_feature (41)..(171): NCBI GI NO: 12229735 NR Description: Cytochrome b5
INQFRSSPLDPNPSHHSRLTPWKQREEEEEEEEETMSSSGGKLFTLEEVAKHSSKDDCWLVIGGKVYNVTKFLDDHPGGDDVLLSSTAKDATDDFEDVGHSTTARAMMDEYYVGEIDATTIPTKVKYTPPKQPHYNQDKTPEFVIKILQFLVPLAILGLAVAVRIYTKADSV

SEQ ID NO: 7609 - protein, 137 aa, Glycine max
  peptide (1)..(137): Ceres Seq. ID no. 13595820
  misc_feature (8)..(82): Pfam Name: Pfam Description:  Cytochrome b5-like Heme/Steroid binding domain
  misc_feature (4)..(136): NCBI GI NO: 34905998 NR Description: putative cytochrome B5
  misc_feature (1)..(136): NCBI GI NO: 14719320 NR Description: cytochrome B5 [Oryza sativa]
  misc_feature (1)..(136): NCBI GI NO: 1345881 NR Description: Cytochrome b5
  misc_feature (7)..(134): NCBI GI NO: 15225731 NR Description: cytochrome b5, putative [Arabidopsis thaliana]
  misc_feature (5)..(136): NCBI GI NO: 1076621 NR Description: cytochrome b5 - common tobacco
  misc_feature (5)..(136): NCBI GI NO: 1345882 NR Description: CYTOCHROME B5
  misc_feature (5)..(133): NCBI GI NO: 1345925 NR Description: Cytochrome b5, seed isoform
  misc_feature (5)..(136): NCBI GI NO: 1345879 NR Description: Cytochrome b5
  misc_feature (7)..(136): NCBI GI NO: 2647949 NR Description: cytochrome b5 [Olea europaea]
  misc_feature (6)..(136): NCBI GI NO: 12229735 NR Description: Cytochrome b5
MSSSGGKLFTLEEVAKHSSKDDCWLVIGGKVYNVTKFLDDHPGGDDVLLSSTAKDATDDFEDVGHSTTARAMMDEYYVGEIDATTIPTKVKYTPPKQPHYNQDKTPEFVIKILQFLVPLAILGLAVAVRIYTKADSV

SEQ ID NO: 7610 - DNA, 1058 bp, Glycine max
  misc_feature (1)..(1058): Ceres Seq. ID no. 12782188
aaacttcaaagccctcctttgcctctctctcttcgcttattgttgcaccttcctcgtaaaagataactcccggtcggcgtgcatagccgccgattgaggcaaaaaaaaaacacaaaacacactgtagctcatcacagccaaacgcggcgtcaacgatgacgagcttctgaaattccaacttcgcccttcttctctgtgtatattcttttttatttatttattattatttctattattttttcggtgaggttagctccatgcctagtcccaagagcagccgcagcggccagatcgagagtcaccggaggggaaggtcgtcgtccttccacggccagtgcgcgatgtctgtcggtcagctccaccgtccgaagacggtttccgacctcccgtcgctcagaagcctcgccggaacggcgccggcgcctatgccggagggattgcctagacagccgccgaagatgctgctgaaggtgacggtgctgagaagcctcgcgcccgtgcaggtgctgatgacgccgggatccaccgtccgcgacctgatagcggcggcggtgcggcagtacgtgaaggaaggtcgccggccaatcttgccgtccagcgaagtctccgaattcgacctccattattcgcagtttagcctagaaagtttggataggaaggagaagctgctagagcttggatctaggaacttttttctatgtccgagaaagccagctacaacagtggaagatggcgtaacgacgtcgtttgcgtcttgtgcgaaagaggcagagaaagagagggagggatatggtggtggtggtggtgggtttgcttggttcaaactcatgcagttcatgatgtgattggttggttgattagtcattattgttattttatttcaattgaaatgtctttttatttgtcccagaatgaatggccggttacttgtaaaaaataataggttggcttggcaattaggtacagggtttgagatttgtgtgtaagcaaagcaaaattgtaaaatagcatgtatgatttttaaacacatacatggtaatgttaaagctttcaattgc

SEQ ID NO: 7611 - protein, 195 aa, Glycine max
  peptide (1)..(195): Ceres Seq. ID no. 12782189
  misc_feature (13)..(193): NCBI GI NO: 18401542 NR Description: expressed protein; protein id: At2g27830
  misc_feature (1)..(194): NCBI GI NO: 10279678 NR Description: hypothetical protein [Catharanthus roseus]
  misc_feature (19)..(193): NCBI GI NO: 38347592 NR Description: OSJNBa0042I15.5
  misc_feature (1)..(154): NCBI GI NO: 15235787 NR Description: similar to selenium-binding protein-like
  misc_feature (67)..(152): NCBI GI NO: 16226338 NR Description: At1g70780/F5A18_4 [Arabidopsis thaliana]
  misc_feature (67)..(152): NCBI GI NO: 18409673 NR Description: expressed protein; protein id: At1g70780
  misc_feature (67)..(187): NCBI GI NO: 15220659 NR Description: unknown protein; protein id: At1g23150.1
MPSPKSSRSGQIESHRRGRSSSFHGQCAMSVGQLHRPKTVSDLPSLRSLAGTAPAPMPEGLPRQPPKMLLKVTVLRSLAPVQVLMTPGSTVRDLIAAAVRQYVKEGRRPILPSSEVSEFDLHYSQFSLESLDRKEKLLELGSRNFFLCPRKPATTVEDGVTTSFASCAKEAEKEREGYGGGGGGFAWFKLMQFMM

SEQ ID NO: 7612 - protein, 167 aa, Glycine max
  peptide (1)..(167): Ceres Seq. ID no. 12782190
  misc_feature (1)..(165): NCBI GI NO: 18401542 NR Description: expressed protein; protein id: At2g27830
  misc_feature (1)..(166): NCBI GI NO: 10279678 NR Description: hypothetical protein [Catharanthus roseus]
  misc_feature (1)..(165): NCBI GI NO: 38347592 NR Description: OSJNBa0042I15.5
  misc_feature (1)..(126): NCBI GI NO: 15235787 NR Description: similar to selenium-binding protein-like
  misc_feature (39)..(124): NCBI GI NO: 16226338 NR Description: At1g70780/F5A18_4 [Arabidopsis thaliana]
  misc_feature (39)..(124): NCBI GI NO: 18409673 NR Description: expressed protein; protein id: At1g70780
  misc_feature (39)..(159): NCBI GI NO: 15220659 NR Description: unknown protein; protein id: At1g23150.1
MSVGQLHRPKTVSDLPSLRSLAGTAPAPMPEGLPRQPPKMLLKVTVLRSLAPVQVLMTPGSTVRDLIAAAVRQYVKEGRRPILPSSEVSEFDLHYSQFSLESLDRKEKLLELGSRNFFLCPRKPATTVEDGVTTSFASCAKEAEKEREGYGGGGGGFAWFKLMQFMM

SEQ ID NO: 7613 - protein, 139 aa, Glycine max
  peptide (1)..(139): Ceres Seq. ID no. 12782191
  misc_feature (1)..(137): NCBI GI NO: 18401542 NR Description: expressed protein; protein id: At2g27830
  misc_feature (1)..(138): NCBI GI NO: 10279678 NR Description: hypothetical protein [Catharanthus roseus]
  misc_feature (1)..(137): NCBI GI NO: 38347592 NR Description: OSJNBa0042I15.5
  misc_feature (1)..(98): NCBI GI NO: 15235787 NR Description: similar to selenium-binding protein-like
  misc_feature (11)..(96): NCBI GI NO: 16226338 NR Description: At1g70780/F5A18_4 [Arabidopsis thaliana]
  misc_feature (11)..(96): NCBI GI NO: 18409673 NR Description: expressed protein; protein id: At1g70780
  misc_feature (11)..(131): NCBI GI NO: 15220659 NR Description: unknown protein; protein id: At1g23150.1
MPEGLPRQPPKMLLKVTVLRSLAPVQVLMTPGSTVRDLIAAAVRQYVKEGRRPILPSSEVSEFDLHYSQFSLESLDRKEKLLELGSRNFFLCPRKPATTVEDGVTTSFASCAKEAEKEREGYGGGGGGFAWFKLMQFMM

SEQ ID NO: 7614 - DNA, 1542 bp, Glycine max
  misc_feature (1)..(1542): Ceres Seq. ID no. 13639300
aatagcagctcagaaagaaacgcaagttttggcatgggtgtgagctctggaactccactcgtgatccaacacgatagagagagaaaaagggtcttgcctttttttctgcttttgatttgactctttacaaatacaaataaataataaaatcccatcaagaagaaataaatatcaagcccaacccagtgcagtgctgcagggactgtcactgaactcaaaaatgaactgtcttcggaatctttctcgattctctgttttgcccttcgaaacacctgttacgcgccaccgcaagaaccttcccctttccctgggtttcgtcaacaattctcgtcaatatccaactatggccctcaaggctgcctcaggttctataccaagtgcagacacaagtagtgccgataaggaggaagaaaagtctgagacatatagtcataacatgacagaagccatgggtgctgttttgacttataggcatgaattaggaatgaactataatttcatccgtccagacttgattgtgggatcatgcctacagactcctgaagatgtagacaagttgcgtagaattggagtgaaaactatattttgcttacaacaagattcagaccttgaatattttggagttgatattaatgccatacgagaatatgccaagacatgcaatgacattcaacacttgcgtgctgagataagggactttgatgcatttgatctacggaggcggcttccagctgtagttagcaaattatacaaggcaataaattccaatggaggtgtaacatatatacattgcactgctggacttggaagagctccagctgttgcgttggcttatatgttttgggttctgggttataaacttaacgaggctcatacactacttcagagcaaaaggtcgtgctttccaaaactggatgccattaaaagtgcaacagctgatattcttacaggcctcagtaagaagtctgtcactttgtcatgggaagacaaaaattgctctaccgtggaaatttcaggacttgatattggatgggggcagagaatacccctaaattttgatgacaaagagggtttgtggtttctcaagagggaattgcctgaaggactctacgagtacaagtacattgttgatggggaatggacatgcaacagcgatgagcttataacctctcccaacaaagatggccatgtcaacaattttattcaagtccttgatgatacaagcagtgttcgtgcctctcttcggaagagattgacggctgatgatcctgatctcacaacagatgaacaactcagaataaaggagtttcttgaagcttgtcctgatgaggattagtgaaccatcaattcacgtggttgttgatatgaaaaatactagatgcgcgcatacatgttacctaataagattaatctaaaccttacaatatgttgggttcctgcggtttattgagttccatagtaatcaaatgtcttggaaattatttaaatagcaccatgaccttcaaatttcaatgtaccatgaaatagaatgtggctataaaa

SEQ ID NO: 7615 - protein, 371 aa, Glycine max
  peptide (1)..(371): Ceres Seq. ID no. 13639301
  misc_feature (90)..(240): Pfam Name: Pfam Description:  Dual specificity phosphatase, catalytic domain
  misc_feature (1)..(369): NCBI GI NO: 14970762 NR Description: protein tyrosine phosphatase
  misc_feature (1)..(371): NCBI GI NO: 18409505 NR Description: expressed protein [Arabidopsis thaliana]
  misc_feature (1)..(371): NCBI GI NO: 21536905 NR Description: unknown [Arabidopsis thaliana]
  misc_feature (1)..(371): NCBI GI NO: 16612246 NR Description: AT3g52180/F4F15_290 [Arabidopsis thaliana]
  misc_feature (1)..(254): NCBI GI NO: 11288831 NR Description: hypothetical protein F4F15
  misc_feature (274)..(371): NCBI GI NO: 11288831 NR Description: hypothetical protein F4F15
  misc_feature (132)..(330): NCBI GI NO: 11544661 NR Description: PTPKIS1 (truncated form) [Arabidopsis thaliana]
  misc_feature (203)..(308): NCBI GI NO: 34902388 NR Description: Unknown protein
  misc_feature (44)..(80): NCBI GI NO: 34902388 NR Description: Unknown protein
  misc_feature (1)..(241): NCBI GI NO: 18399058 NR Description: expressed protein [Arabidopsis thaliana]
MNCLRNLSRFSVLPFETPVTRHRKNLPLSLGFVNNSRQYPTMALKAASGSIPSADTSSADKEEEKSETYSHNMTEAMGAVLTYRHELGMNYNFIRPDLIVGSCLQTPEDVDKLRRIGVKTIFCLQQDSDLEYFGVDINAIREYAKTCNDIQHLRAEIRDFDAFDLRRRLPAVVSKLYKAINSNGGVTYIHCTAGLGRAPAVALAYMFWVLGYKLNEAHTLLQSKRSCFPKLDAIKSATADILTGLSKKSVTLSWEDKNCSTVEISGLDIGWGQRIPLNFDDKEGLWFLKRELPEGLYEYKYIVDGEWTCNSDELITSPNKDGHVNNFIQVLDDTSSVRASLRKRLTADDPDLTTDEQLRIKEFLEACPDED

SEQ ID NO: 7616 - protein, 330 aa, Glycine max
  peptide (1)..(330): Ceres Seq. ID no. 13639302
  misc_feature (49)..(199): Pfam Name: Pfam Description:  Dual specificity phosphatase, catalytic domain
  misc_feature (1)..(328): NCBI GI NO: 14970762 NR Description: protein tyrosine phosphatase
  misc_feature (1)..(330): NCBI GI NO: 18409505 NR Description: expressed protein [Arabidopsis thaliana]
  misc_feature (1)..(330): NCBI GI NO: 21536905 NR Description: unknown [Arabidopsis thaliana]
  misc_feature (1)..(330): NCBI GI NO: 16612246 NR Description: AT3g52180/F4F15_290 [Arabidopsis thaliana]
  misc_feature (1)..(213): NCBI GI NO: 11288831 NR Description: hypothetical protein F4F15
  misc_feature (233)..(330): NCBI GI NO: 11288831 NR Description: hypothetical protein F4F15
  misc_feature (91)..(289): NCBI GI NO: 11544661 NR Description: PTPKIS1 (truncated form) [Arabidopsis thaliana]
  misc_feature (162)..(267): NCBI GI NO: 34902388 NR Description: Unknown protein
  misc_feature (3)..(39): NCBI GI NO: 34902388 NR Description: Unknown protein
  misc_feature (1)..(200): NCBI GI NO: 18399058 NR Description: expressed protein [Arabidopsis thaliana]
MALKAASGSIPSADTSSADKEEEKSETYSHNMTEAMGAVLTYRHELGMNYNFIRPDLIVGSCLQTPEDVDKLRRIGVKTIFCLQQDSDLEYFGVDINAIREYAKTCNDIQHLRAEIRDFDAFDLRRRLPAVVSKLYKAINSNGGVTYIHCTAGLGRAPAVALAYMFWVLGYKLNEAHTLLQSKRSCFPKLDAIKSATADILTGLSKKSVTLSWEDKNCSTVEISGLDIGWGQRIPLNFDDKEGLWFLKRELPEGLYEYKYIVDGEWTCNSDELITSPNKDGHVNNFIQVLDDTSSVRASLRKRLTADDPDLTTDEQLRIKEFLEACPDED

SEQ ID NO: 7617 - protein, 299 aa, Glycine max
  peptide (1)..(299): Ceres Seq. ID no. 13639303
  misc_feature (18)..(168): Pfam Name: Pfam Description:  Dual specificity phosphatase, catalytic domain
  misc_feature (1)..(297): NCBI GI NO: 14970762 NR Description: protein tyrosine phosphatase
  misc_feature (1)..(299): NCBI GI NO: 18409505 NR Description: expressed protein [Arabidopsis thaliana]
  misc_feature (1)..(299): NCBI GI NO: 21536905 NR Description: unknown [Arabidopsis thaliana]
  misc_feature (1)..(299): NCBI GI NO: 16612246 NR Description: AT3g52180/F4F15_290 [Arabidopsis thaliana]
  misc_feature (1)..(182): NCBI GI NO: 11288831 NR Description: hypothetical protein F4F15
  misc_feature (202)..(299): NCBI GI NO: 11288831 NR Description: hypothetical protein F4F15
  misc_feature (60)..(258): NCBI GI NO: 11544661 NR Description: PTPKIS1 (truncated form) [Arabidopsis thaliana]
  misc_feature (131)..(236): NCBI GI NO: 34902388 NR Description: Unknown protein
  misc_feature (1)..(169): NCBI GI NO: 18399058 NR Description: expressed protein [Arabidopsis thaliana]
  misc_feature (1)..(169): NCBI GI NO: 21592631 NR Description: unknown [Arabidopsis thaliana]
MTEAMGAVLTYRHELGMNYNFIRPDLIVGSCLQTPEDVDKLRRIGVKTIFCLQQDSDLEYFGVDINAIREYAKTCNDIQHLRAEIRDFDAFDLRRRLPAVVSKLYKAINSNGGVTYIHCTAGLGRAPAVALAYMFWVLGYKLNEAHTLLQSKRSCFPKLDAIKSATADILTGLSKKSVTLSWEDKNCSTVEISGLDIGWGQRIPLNFDDKEGLWFLKRELPEGLYEYKYIVDGEWTCNSDELITSPNKDGHVNNFIQVLDDTSSVRASLRKRLTADDPDLTTDEQLRIKEFLEACPDED

SEQ ID NO: 7618 - DNA, 875 bp, Glycine max
  misc_feature (1)..(875): Ceres Seq. ID no. 13595532
ccacgcagtttcgaatccgcaatgaaactcaaccacgtttgaaaaccatgtcaaacatccccacaacgctctcggagatttgcctcacccagtttcggcttgccatgtccatagcagacccgtggcccttctcaagaacccacccagcaagtcccaagtagcaccctcggtcctccttttcacttccattcattccaatacacaccacaccaaacacatctctctcaattcaaattaaggcacatgtccaagaaccgcggattcaacctcaggaggcgcctcatccgggtctcgaaatggatcttcaggaagatacggacgcgggctccacgcgagtaccattgcctgggtgactctcctccgtcacccatggtgaagctccttacgtggggccgcaagctgacagcgggtgccaagtcccgcttgaaagtggcgtccggatccggttatgcccaattaggaaccgatccggacccgagtgtgccgaaggggcacctggccgtgtacgtagggcagaaggacggcgagttgcaccgtgttctggtgccggtaatatacttcaaccaccctttgtttggagaattgctgaagcaggcggaggaggagttcgggttccaccacgaagggggaatcaccatcccgtgccggttcaccgagtttgaacgggtgaagacccgaattgcatccggatctcgcagaggcacccgtccgaaaagattggcctggcgctgaggactgaggtgatgctgaattgctgcccatcctgtaactcaacaaataatattgctttttaggatttttttttttcgtgttgttaattattttttttaacctcgtttaatccgtgaggtaaattttagctttcctgtttacct

SEQ ID NO: 7619 - protein, 162 aa, Glycine max
  peptide (1)..(162): Ceres Seq. ID no. 13595533
  misc_feature (42)..(147): Pfam Name: Pfam Description:  Auxin responsive protein
  misc_feature (1)..(150): NCBI GI NO: 15232400 NR Description: auxin-induced
  misc_feature (1)..(150): NCBI GI NO: 15225432 NR Description: auxin-induced
  misc_feature (1)..(148): NCBI GI NO: 15235723 NR Description: auxin-induced
  misc_feature (1)..(148): NCBI GI NO: 15234550 NR Description: auxin-induced
  misc_feature (6)..(151): NCBI GI NO: 38567865 NR Description: OSJNBa0091D06.3
  misc_feature (80)..(155): NCBI GI NO: 18411465 NR Description: auxin-induced
  misc_feature (80)..(151): NCBI GI NO: 15226425 NR Description: auxin-induced
  misc_feature (58)..(139): NCBI GI NO: 15236198 NR Description: auxin-induced
  misc_feature (80)..(152): NCBI GI NO: 15238779 NR Description: auxin-induced
  misc_feature (80)..(152): NCBI GI NO: 38454072 NR Description: At5g53590 [Arabidopsis thaliana]
MSKNRGFNLRRRLIRVSKWIFRKIRTRAPREYHCLGDSPPSPMVKLLTWGRKLTAGAKSRLKVASGSGYAQLGTDPDPSVPKGHLAVYVGQKDGELHRVLVPVIYFNHPLFGELLKQAEEEFGFHHEGGITIPCRFTEFERVKTRIASGSRRGTRPKRLAWR

SEQ ID NO: 7620 - protein, 120 aa, Glycine max
  peptide (1)..(120): Ceres Seq. ID no. 13595534
  misc_feature (1)..(105): Pfam Name: Pfam Description:  Auxin responsive protein
  misc_feature (1)..(108): NCBI GI NO: 15232400 NR Description: auxin-induced
  misc_feature (1)..(108): NCBI GI NO: 15225432 NR Description: auxin-induced
  misc_feature (1)..(106): NCBI GI NO: 15235723 NR Description: auxin-induced
  misc_feature (1)..(106): NCBI GI NO: 15234550 NR Description: auxin-induced
  misc_feature (1)..(109): NCBI GI NO: 38567865 NR Description: OSJNBa0091D06.3
  misc_feature (38)..(113): NCBI GI NO: 18411465 NR Description: auxin-induced
  misc_feature (38)..(109): NCBI GI NO: 15226425 NR Description: auxin-induced
  misc_feature (16)..(97): NCBI GI NO: 15236198 NR Description: auxin-induced
  misc_feature (38)..(110): NCBI GI NO: 15238779 NR Description: auxin-induced
  misc_feature (38)..(110): NCBI GI NO: 38454072 NR Description: At5g53590 [Arabidopsis thaliana]
MVKLLTWGRKLTAGAKSRLKVASGSGYAQLGTDPDPSVPKGHLAVYVGQKDGELHRVLVPVIYFNHPLFGELLKQAEEEFGFHHEGGITIPCRFTEFERVKTRIASGSRRGTRPKRLAWR

SEQ ID NO: 7621 - DNA, 1847 bp, Glycine max
  misc_feature (1)..(1847): Ceres Seq. ID no. 13504578
  misc_feature (811)..(811): n is a, c, t, g, unknown, or other
actaatcgaaaaaagatttattgttaagtccaaagagtgtctttagttttctgtcccatgtacatatatatatatatattagccacccttatcggtggtactatgtgcaagctcaaaactttaccaaatctataatcttccccttctctctcctctccccatctccctgatggggttctcatgaattcaagtagtgaaatcaagctatgatcaagccttttggggcttcgatttaccatctttttgtgctaattaaacacttgaaaattaccaccatgtccaccatgaagaacaatttcaaagaccaagaccatctctactcttcatggagcttctcaaagctcatggctttcttcttcctcttaatctccatctcctacctcttctactccctaaggttcgttagccactccttcgattgtgatcaaacccctcacattcccaccatcactcatcatatttcttccaacaccccatctgaagaagagtccacaccccccytttgaagaagttaccaacatttcccacatagtctttggcataggagcctcagcaaagctttggaagcagagaaaagagtacatcaagctatggtggaggcctaatgagatgcgtggggttgtgtggttggagcaaaaggtgaaaactgagcctcaagatgagaatttcttgcccccgttgaggatctctagtgacacttcaaggttcaagtataagaacccaaaggggcatagatcagctattagaatctcacgcatagtgtctgagacacttaggcttgggatggaggatgtgaggtggtttgtgatgnggggatgatgacacggwttttgtggcagaaaatttggtgaaarmrwtgcaaaaatatgaccacaatcagttttattacattgggagttcctcggagagtcacttgcaaaacatttatttttcttataatatggcttatgggggtggtggttttgccattagttatcccttggctgtggcattggagaagatgcaagataggtgcattcagaggtatccagggttgtatggctctgatgataggattcagrcttgtatggcagaattgggagttccactcaccaaggaaaaagggttccatcagtttgatgygtacggcaatctccttgrgcttctggcgscccatccagttacgccactggwatccctccatcacttggacgtggtagagcccatatttccaaacgtgagccgggtccaggccctgaagaggctgaaagggcccatgaaacttgacccagccgggctcatccaacaatccatttgctacgacaaagcccggacctggaccatatccgtttcatggggctatgcggttcaaattttccggggcatcttctcagcccgggaaatggagatgccagcaaggacattcctgaactggtacaagcgggcggattacacggcgtatccgttcaacacgcggccggtcagccgccatgtttgtcagaaaccgtttgtttattacttgtctagggcagtgtatgatgagggtgctaatgaaactgcaagtcaatatgtacgggttcagcaaaacccggaatgcaattggaaaatggaggatccaacccaaatcaaagtggtgcatgtttataagaaacccgacccgcatttgtgggacaaggctccaagaagaaattgttgtagggttcgacgtacaaagaagcaaggaactatggtgattgatgtgggggaatgcaaggaagatgaacttgttgaattgtagttagaggtcctacacatcaattgataattcttaactcaatcgtttgctatatgtattttcttcttytatayatatatgatttactttgagg

SEQ ID NO: 7622 - protein, 271 aa, Glycine max
  peptide (1)..(271): Ceres Seq. ID no. 15222815
  misc_feature (1)..(246): Pfam Name: Pfam Description:  Protein of unknown function, DUF604
  misc_feature (1)..(271): NCBI GI NO: 15238082 NR Description: fringe-related protein [Arabidopsis thaliana]
  misc_feature (1)..(271): NCBI GI NO: 18416156 NR Description: fringe-related protein [Arabidopsis thaliana]
  misc_feature (1)..(271): NCBI GI NO: 15529153 NR Description: AT4g23490/F16G20_190 [Arabidopsis thaliana]
  misc_feature (1)..(270): NCBI GI NO: 15223433 NR Description: fringe-related protein [Arabidopsis thaliana]
  misc_feature (1)..(270): NCBI GI NO: 25336194 NR Description: F22L4.11 protein - Arabidopsis thaliana
  misc_feature (1)..(271): NCBI GI NO: 15233347 NR Description: fringe-related protein [Arabidopsis thaliana]
  misc_feature (1)..(241): NCBI GI NO: 7485555 NR Description: hypothetical protein F16G20
  misc_feature (1)..(238): NCBI GI NO: 15223021 NR Description: fringe-related protein [Arabidopsis thaliana]
  misc_feature (1)..(271): NCBI GI NO: 37536418 NR Description: hypothetical protein
  misc_feature (1)..(238): NCBI GI NO: 18411279 NR Description: fringe-related protein [Arabidopsis thaliana]
  misc_feature (41)..(41): Xaa is any aa, unknown or other
  misc_feature (61)..(61): Xaa is any aa, unknown or other
  misc_feature (67)..(67): Xaa is any aa, unknown or other
  misc_feature (71)..(71): Xaa is any aa, unknown or other
  misc_feature (78)..(78): Xaa is any aa, unknown or other
MAYGGGGFAISYPLAVALEKMQDRCIQRYPGLYGSDDRIQXCMAELGVPLTKEKGFHQFDXYGNLLXLLAXHPVTPLXSLHHLDVVEPIFPNVSRVQALKRLKGPMKLDPAGLIQQSICYDKARTWTISVSWGYAVQIFRGIFSAREMEMPARTFLNWYKRADYTAYPFNTRPVSRHVCQKPFVYYLSRAVYDEGANETASQYVRVQQNPECNWKMEDPTQIKVVHVYKKPDPHLWDKAPRRNCCRVRRTKKQGTMVIDVGECKEDELVEL

SEQ ID NO: 7623 - protein, 251 aa, Glycine max
  peptide (1)..(251): Ceres Seq. ID no. 15222816
  misc_feature (1)..(226): Pfam Name: Pfam Description:  Protein of unknown function, DUF604
  misc_feature (1)..(251): NCBI GI NO: 15238082 NR Description: fringe-related protein [Arabidopsis thaliana]
  misc_feature (1)..(251): NCBI GI NO: 18416156 NR Description: fringe-related protein [Arabidopsis thaliana]
  misc_feature (1)..(251): NCBI GI NO: 15529153 NR Description: AT4g23490/F16G20_190 [Arabidopsis thaliana]
  misc_feature (1)..(250): NCBI GI NO: 15223433 NR Description: fringe-related protein [Arabidopsis thaliana]
  misc_feature (1)..(250): NCBI GI NO: 25336194 NR Description: F22L4.11 protein - Arabidopsis thaliana
  misc_feature (1)..(251): NCBI GI NO: 15233347 NR Description: fringe-related protein [Arabidopsis thaliana]
  misc_feature (1)..(221): NCBI GI NO: 7485555 NR Description: hypothetical protein F16G20
  misc_feature (1)..(218): NCBI GI NO: 15223021 NR Description: fringe-related protein [Arabidopsis thaliana]
  misc_feature (1)..(251): NCBI GI NO: 37536418 NR Description: hypothetical protein
  misc_feature (1)..(218): NCBI GI NO: 18411279 NR Description: fringe-related protein [Arabidopsis thaliana]
  misc_feature (21)..(21): Xaa is any aa, unknown or other
  misc_feature (41)..(41): Xaa is any aa, unknown or other
  misc_feature (47)..(47): Xaa is any aa, unknown or other
  misc_feature (51)..(51): Xaa is any aa, unknown or other
  misc_feature (58)..(58): Xaa is any aa, unknown or other
MQDRCIQRYPGLYGSDDRIQXCMAELGVPLTKEKGFHQFDXYGNLLXLLAXHPVTPLXSLHHLDVVEPIFPNVSRVQALKRLKGPMKLDPAGLIQQSICYDKARTWTISVSWGYAVQIFRGIFSAREMEMPARTFLNWYKRADYTAYPFNTRPVSRHVCQKPFVYYLSRAVYDEGANETASQYVRVQQNPECNWKMEDPTQIKVVHVYKKPDPHLWDKAPRRNCCRVRRTKKQGTMVIDVGECKEDELVEL

SEQ ID NO: 7624 - protein, 229 aa, Glycine max
  peptide (1)..(229): Ceres Seq. ID no. 15222817
  misc_feature (1)..(204): Pfam Name: Pfam Description:  Protein of unknown function, DUF604
  misc_feature (1)..(229): NCBI GI NO: 15238082 NR Description: fringe-related protein [Arabidopsis thaliana]
  misc_feature (1)..(229): NCBI GI NO: 18416156 NR Description: fringe-related protein [Arabidopsis thaliana]
  misc_feature (1)..(229): NCBI GI NO: 15529153 NR Description: AT4g23490/F16G20_190 [Arabidopsis thaliana]
  misc_feature (1)..(228): NCBI GI NO: 15223433 NR Description: fringe-related protein [Arabidopsis thaliana]
  misc_feature (1)..(228): NCBI GI NO: 25336194 NR Description: F22L4.11 protein - Arabidopsis thaliana
  misc_feature (1)..(229): NCBI GI NO: 15233347 NR Description: fringe-related protein [Arabidopsis thaliana]
  misc_feature (1)..(199): NCBI GI NO: 7485555 NR Description: hypothetical protein F16G20
  misc_feature (1)..(196): NCBI GI NO: 15223021 NR Description: fringe-related protein [Arabidopsis thaliana]
  misc_feature (1)..(229): NCBI GI NO: 37536418 NR Description: hypothetical protein
  misc_feature (1)..(196): NCBI GI NO: 18411279 NR Description: fringe-related protein [Arabidopsis thaliana]
  misc_feature (19)..(19): Xaa is any aa, unknown or other
  misc_feature (25)..(25): Xaa is any aa, unknown or other
  misc_feature (29)..(29): Xaa is any aa, unknown or other
  misc_feature (36)..(36): Xaa is any aa, unknown or other
MAELGVPLTKEKGFHQFDXYGNLLXLLAXHPVTPLXSLHHLDVVEPIFPNVSRVQALKRLKGPMKLDPAGLIQQSICYDKARTWTISVSWGYAVQIFRGIFSAREMEMPARTFLNWYKRADYTAYPFNTRPVSRHVCQKPFVYYLSRAVYDEGANETASQYVRVQQNPECNWKMEDPTQIKVVHVYKKPDPHLWDKAPRRNCCRVRRTKKQGTMVIDVGECKEDELVEL

SEQ ID NO: 7625 - DNA, 1335 bp, Glycine max
  misc_feature (1)..(1335): Ceres Seq. ID no. 13639120
aaaacataactcaaccatggcaaagttcagttccagaaaaaaatcctccatttgggtccccaacggttgcatcttcttcctcggaggagcactcacaaccctccttctcctctggggtctatcctccttcataatccccatcccaaactctgacccagaactcaaccctgtctccacaaaactcagttccctccaattccccacaaacaccgactcaccagaaacaactttttacgacgaccccgaaacgagttacaccatggacaagcccatgcacaactgggacgagaagagaaaacagtggcttttgcatcatccttcattcaccgtcacgacacatgatagcaagatcctcgtcgtgacggggtcgcagccgaagcgctgccacaaccccatcggcgatcaccttctattaaggttcttcaagaacaaggttgactactgccgcctccacaactacgacataatttacaataacgccctattgcaccccaaaatgggatcatactgggccaagtacccggtgatccgagccgccatggtggctcacccggaggccgagtgggtctggtgggtcgactcggacgcggtcttcaccgacatggagttcactctccctctcaaccgctacaaggaccacaacctcgttgtccacggttgggaaaatctcgtacgtgaaaaccgtagctggacggggcttaacgccggcgttttcctcatgagaaactgtcagtggtcgttggattttatggacgtgtgggccagcatgggcccaatgtccccggagtatgaaaaatggggggaaaccttaaaatccacgttcaaggacaaggttcttccggactcggacgatcagacggcgctggcatatctgatcgcggttgagaacaaatgggcggacaagatctttctggagagtgagtactatttccaaggctactggttggagatttcgaagacttactataacgttagcgagaggtacgatgaggtggagagaaaggttaaaggattgaggaggaggcacgcggagaaagtgagtgaaagttatggtttgatgagggaggagtatttgaacgatgtgggagagtggaagaggcctttcatcacgcatttcactgggtgccaaccctgcaatggacaccataaccctgcgtatgatgctatggattgctggaacagcatggagagggctcttaacttcgctgataatcaggtgttgcgcgtctatggttacatgcgtaaggatctcttgaataaggccatttcacctataccttttgattatcccaatgttgtgtagatttactcaggtaaataaataatgatgaaatt

SEQ ID NO: 7626 - protein, 433 aa, Glycine max
  peptide (1)..(433): Ceres Seq. ID no. 13639121
  misc_feature (116)..(384): Pfam Name: Pfam Description:  galactosyl transferase GMA12/MNN10 family
  misc_feature (6)..(430): NCBI GI NO: 32127690 NR Description: galactomannan galactosyltransferase
  misc_feature (8)..(430): NCBI GI NO: 25486551 NR Description: alpha galactosyltransferase (EC 2.4.1.-)
  misc_feature (3)..(431): NCBI GI NO: 18400116 NR Description: transferase - related [Arabidopsis thaliana]
  misc_feature (11)..(431): NCBI GI NO: 22329223 NR Description: transferase - related [Arabidopsis thaliana]
  misc_feature (33)..(328): NCBI GI NO: 15240848 NR Description: transferase - related [Arabidopsis thaliana]
  misc_feature (344)..(425): NCBI GI NO: 15240848 NR Description: transferase - related [Arabidopsis thaliana]
  misc_feature (53)..(328): NCBI GI NO: 15221224 NR Description: transferase - related [Arabidopsis thaliana]
  misc_feature (344)..(425): NCBI GI NO: 15221224 NR Description: transferase - related [Arabidopsis thaliana]
  misc_feature (41)..(328): NCBI GI NO: 15221850 NR Description: transferase - related [Arabidopsis thaliana]
  misc_feature (41)..(328): NCBI GI NO: 25349326 NR Description: hypothetical protein F6A14
KHNSTMAKFSSRKKSSIWVPNGCIFFLGGALTTLLLLWGLSSFIIPIPNSDPELNPVSTKLSSLQFPTNTDSPETTFYDDPETSYTMDKPMHNWDEKRKQWLLHHPSFTVTTHDSKILVVTGSQPKRCHNPIGDHLLLRFFKNKVDYCRLHNYDIIYNNALLHPKMGSYWAKYPVIRAAMVAHPEAEWVWWVDSDAVFTDMEFTLPLNRYKDHNLVVHGWENLVRENRSWTGLNAGVFLMRNCQWSLDFMDVWASMGPMSPEYEKWGETLKSTFKDKVLPDSDDQTALAYLIAVENKWADKIFLESEYYFQGYWLEISKTYYNVSERYDEVERKVKGLRRRHAEKVSESYGLMREEYLNDVGEWKRPFITHFTGCQPCNGHHNPAYDAMDCWNSMERALNFADNQVLRVYGYMRKDLLNKAISPIPFDYPNVV

SEQ ID NO: 7627 - protein, 428 aa, Glycine max
  peptide (1)..(428): Ceres Seq. ID no. 13639122
  misc_feature (111)..(379): Pfam Name: Pfam Description:  galactosyl transferase GMA12/MNN10 family
  misc_feature (1)..(425): NCBI GI NO: 32127690 NR Description: galactomannan galactosyltransferase
  misc_feature (3)..(425): NCBI GI NO: 25486551 NR Description: alpha galactosyltransferase (EC 2.4.1.-)
  misc_feature (1)..(426): NCBI GI NO: 18400116 NR Description: transferase - related [Arabidopsis thaliana]
  misc_feature (6)..(426): NCBI GI NO: 22329223 NR Description: transferase - related [Arabidopsis thaliana]
  misc_feature (28)..(323): NCBI GI NO: 15240848 NR Description: transferase - related [Arabidopsis thaliana]
  misc_feature (339)..(420): NCBI GI NO: 15240848 NR Description: transferase - related [Arabidopsis thaliana]
  misc_feature (48)..(323): NCBI GI NO: 15221224 NR Description: transferase - related [Arabidopsis thaliana]
  misc_feature (339)..(420): NCBI GI NO: 15221224 NR Description: transferase - related [Arabidopsis thaliana]
  misc_feature (36)..(323): NCBI GI NO: 15221850 NR Description: transferase - related [Arabidopsis thaliana]
  misc_feature (36)..(323): NCBI GI NO: 25349326 NR Description: hypothetical protein F6A14
MAKFSSRKKSSIWVPNGCIFFLGGALTTLLLLWGLSSFIIPIPNSDPELNPVSTKLSSLQFPTNTDSPETTFYDDPETSYTMDKPMHNWDEKRKQWLLHHPSFTVTTHDSKILVVTGSQPKRCHNPIGDHLLLRFFKNKVDYCRLHNYDIIYNNALLHPKMGSYWAKYPVIRAAMVAHPEAEWVWWVDSDAVFTDMEFTLPLNRYKDHNLVVHGWENLVRENRSWTGLNAGVFLMRNCQWSLDFMDVWASMGPMSPEYEKWGETLKSTFKDKVLPDSDDQTALAYLIAVENKWADKIFLESEYYFQGYWLEISKTYYNVSERYDEVERKVKGLRRRHAEKVSESYGLMREEYLNDVGEWKRPFITHFTGCQPCNGHHNPAYDAMDCWNSMERALNFADNQVLRVYGYMRKDLLNKAISPIPFDYPNVV

SEQ ID NO: 7628 - protein, 347 aa, Glycine max
  peptide (1)..(347): Ceres Seq. ID no. 13639123
  misc_feature (30)..(298): Pfam Name: Pfam Description:  galactosyl transferase GMA12/MNN10 family
  misc_feature (1)..(344): NCBI GI NO: 32127690 NR Description: galactomannan galactosyltransferase
  misc_feature (1)..(344): NCBI GI NO: 25486551 NR Description: alpha galactosyltransferase (EC 2.4.1.-)
  misc_feature (1)..(345): NCBI GI NO: 18400116 NR Description: transferase - related [Arabidopsis thaliana]
  misc_feature (1)..(345): NCBI GI NO: 22329223 NR Description: transferase - related [Arabidopsis thaliana]
  misc_feature (1)..(242): NCBI GI NO: 15240848 NR Description: transferase - related [Arabidopsis thaliana]
  misc_feature (258)..(339): NCBI GI NO: 15240848 NR Description: transferase - related [Arabidopsis thaliana]
  misc_feature (1)..(242): NCBI GI NO: 15221224 NR Description: transferase - related [Arabidopsis thaliana]
  misc_feature (258)..(339): NCBI GI NO: 15221224 NR Description: transferase - related [Arabidopsis thaliana]
  misc_feature (1)..(242): NCBI GI NO: 15221850 NR Description: transferase - related [Arabidopsis thaliana]
  misc_feature (1)..(242): NCBI GI NO: 25349326 NR Description: hypothetical protein F6A14
MDKPMHNWDEKRKQWLLHHPSFTVTTHDSKILVVTGSQPKRCHNPIGDHLLLRFFKNKVDYCRLHNYDIIYNNALLHPKMGSYWAKYPVIRAAMVAHPEAEWVWWVDSDAVFTDMEFTLPLNRYKDHNLVVHGWENLVRENRSWTGLNAGVFLMRNCQWSLDFMDVWASMGPMSPEYEKWGETLKSTFKDKVLPDSDDQTALAYLIAVENKWADKIFLESEYYFQGYWLEISKTYYNVSERYDEVERKVKGLRRRHAEKVSESYGLMREEYLNDVGEWKRPFITHFTGCQPCNGHHNPAYDAMDCWNSMERALNFADNQVLRVYGYMRKDLLNKAISPIPFDYPNVV

SEQ ID NO: 7629 - DNA, 1428 bp, Glycine max
  misc_feature (1)..(1428): Ceres Seq. ID no. 13595616
gaacatcctaatcgaaaaattttttttcccttatttttcttaaatatttttatggctccggagtcaaaagttcctggagcaagtagaaagaagaaagcgagtgacgagggaaacgtttaaaccatatatgttttgttgtttctagctccattctatagcaatggccacgtctgttcttagtcctcctttctttcatcctctgcatcaacttcaattctcgaaatgcccccgcctttcttctaaatcccactttcgccctcgcctcctccgctccatatcccaaagaaccattcgcgctatctccgcagttgccgcagaatcagagttaggtacacagcaggatcatgcaattgaagcagacatctttgcttgccctgtatgttatgaaccattgataagaaaaggtccttctggccttaacttgtctggtttcatgtgtaagagatgtaagaagacatattctagcaaagataggtatctggatctgactgtaactgctggattgagagactacactgaaattcaacctgctcggactgagcttttcaggagtcccctggtttcattcttgtatgaaagaggttggcgtcagaatttcaggcaaagtggctttcctggtcctgatgaagagttcaaaatggctcaagagtactttgaatctgctgaaggtggacttcttgttgatgttagctgtggtagtggtttattttcccgaaaattcgccaaatctggaacatattcgggagtcatagcactagatttttctgagaatatgcttcgtcaatgttatgatttcattgagaaagataacacactttcaacaaataatattgctcttgtaagggcagatgtttctagacttcccttctcatcaggttcggttgatgctgttcatgctggtgcagctttgcattgctggccatctccctccaatgctgttgctgaaatcacccggacactaaaaaatggtggagtatttgttgggagcacttttctgcgttatagttcaaaaactccctggtttttacgccctttcagggagaggactccacaaggctatggctatctaacagaggaagagatcaaagacctttgcacctcatgtggtcttaccaattactcaagcaaaattcagcaggcttttattatgttcacagctcagaagccataaaactgggtctgatctatttataacattgattctccactgcattttatcaattccttctgtatgtatgtattgtatcacttgtttcatctgtaaagaagaaattgtaaataaatgagaaatgaaaaggtcaaaacctgagtccggtgtgttcgcaggttgtaaaatgcatcgtgtatcagtgcctaataatatatccaaattctgacaatttttgtaaagaatatatattttgttggcttaaatatatttttggttct

SEQ ID NO: 7630 - protein, 336 aa, Glycine max
  peptide (1)..(336): Ceres Seq. ID no. 13595617
  misc_feature (1)..(336): NCBI GI NO: 30688506 NR Description: expressed protein [Arabidopsis thaliana]
  misc_feature (1)..(261): NCBI GI NO: 7487623 NR Description: hypothetical protein At2g41040
  misc_feature (1)..(336): NCBI GI NO: 18411840 NR Description: expressed protein [Arabidopsis thaliana]
  misc_feature (1)..(186): NCBI GI NO: 25406543 NR Description: hypothetical protein T11I11.8
  misc_feature (221)..(336): NCBI GI NO: 25406543 NR Description: hypothetical protein T11I11.8
  misc_feature (145)..(271): NCBI GI NO: 23048342 NR Description: hypothetical protein [Methanosarcina barkeri]
  misc_feature (171)..(336): NCBI GI NO: 34541479 NR Description: methlytransferase, UbiE/COQ5 family
  misc_feature (169)..(279): NCBI GI NO: 20093135 NR Description: menaquinone biosynthesis methyltransferase
  misc_feature (173)..(329): NCBI GI NO: 23039720 NR Description: hypothetical protein
  misc_feature (172)..(323): NCBI GI NO: 18309157 NR Description: hypothetical protein [Clostridium perfringens]
MATSVLSPPFFHPLHQLQFSKCPRLSSKSHFRPRLLRSISQRTIRAISAVAAESELGTQQDHAIEADIFACPVCYEPLIRKGPSGLNLSGFMCKRCKKTYSSKDRYLDLTVTAGLRDYTEIQPARTELFRSPLVSFLYERGWRQNFRQSGFPGPDEEFKMAQEYFESAEGGLLVDVSCGSGLFSRKFAKSGTYSGVIALDFSENMLRQCYDFIEKDNTLSTNNIALVRADVSRLPFSSGSVDAVHAGAALHCWPSPSNAVAEITRTLKNGGVFVGSTFLRYSSKTPWFLRPFRERTPQGYGYLTEEEIKDLCTSCGLTNYSSKIQQAFIMFTAQKP

SEQ ID NO: 7631 - protein, 245 aa, Glycine max
  peptide (1)..(245): Ceres Seq. ID no. 13595618
  misc_feature (1)..(245): NCBI GI NO: 30688506 NR Description: expressed protein [Arabidopsis thaliana]
  misc_feature (1)..(170): NCBI GI NO: 7487623 NR Description: hypothetical protein At2g41040
  misc_feature (1)..(245): NCBI GI NO: 18411840 NR Description: expressed protein [Arabidopsis thaliana]
  misc_feature (1)..(95): NCBI GI NO: 25406543 NR Description: hypothetical protein T11I11.8
  misc_feature (130)..(245): NCBI GI NO: 25406543 NR Description: hypothetical protein T11I11.8
  misc_feature (54)..(180): NCBI GI NO: 23048342 NR Description: hypothetical protein [Methanosarcina barkeri]
  misc_feature (80)..(245): NCBI GI NO: 34541479 NR Description: methlytransferase, UbiE/COQ5 family
  misc_feature (78)..(188): NCBI GI NO: 20093135 NR Description: menaquinone biosynthesis methyltransferase
  misc_feature (82)..(238): NCBI GI NO: 23039720 NR Description: hypothetical protein
  misc_feature (81)..(232): NCBI GI NO: 18309157 NR Description: hypothetical protein [Clostridium perfringens]
MCKRCKKTYSSKDRYLDLTVTAGLRDYTEIQPARTELFRSPLVSFLYERGWRQNFRQSGFPGPDEEFKMAQEYFESAEGGLLVDVSCGSGLFSRKFAKSGTYSGVIALDFSENMLRQCYDFIEKDNTLSTNNIALVRADVSRLPFSSGSVDAVHAGAALHCWPSPSNAVAEITRTLKNGGVFVGSTFLRYSSKTPWFLRPFRERTPQGYGYLTEEEIKDLCTSCGLTNYSSKIQQAFIMFTAQKP

SEQ ID NO: 7632 - protein, 177 aa, Glycine max
  peptide (1)..(177): Ceres Seq. ID no. 13595619
  misc_feature (1)..(177): NCBI GI NO: 30688506 NR Description: expressed protein [Arabidopsis thaliana]
  misc_feature (1)..(102): NCBI GI NO: 7487623 NR Description: hypothetical protein At2g41040
  misc_feature (1)..(177): NCBI GI NO: 18411840 NR Description: expressed protein [Arabidopsis thaliana]
  misc_feature (1)..(27): NCBI GI NO: 25406543 NR Description: hypothetical protein T11I11.8
  misc_feature (62)..(177): NCBI GI NO: 25406543 NR Description: hypothetical protein T11I11.8
  misc_feature (1)..(112): NCBI GI NO: 23048342 NR Description: hypothetical protein [Methanosarcina barkeri]
  misc_feature (12)..(177): NCBI GI NO: 34541479 NR Description: methlytransferase, UbiE/COQ5 family
  misc_feature (10)..(120): NCBI GI NO: 20093135 NR Description: menaquinone biosynthesis methyltransferase
  misc_feature (14)..(170): NCBI GI NO: 23039720 NR Description: hypothetical protein
  misc_feature (13)..(164): NCBI GI NO: 18309157 NR Description: hypothetical protein [Clostridium perfringens]
MAQEYFESAEGGLLVDVSCGSGLFSRKFAKSGTYSGVIALDFSENMLRQCYDFIEKDNTLSTNNIALVRADVSRLPFSSGSVDAVHAGAALHCWPSPSNAVAEITRTLKNGGVFVGSTFLRYSSKTPWFLRPFRERTPQGYGYLTEEEIKDLCTSCGLTNYSSKIQQAFIMFTAQKP

SEQ ID NO: 7633 - DNA, 870 bp, Glycine max
  misc_feature (1)..(870): Ceres Seq. ID no. 13595263
ttacctagaacatcctaatcgaaaaataaaaaccctaaacacaaccaccgtcctcaaccaccatggcagagcgtgaccgccgcgaacgagagagggatagagaccgtgagcgcgaccgcgatagacgccgtgacagagacgaccgtgaccgtgaccgtgggattcgaagcaagaagtcccgatctcgtactccagaccaccaccaccacgctcgccctcctcgccacgtgcgctctcccgagaggtatcgatcccggtcccgctccgctgaccgtgaccgtcatcgccaccacagcaggcgcaggactccctctccagatcccccgccgcggaaacggcctcgccatggctcagcggaagacgacaaggaaaggagtcgcaaacgagaggagactgcgacggagcaagctaagaagaaggagaataaagaaccaagcggcggcggaggaggagaagcggaaacggatgtgaatgagatagagatgatgaagatgttagggatccctactggtttcgactccacgaaagggaagcatgtcgaaggcgctgacgtcagcgggattagggctgttaccaagcgccagccgaggcagtacatgaaccgtcgcggtggctttaaccgtcctttgcctgctgagcgtaaccgctaaaggtccttgtcaatgctgtcttaaacacgaggtcagatgatgagagttcgagcttgtatttactgcaattcttccccagacgctgttctaatgtccttagagaacaaacatgtactctctggagttagaaacatcttatctctttttaggggtttagagttgtgaatgatgttatgtgtattaatttcccggctctaacttttagactatgatttagttg

SEQ ID NO: 7634 - protein, 195 aa, Glycine max
  peptide (1)..(195): Ceres Seq. ID no. 13595264
  misc_feature (3)..(195): NCBI GI NO: 18423973 NR Description: expressed protein [Arabidopsis thaliana]
  misc_feature (3)..(195): NCBI GI NO: 21592725 NR Description: unknown [Arabidopsis thaliana]
  misc_feature (1)..(111): NCBI GI NO: 21592725 NR Description: unknown [Arabidopsis thaliana]
  misc_feature (1)..(111): NCBI GI NO: 18423973 NR Description: expressed protein [Arabidopsis thaliana]
  misc_feature (3)..(191): NCBI GI NO: 23478750 NR Description: cyclophilin-RNA interacting protein
  misc_feature (21)..(189): NCBI GI NO: 34856367 NR Description: similar to putative nucleic acid binding proteinRY-1
  misc_feature (30)..(189): NCBI GI NO: 7513213 NR Description: nucleic acid binding protein - human (fragment)
  misc_feature (28)..(189): NCBI GI NO: 24307919 NR Description: putative nucleic acid binding protein RY-1
  misc_feature (28)..(189): NCBI GI NO: 27228990 NR Description: putative nucleic acid binding protein RY-1
  misc_feature (4)..(193): NCBI GI NO: 40738944 NR Description: hypothetical protein AN6605.2
MAERDRRERERDRDRERDRDRRRDRDDRDRDRGIRSKKSRSRTPDHHHHARPPRHVRSPERYRSRSRSADRDRHRHHSRRRTPSPDPPPRKRPRHGSAEDDKERSRKREETATEQAKKKENKEPSGGGGGEAETDVNEIEMMKMLGIPTGFDSTKGKHVEGADVSGIRAVTKRQPRQYMNRRGGFNRPLPAERNR

SEQ ID NO: 7635 - DNA, 913 bp, Glycine max
  misc_feature (1)..(913): Ceres Seq. ID no. 13595270
aaaaacccaaccaaacccctctccccctccgcctccccaccatggctcccggtgccctagcccgcctcatcatcggccgccgcgcagcgtccccgctcctggcgcgccccttcgccgcgaaggcccgcgcgccgcagcgggcgccggagccggagcccctgtcggaggaggacgacgacttcaccagcggcggggaggccgcccccatccccaccgagggcatcagcaagccgctcgccggcatcctcaaggagctcgggaagagggtccccgagtccctcctgaagacccgcctcgaggacaatggattcgccctcaagtacatcccatggcaccttgctaacaaaattctgaatatgcacgctccagaatggtctggggaggttcgcaacattgtctactcatctgatgggaaatctgtatctgttgtctatcgtgtgactctctatggaactgatgcagagatctatagagaggctactggaactgcttctgttgaggaaaaaggctttggagatcctgtccagaaggctgaaggaatggcttttcgccgagcttgtgcccgccttggtcttggacttcatctctatcatgaagatatgtcatagatgcttactgatcattgtttgtggtctggacttctgcttcatgtctcttagtgcgcggacacttgtcgttcagtaggctacccttttgtgctgaacatgatatggatgtgccggcatataaaactaagtattctagaatgtcgtttagttgtytaatgtaagctacaaaggtggttgatgttctgaatggtgtgcttataatgagccagcttgtttcattttttwaaaaaaaaaaaaaaaaaaaaaaaaaaaaaaaaacccaaaaaaaaaaaaaaaaaagctgtttaaacwcratammgtcgacc

SEQ ID NO: 7636 - protein, 201 aa, Glycine max
  peptide (1)..(201): Ceres Seq. ID no. 15221519
  misc_feature (14)..(201): NCBI GI NO: 9367245 NR Description: SnRK1-interacting protein 1
  misc_feature (14)..(201): NCBI GI NO: 34907336 NR Description: putative SnRK1-interacting protein 1
  misc_feature (69)..(199): NCBI GI NO: 15224018 NR Description: expressed protein [Arabidopsis thaliana]
  misc_feature (71)..(198): NCBI GI NO: 15238827 NR Description: expressed protein [Arabidopsis thaliana]
  misc_feature (71)..(198): NCBI GI NO: 21593360 NR Description: unknown [Arabidopsis thaliana]
  misc_feature (28)..(155): NCBI GI NO: 27573357 NR Description: hypothetical protein
  misc_feature (137)..(199): NCBI GI NO: 38505607 NR Description: sll5072 [Synechocystis sp. PCC 6803]
  misc_feature (137)..(199): NCBI GI NO: 38505854 NR Description: slr6029 [Synechocystis sp. PCC 6803]
KPNQTPLPLRLPTMAPGALARLIIGRRAASPLLARPFAAKARAPQRAPEPEPLSEEDDDFTSGGEAAPIPTEGISKPLAGILKELGKRVPESLLKTRLEDNGFALKYIPWHLANKILNMHAPEWSGEVRNIVYSSDGKSVSVVYRVTLYGTDAEIYREATGTASVEEKGFGDPVQKAEGMAFRRACARLGLGLHLYHEDMS

SEQ ID NO: 7637 - protein, 188 aa, Glycine max
  peptide (1)..(188): Ceres Seq. ID no. 15221520
  misc_feature (1)..(188): NCBI GI NO: 9367245 NR Description: SnRK1-interacting protein 1
  misc_feature (1)..(188): NCBI GI NO: 34907336 NR Description: putative SnRK1-interacting protein 1
  misc_feature (56)..(186): NCBI GI NO: 15224018 NR Description: expressed protein [Arabidopsis thaliana]
  misc_feature (58)..(185): NCBI GI NO: 15238827 NR Description: expressed protein [Arabidopsis thaliana]
  misc_feature (58)..(185): NCBI GI NO: 21593360 NR Description: unknown [Arabidopsis thaliana]
  misc_feature (15)..(142): NCBI GI NO: 27573357 NR Description: hypothetical protein
  misc_feature (124)..(186): NCBI GI NO: 38505607 NR Description: sll5072 [Synechocystis sp. PCC 6803]
  misc_feature (124)..(186): NCBI GI NO: 38505854 NR Description: slr6029 [Synechocystis sp. PCC 6803]
MAPGALARLIIGRRAASPLLARPFAAKARAPQRAPEPEPLSEEDDDFTSGGEAAPIPTEGISKPLAGILKELGKRVPESLLKTRLEDNGFALKYIPWHLANKILNMHAPEWSGEVRNIVYSSDGKSVSVVYRVTLYGTDAEIYREATGTASVEEKGFGDPVQKAEGMAFRRACARLGLGLHLYHEDMS

SEQ ID NO: 7638 - protein, 113 aa, Glycine max
  peptide (1)..(113): Ceres Seq. ID no. 15221521
KTQPNPSPPPPPHHGSRCPSPPHHRPPRSVPAPGAPLRREGPRAAAGAGAGAPVGGGRRLHQRRGGRPHPHRGHQQAARRHPQGAREEGPRVPPEDPPRGQWIRPQVHPMAPC

SEQ ID NO: 7639 - DNA, 1358 bp, Glycine max
  misc_feature (1)..(1358): Ceres Seq. ID no. 13639124
aaacaacacacgacacgaaacgaccatcacctctctagtggctactggctagtgcgaaaggaagatggcgactaagctcgcagcgctcgtcgtcttggccgcgttcctcgccgggccggcggcgtgcgacggcgccagcatttgcttcaacggctggctgaggctgcccacctacaacgcggcgctctgtcgccccaggccggacgttcagacgcggcagaggagacctgctccctcggggtcaggactcagctccggctattacaacaccaggtgccctagcgcggagaagatcgtcacggatgccgtgaagaaggccgtggatgcgaaccctggcattggtgccgggctcatccgtctcttcttccatgactgcttcgttcggggctgcgatggttccgtcctcctcaacacgaccaactcgaagaacagcgacacggagagggaaggccctcccaaccagaacagcctccgagggttcgaggtgattgacgaggccaaggcggcgatcgaggctgcctgccccgacacagtctcatgtgccgacatcgtcgcctatgctgcccgcgacgcgtcctacttcctcagcgaccgcaagatcaacatccagatgccgggcggccgctacgacggccgcgagtcattctccaacgagacagaccagctgcctgggcccttctctaacctcacggcgcttcaggggagtttcgcggccaagggactcacctccgacgagatggtcacgctctccggcgcgcacaccatcggccgcgcccgctgcttgttcttctccacccgtttctctgagatggaaccggtatttgccgccaagcttagggcccagtgcaacggcaacgacggcaccaacgtgaaccaagatgatgtgacccccaacatcctggataagcagtactaccagaacgtggtcgacaagaaagtgttgttcacctcagatgccgtgctcaactcgacggaaacgataacgcaggtgacagaaaacgcgaacatgaccggggcgtgggagaggaagttcgagaaagccatggagactatggggaaaatcggggtcaagaccataggcaaccagcaaggcgcagagatcaggaaggtatgctggagagtcaacaactaatacgggccagtagtaatgcctggtagttggccggctccatgtctggatcccgccatggaggagatctaactttgcctagctggtgccgttgttggttttctcatactaaaactctgtatgtgtgtgtgttttggtgtatcatactaaaactctgtatgtgtgtgtgttttgatatattaataaagatataataatatataagtaaccgtgtatgttcacgtacggc

SEQ ID NO: 7640 - protein, 355 aa, Glycine max
  peptide (1)..(355): Ceres Seq. ID no. 15220456
  misc_feature (78)..(313): Pfam Name: Pfam Description:  Peroxidase
  misc_feature (55)..(354): NCBI GI NO: 27261088 NR Description: putative peroxidase
  misc_feature (62)..(354): NCBI GI NO: 27261094 NR Description: putative peroxidase
  misc_feature (55)..(355): NCBI GI NO: 34896944 NR Description: putative peroxidase [Oryza sativa]
  misc_feature (55)..(354): NCBI GI NO: 34896266 NR Description: putative peroxidase [Oryza sativa]
  misc_feature (56)..(354): NCBI GI NO: 12039346 NR Description: putative peroxidase [Oryza sativa]
  misc_feature (55)..(354): NCBI GI NO: 34896268 NR Description: putative peroxidase [Oryza sativa]
  misc_feature (55)..(350): NCBI GI NO: 27261097 NR Description: putative peroxidase
  misc_feature (61)..(354): NCBI GI NO: 12039335 NR Description: putative peroxidase [Oryza sativa]
  misc_feature (61)..(354): NCBI GI NO: 12039354 NR Description: putative peroxidase [Oryza sativa]
  misc_feature (55)..(354): NCBI GI NO: 27261087 NR Description: putative peroxidase
MATKLAALVVLAAFLAGPAACDGASICFNGWLRLPTYNAALCRPRPDVQTRQRRPAPSGSGLSSGYYNTRCPSAEKIVTDAVKKAVDANPGIGAGLIRLFFHDCFVRGCDGSVLLNTTNSKNSDTEREGPPNQNSLRGFEVIDEAKAAIEAACPDTVSCADIVAYAARDASYFLSDRKINIQMPGGRYDGRESFSNETDQLPGPFSNLTALQGSFAAKGLTSDEMVTLSGAHTIGRARCLFFSTRFSEMEPVFAAKLRAQCNGNDGTNVNQDDVTPNILDKQYYQNVVDKKVLFTSDAVLNSTETITQVTENANMTGAWERKFEKAMETMGKIGVKTIGNQQGAEIRKVCWRVNN

SEQ ID NO: 7641 - DNA, 860 bp, Glycine max
  misc_feature (1)..(860): Ceres Seq. ID no. 13595538
ctgttccaattcgttccgaaacaatcttctcaattcctttcggttattataatctgagttaaaaagaaaataggaggaggtaaagacaagcatcatgacgagcaagacaaagggtttcatgggttcccaggaggtggacatcattacccacccgctggataccctccacaacaagggtatcctccagctgggggctatccaccagctggttacccacccggtgcttaccctcctggacctggaggttatcctcctgctccgggtcacggtggctatcctcctgcaggctatcctgctcctcaccactcaggacactctagtggtggactcggaggtatgatcgctggtgcagctggtgcagccgcagcagcctatggaactcaccacgttggtcatgcatcacacaacccttacggtcatgcaggccacggaggatttggccacggaggatttggccacgttggccatgcctctcatgggtatggtggtcatggtcatggcaaattcaagcacggaaagcatggaggcaagcatggaggcaagttcaagcatggaaagcatgggaaacatggtatgtttggaggaggaggaggcaaattcaagaagtggaagtaatctaaagaaaccaccctttcattctctcctccggtagtctcatttacctgaccgatgttttctaataatcccctccaaacacattatattttaactatatcggtttagagattactggttcagaggaaataaatggagagtggtagtataatgtaaacaaaccttatggtatctgcagaagaggtttcttcaatctcttaatagcagatgccctgaaacttatctataatttggttttataatcg

SEQ ID NO: 7642 - protein, 92 aa, Glycine max
  peptide (1)..(92): Ceres Seq. ID no. 13595539
MELTTLVMHHTTLTVMQATEDLATEDLATLAMPLMGMVVMVMANSSTESMEASMEASSSMESMGNMVCLEEEEANSRSGSNLKKPPFHSLLR

SEQ ID NO: 7643 - protein, 92 aa, Glycine max
  peptide (1)..(92): Ceres Seq. ID no. 13595540
  misc_feature (1)..(85): Pfam Name: Pfam Description:  Dehydrin
  misc_feature (1)..(92): NCBI GI NO: 15234178 NR Description: glycine/proline-rich protein
  misc_feature (1)..(61): NCBI GI NO: 7487135 NR Description: hypothetical protein T18B16
  misc_feature (1)..(92): NCBI GI NO: 18422542 NR Description: proline-rich protein family [Arabidopsis thaliana]
  misc_feature (1)..(92): NCBI GI NO: 33668156 NR Description: GPRP [Oryza sativa (indica cultivar-group)]
  misc_feature (1)..(92): NCBI GI NO: 6478148 NR Description: putative glycine and proline-rich protein
  misc_feature (1)..(92): NCBI GI NO: 18398103 NR Description: proline-rich protein family [Arabidopsis thaliana]
  misc_feature (1)..(92): NCBI GI NO: 21553447 NR Description: putative glycine and proline-rich protein
  misc_feature (1)..(92): NCBI GI NO: 13543234 NR Description: Unknown (protein for MGC:12025) [Mus musculus]
  misc_feature (1)..(92): NCBI GI NO: 13543234 NR Description: Unknown (protein for MGC:12025) [Mus musculus]
  misc_feature (1)..(70): NCBI GI NO: 15238005 NR Description: glycine/proline-rich protein
MIAGAAGAAAAAYGTHHVGHASHNPYGHAGHGGFGHGGFGHVGHASHGYGGHGHGKFKHGKHGGKHGGKFKHGKHGKHGMFGGGGGKFKKWK

SEQ ID NO: 7644 - protein, 85 aa, Glycine max
  peptide (1)..(85): Ceres Seq. ID no. 13595541
MHHTTLTVMQATEDLATEDLATLAMPLMGMVVMVMANSSTESMEASMEASSSMESMGNMVCLEEEEANSRSGSNLKKPPFHSLLR

SEQ ID NO: 7645 - DNA, 1259 bp, Glycine max
  misc_feature (1)..(1259): Ceres Seq. ID no. 13639236
atcgcgacgagctctcctggcccatttccctcgctgctgctgctaatcccgacccgaccgtcaccgccggcctttgcatcaaacgccctgacagcgcgcgtcgcatcgccacaacacgacggcctcgctcccttgatcgcctccctcgctccctccctgcctacttgcgtgtctacctatctacctgcctacctataccctataccctaatacaccacgcccatcgcccgcgacctgcagcttcgtccggcatctcttcctcacattcacaatggcatcaaagtttctccgagaatacaagttggtggtagtcggcggcggtggagtcggaaagtcgtgtttgactatccagctgatccagagccacttcgtagacgagtacgacccgaccatcgaggattcgtaccgcaagcagtgtgtcattgacaatgaggtcgccctgctcgatgtgctcgatacagcgggacaggaggagtactcggccatgcgcgagcagtacatgcgcacaggagagggcttcctgctcgtctactcgataaccgacaggcagagcttcgaggagattatgacgttccagcaacaaatcctgagagtaaaggacaaggactacttccccatgatcgtcgtcggcaacaagtgcgatctcgacggcgagaggcaagtgtcgacacaagagggccagactctggcgcggaactttggctgcaaattcatcgagacttcggcgaaatcccgcatcaacgttgacaacgccttctacgacatcgtccgagaaatccgcagatacaacaaggaaatgtcctcgtacacaggcgcccctggctcaaacggcaacgggccccagaagacgacattcgacacggacgaccaggcggagaagaagggatgctgtggatgcgtggtaatgtaaggatatggaagccactgtcgttgttgtcgttgttgtcgcgcacgctgtcagagagatacctacaccgctgggttcggttacccgccctggccattggcggtgctgcttggtccagcagaagaaaacacgcgatgctgctgttgcgtactgccagtacaccttctcttcgatactgtcactttgggttcgcattacggggtaacggattcacgtctgctggatgcgcctccgaacaccctacttctactactggtatcgactccatctttcctatctggtggcgctcttcgtattcgccttcatcatctatctagaccgatttctttatggcattttgatcggtactctg

SEQ ID NO: 7646 - protein, 212 aa, Glycine max
  peptide (1)..(212): Ceres Seq. ID no. 15219417
  misc_feature (10)..(171): Pfam Name: Pfam Description:  Ras family
  misc_feature (1)..(212): NCBI GI NO: 6919950 NR Description: RAS-LIKE PROTEIN
  misc_feature (1)..(212): NCBI GI NO: 825440 NR Description: RAS [Aspergillus fumigatus]
  misc_feature (1)..(212): NCBI GI NO: 3929359 NR Description: RAS-LIKE PROTEIN
  misc_feature (1)..(212): NCBI GI NO: 40746899 NR Description: RAS_EMENI RAS-LIKE PROTEIN
  misc_feature (1)..(212): NCBI GI NO: 6919951 NR Description: RAS-LIKE PROTEIN
  misc_feature (3)..(212): NCBI GI NO: 29467612 NR Description: ras protein [Fusarium oxysporum]
  misc_feature (1)..(212): NCBI GI NO: 6919949 NR Description: RAS-LIKE PROTEIN
  misc_feature (5)..(212): NCBI GI NO: 131888 NR Description: RAS-LIKE PROTEIN
  misc_feature (3)..(212): NCBI GI NO: 27752295 NR Description: small G-protein Ras1 [Ustilago maydis]
  misc_feature (3)..(212): NCBI GI NO: 13195562 NR Description: ras-like protein [Pisolithus sp. 441]
MASKFLREYKLVVVGGGGVGKSCLTIQLIQSHFVDEYDPTIEDSYRKQCVIDNEVALLDVLDTAGQEEYSAMREQYMRTGEGFLLVYSITDRQSFEEIMTFQQQILRVKDKDYFPMIVVGNKCDLDGERQVSTQEGQTLARNFGCKFIETSAKSRINVDNAFYDIVREIRRYNKEMSSYTGAPGSNGNGPQKTTFDTDDQAEKKGCCGCVVM

SEQ ID NO: 7647 - protein, 141 aa, Glycine max
  peptide (1)..(141): Ceres Seq. ID no. 15219418
  misc_feature (1)..(100): Pfam Name: Pfam Description:  Ras family
  misc_feature (1)..(141): NCBI GI NO: 6919950 NR Description: RAS-LIKE PROTEIN
  misc_feature (1)..(141): NCBI GI NO: 825440 NR Description: RAS [Aspergillus fumigatus]
  misc_feature (1)..(141): NCBI GI NO: 3929359 NR Description: RAS-LIKE PROTEIN
  misc_feature (1)..(141): NCBI GI NO: 40746899 NR Description: RAS_EMENI RAS-LIKE PROTEIN
  misc_feature (1)..(141): NCBI GI NO: 6919951 NR Description: RAS-LIKE PROTEIN
  misc_feature (1)..(141): NCBI GI NO: 29467612 NR Description: ras protein [Fusarium oxysporum]
  misc_feature (1)..(141): NCBI GI NO: 6919949 NR Description: RAS-LIKE PROTEIN
  misc_feature (1)..(141): NCBI GI NO: 131888 NR Description: RAS-LIKE PROTEIN
  misc_feature (1)..(141): NCBI GI NO: 27752295 NR Description: small G-protein Ras1 [Ustilago maydis]
  misc_feature (1)..(141): NCBI GI NO: 13195562 NR Description: ras-like protein [Pisolithus sp. 441]
MREQYMRTGEGFLLVYSITDRQSFEEIMTFQQQILRVKDKDYFPMIVVGNKCDLDGERQVSTQEGQTLARNFGCKFIETSAKSRINVDNAFYDIVREIRRYNKEMSSYTGAPGSNGNGPQKTTFDTDDQAEKKGCCGCVVM

SEQ ID NO: 7648 - protein, 136 aa, Glycine max
  peptide (1)..(136): Ceres Seq. ID no. 15219419
  misc_feature (1)..(95): Pfam Name: Pfam Description:  Ras family
  misc_feature (1)..(136): NCBI GI NO: 6919950 NR Description: RAS-LIKE PROTEIN
  misc_feature (1)..(136): NCBI GI NO: 825440 NR Description: RAS [Aspergillus fumigatus]
  misc_feature (1)..(136): NCBI GI NO: 3929359 NR Description: RAS-LIKE PROTEIN
  misc_feature (1)..(136): NCBI GI NO: 40746899 NR Description: RAS_EMENI RAS-LIKE PROTEIN
  misc_feature (1)..(136): NCBI GI NO: 6919951 NR Description: RAS-LIKE PROTEIN
  misc_feature (1)..(136): NCBI GI NO: 29467612 NR Description: ras protein [Fusarium oxysporum]
  misc_feature (1)..(136): NCBI GI NO: 6919949 NR Description: RAS-LIKE PROTEIN
  misc_feature (1)..(136): NCBI GI NO: 131888 NR Description: RAS-LIKE PROTEIN
  misc_feature (1)..(136): NCBI GI NO: 27752295 NR Description: small G-protein Ras1 [Ustilago maydis]
  misc_feature (1)..(136): NCBI GI NO: 13195562 NR Description: ras-like protein [Pisolithus sp. 441]
MRTGEGFLLVYSITDRQSFEEIMTFQQQILRVKDKDYFPMIVVGNKCDLDGERQVSTQEGQTLARNFGCKFIETSAKSRINVDNAFYDIVREIRRYNKEMSSYTGAPGSNGNGPQKTTFDTDDQAEKKGCCGCVVM

SEQ ID NO: 7649 - DNA, 973 bp, Glycine max
  misc_feature (1)..(973): Ceres Seq. ID no. 13595535
aattagaataaatcccgtgttttttttcttcgcccctacagaacccatgtcgattaggttttctaaattgctcttccatcttcttccttagagtaggaaatgttaccagttaccaaattatcatcttaaaccctccattactctctcacacatgatctatattcaatgtgatttctggatctgaggcggtggagattcatctataaaaagatccgaaaatcagtctgaaaatgggcaaatacatgaagaaatcgaagattaccaacaacgatacggagcccaccgagccaactttcctgggagttcgcaccagggacgctaaaaccctagctctgaagcggctcaattcctccgcctctgattccgctctagctggagactcttcttgctaccttcagctccacagccgccgcctcgagaaacccccggcgctgacggagccgaaacagccaccgagaattaaggagcctggctcgaagggtcgggttagctccggtttgggttcggttcatgtagctcagagctgtaacggagatgattggtttgggaagtctgaagcttttttgtggagagaacagtcctgattttcaatcgatacaaagtgaaagtactgtggtgtggcgtcatgttcatgggacctagctaagctgttgagaagaactacgagctacctgatgggcaagtgataacaattggttctgagctgttccattgtcctgaggaccaaggttatttaccagccatctatgattcatatggagaatactggtatccatgaaacaactttaactccttaatgaagtgtgatgtagacatcagaaaggatgtgtacggtataacatcgtgaccagtggtggaagcacattttctctgagatcgctaacaatttgagctaagatatcacgtcttggtctacaagcagcatgaagatcatagttgctactcctcctgagagaaataccctgtcttgatt

SEQ ID NO: 7650 - protein, 117 aa, Glycine max
  peptide (1)..(117): Ceres Seq. ID no. 13595536
  misc_feature (1)..(105): NCBI GI NO: 15239719 NR Description: Kip-related protein 3 [Arabidopsis thaliana]
MGKYMKKSKITNNDTEPTEPTFLGVRTRDAKTLALKRLNSSASDSALAGDSSCYLQLHSRRLEKPPALTEPKQPPRIKEPGSKGRVSSGLGSVHVAQSCNGDDWFGKSEAFLWREQS

SEQ ID NO: 7651 - protein, 113 aa, Glycine max
  peptide (1)..(113): Ceres Seq. ID no. 13595537
  misc_feature (1)..(101): NCBI GI NO: 15239719 NR Description: Kip-related protein 3 [Arabidopsis thaliana]
MKKSKITNNDTEPTEPTFLGVRTRDAKTLALKRLNSSASDSALAGDSSCYLQLHSRRLEKPPALTEPKQPPRIKEPGSKGRVSSGLGSVHVAQSCNGDDWFGKSEAFLWREQS

SEQ ID NO: 7652 - DNA, 1268 bp, Glycine max
  misc_feature (1)..(1268): Ceres Seq. ID no. 13595542
gaacatcctaatcgaaaaagacgtttcgatccctctctgactctctcctcccccctgccccctcctcggcgcccgcctcgcgaatccgtcggaaacccctcgccgctcccggttctagcgcagcgcagagatggtagccgcgcgcctcctcgcgcgggccacgaggcaatgcgccgccgcggtggtggcgtccgctactaggcggccgctcggcggcgtggcggcggtggccgctcgcccgctcgcctcttccttcggccccgccagggttccatatatgttgaatcagcccttgagatactcaagcaacatctttcaaaggtttggcttttcatcttctactcctcaacaaaatgataaggaggtacacgaacccaaagaccaggaaagtactgcacatgaatcgaatggtgaagcttcaaaggaagacagtggttcgcctggaagtacagaagatcttgatctgtcaaaggaggatctagtgaagctagtttttgagaaggatgaattattaacctcgaaagatgaagagatcaaagatatgaaggacaaggttttgcgcagctatgcagaaatggaaaatgtcattgcccggacaaagcgtgaatctgaaaattcaaaaaaatatgcagtacagaacttctctaagagcttgttagatgttgctgacaatttggctagagcttcatctgttgtaaaggaaagcttctcaaaattagatacatccgaagattctagtggagctgtaccgttactaaaaaccctactggagggtgttgacatgactgataagcaacttggagaggtttttaagaagttcggagtcgaaaggtttgatccgttgaatgagaaattcgatcctgataagcattttgcacttttccaaattcctgatccttcaaaaccatccggaactgttgcttctgttgtgaaggtggggtacatgttacatgatcgcgtgctccgtcctgcggaagttggtgttactgagggaggtccgtccgaagagcctgaggagaaatcaggtggagattagattaaaattggaatctagaagacgtagctgttcctgcttgacgacaaccggtacctcatcagcgaaggagcttggcgatggcagtgtttcggattgatttttaatggtaaaacacaaggttggcttgttgaaatcccatttgtatgggtgcacgtcacaccattccttagcagtacaacgtttcggagaattttgcgagggctttgagaccttaataagagtatttcttttc

SEQ ID NO: 7653 - protein, 301 aa, Glycine max
  peptide (1)..(301): Ceres Seq. ID no. 15221605
  misc_feature (96)..(287): Pfam Name: Pfam Description:  GrpE
  misc_feature (3)..(298): NCBI GI NO: 38636943 NR Description: putative chaperone GrpE
  misc_feature (1)..(298): NCBI GI NO: 7485329 NR Description: hypothetical protein F10M23
  misc_feature (81)..(298): NCBI GI NO: 18416821 NR Description: grpE like protein [Arabidopsis thaliana]
  misc_feature (57)..(298): NCBI GI NO: 3851640 NR Description: chaperone GrpE type 2 [Nicotiana tabacum]
  misc_feature (63)..(286): NCBI GI NO: 3851638 NR Description: chaperone GrpE type 1 [Nicotiana tabacum]
  misc_feature (1)..(298): NCBI GI NO: 15240475 NR Description: chaperone GrpE-related protein
  misc_feature (1)..(298): NCBI GI NO: 21554173 NR Description: chaperone GrpE-like protein [Arabidopsis thaliana]
  misc_feature (81)..(298): NCBI GI NO: 1669597 NR Description: AR192 [Arabidopsis thaliana]
  misc_feature (134)..(301): NCBI GI NO: 22962327 NR Description: hypothetical protein [Rhodopseudomonas palustris]
  misc_feature (126)..(301): NCBI GI NO: 23012592 NR Description: hypothetical protein
MVAARLLARATRQCAAAVVASATRRPLGGVAAVAARPLASSFGPARVPYMLNQPLRYSSNIFQRFGFSSSTPQQNDKEVHEPKDQESTAHESNGEASKEDSGSPGSTEDLDLSKEDLVKLVFEKDELLTSKDEEIKDMKDKVLRSYAEMENVIARTKRESENSKKYAVQNFSKSLLDVADNLARASSVVKESFSKLDTSEDSSGAVPLLKTLLEGVDMTDKQLGEVFKKFGVERFDPLNEKFDPDKHFALFQIPDPSKPSGTVASVVKVGYMLHDRVLRPAEVGVTEGGPSEEPEEKSGGD

SEQ ID NO: 7654 - protein, 252 aa, Glycine max
  peptide (1)..(252): Ceres Seq. ID no. 15221606
  misc_feature (47)..(238): Pfam Name: Pfam Description:  GrpE
  misc_feature (1)..(249): NCBI GI NO: 38636943 NR Description: putative chaperone GrpE
  misc_feature (1)..(249): NCBI GI NO: 7485329 NR Description: hypothetical protein F10M23
  misc_feature (32)..(249): NCBI GI NO: 18416821 NR Description: grpE like protein [Arabidopsis thaliana]
  misc_feature (8)..(249): NCBI GI NO: 3851640 NR Description: chaperone GrpE type 2 [Nicotiana tabacum]
  misc_feature (14)..(237): NCBI GI NO: 3851638 NR Description: chaperone GrpE type 1 [Nicotiana tabacum]
  misc_feature (1)..(249): NCBI GI NO: 15240475 NR Description: chaperone GrpE-related protein
  misc_feature (1)..(249): NCBI GI NO: 21554173 NR Description: chaperone GrpE-like protein [Arabidopsis thaliana]
  misc_feature (32)..(249): NCBI GI NO: 1669597 NR Description: AR192 [Arabidopsis thaliana]
  misc_feature (85)..(252): NCBI GI NO: 22962327 NR Description: hypothetical protein [Rhodopseudomonas palustris]
  misc_feature (77)..(252): NCBI GI NO: 23012592 NR Description: hypothetical protein
MLNQPLRYSSNIFQRFGFSSSTPQQNDKEVHEPKDQESTAHESNGEASKEDSGSPGSTEDLDLSKEDLVKLVFEKDELLTSKDEEIKDMKDKVLRSYAEMENVIARTKRESENSKKYAVQNFSKSLLDVADNLARASSVVKESFSKLDTSEDSSGAVPLLKTLLEGVDMTDKQLGEVFKKFGVERFDPLNEKFDPDKHFALFQIPDPSKPSGTVASVVKVGYMLHDRVLRPAEVGVTEGGPSEEPEEKSGGD

SEQ ID NO: 7655 - protein, 164 aa, Glycine max
  peptide (1)..(164): Ceres Seq. ID no. 15221607
  misc_feature (1)..(150): Pfam Name: Pfam Description:  GrpE
  misc_feature (1)..(161): NCBI GI NO: 38636943 NR Description: putative chaperone GrpE
  misc_feature (1)..(161): NCBI GI NO: 7485329 NR Description: hypothetical protein F10M23
  misc_feature (1)..(161): NCBI GI NO: 18416821 NR Description: grpE like protein [Arabidopsis thaliana]
  misc_feature (1)..(161): NCBI GI NO: 3851640 NR Description: chaperone GrpE type 2 [Nicotiana tabacum]
  misc_feature (1)..(149): NCBI GI NO: 3851638 NR Description: chaperone GrpE type 1 [Nicotiana tabacum]
  misc_feature (1)..(161): NCBI GI NO: 15240475 NR Description: chaperone GrpE-related protein
  misc_feature (1)..(161): NCBI GI NO: 21554173 NR Description: chaperone GrpE-like protein [Arabidopsis thaliana]
  misc_feature (1)..(161): NCBI GI NO: 1669597 NR Description: AR192 [Arabidopsis thaliana]
  misc_feature (1)..(164): NCBI GI NO: 22962327 NR Description: hypothetical protein [Rhodopseudomonas palustris]
  misc_feature (1)..(164): NCBI GI NO: 23012592 NR Description: hypothetical protein
MKDKVLRSYAEMENVIARTKRESENSKKYAVQNFSKSLLDVADNLARASSVVKESFSKLDTSEDSSGAVPLLKTLLEGVDMTDKQLGEVFKKFGVERFDPLNEKFDPDKHFALFQIPDPSKPSGTVASVVKVGYMLHDRVLRPAEVGVTEGGPSEEPEEKSGGD

SEQ ID NO: 7656 - DNA, 1875 bp, Glycine max
  misc_feature (1)..(1875): Ceres Seq. ID no. 13595556
  misc_feature (1670)..(1670): n is a, c, t, g, unknown, or other
  misc_feature (1705)..(1705): n is a, c, t, g, unknown, or other
  misc_feature (1714)..(1714): n is a, c, t, g, unknown, or other
  misc_feature (1737)..(1737): n is a, c, t, g, unknown, or other
  misc_feature (1740)..(1740): n is a, c, t, g, unknown, or other
  misc_feature (1768)..(1768): n is a, c, t, g, unknown, or other
  misc_feature (1779)..(1779): n is a, c, t, g, unknown, or other
atttgaaaatcttgcttcccccattcatattccaactattattattattcttttcttcaattccagattgaagcttttcacatcaacaataccctttagagccccaaacccattttcccactcttcattttcgcctccttcaacaggcaatgtaaacatgagtatttgcttttctactagtcagtcctcaataaatgctgttgtcctgaaaggtcgtactccgctgctgatgagcagtaacattcatggcctttggtcccaaggaatatcgacttcaatttcttccagtttgtctcctgggaagtcagagataagtcatgttggtctttctgtttgcacaaaattgtcttgctccactgttatgggccaaacaattagaggaggtttccttggatcatgctgctccaagcaaaggggcaatcctcgattctttagttctgtagtacctcggaagaggtatcatgaaatttcattggcatgccaaactataaatatgaggcttttggtacctaaacaaaatatgatgcgcaaagttaagtgtaatttgggatcagtaagttggccgcggggatgtgcttcagttggcttaatttttggattacttgtatgtaatttaagttctgaacctgctcatgctgagtcacattctgaaaatgaaaataggaaagatgactgcaacgagtatgagtcaaatgttaaagtcttgcatgggaagaaagtttatactaactattctgtaattggaataccaggggatggaagatgcttgttccgctctgttgctcgtggggcctgtttgaggtctggaaagccccctcctaatgaaagcattcagagagagctggcagatgatttacgagccagagttgctgatgagtttatcaaaagaaaggaagagaccgaatggtttgttgaaggtgattttgatacatatgtttcacaaataaggaagcctcatgtgtggggaggtgaacccgaattgttcattgcatcacatgttttgcagatgcctatcacagtatacatgtatgataaagatgctggtggtttgatatcaattgctgagtatggtcaagagtacggcaaagaaaacccaattagagttctctaccatggctttggtcattatgatgcattagagattcctagaaggaagggtcctaagccaagactgtagcatttcatatttaaaatgtggaagagattaaagcttgtattggttcccttcagtaacattcataatgtcatctataggtcaagtttcctgaaaaccttatgccttttatgtcttggaggacgtttggtccaaggcctcagtgaacagtgatattcactttattgctgtgccatgcacacggttgtttatgttggtctgaagaaagagagcctttgacttcaggtggaccttaaaggttcaaactatccactaacttctgtaagccctttctgtgaaaggtagaaataatggtatacccttctgtctctgagtccaccactatggaggggtgcatggatcttggtactgtactgcttccattgagaaaatatatgtaatggctgacaaagctgaaagttggataattatcgagagttcattaatatcaagtacatggggggtaagttgtgtttagggaattactagtgttttaggttttacttaaccaaacttntttgtttgccctattcactttttcatctcttaaanactttcatntccctcatttgcctcacagggtntcnccatttgaatatgttgtagtcaagtgtntcacatttttntgttagtaacaaggatgggtatcaaagcaaaaatatattgtagctaactgaacttaagctaattaaaacttatcaatttgttaacattggttatgg

SEQ ID NO: 7657 - protein, 391 aa, Glycine max
  peptide (1)..(391): Ceres Seq. ID no. 13595557
  misc_feature (250)..(376): Pfam Name: Pfam Description:  OTU-like cysteine protease
  misc_feature (161)..(391): NCBI GI NO: 18410816 NR Description: auxin-regulated protein [Arabidopsis thaliana]
  misc_feature (161)..(391): NCBI GI NO: 11280708 NR Description: hypothetical protein T10K17
  misc_feature (243)..(364): NCBI GI NO: 34902010 NR Description: unknown protein
  misc_feature (247)..(289): NCBI GI NO: 34907704 NR Description: P0035F12.12
FENLASPIHIPTIIIILFFNSRLKLFTSTIPFRAPNPFSHSSFSPPSTGNVNMSICFSTSQSSINAVVLKGRTPLLMSSNIHGLWSQGISTSISSSLSPGKSEISHVGLSVCTKLSCSTVMGQTIRGGFLGSCCSKQRGNPRFFSSVVPRKRYHEISLACQTINMRLLVPKQNMMRKVKCNLGSVSWPRGCASVGLIFGLLVCNLSSEPAHAESHSENENRKDDCNEYESNVKVLHGKKVYTNYSVIGIPGDGRCLFRSVARGACLRSGKPPPNESIQRELADDLRARVADEFIKRKEETEWFVEGDFDTYVSQIRKPHVWGGEPELFIASHVLQMPITVYMYDKDAGGLISIAEYGQEYGKENPIRVLYHGFGHYDALEIPRRKGPKPRL

SEQ ID NO: 7658 - protein, 339 aa, Glycine max
  peptide (1)..(339): Ceres Seq. ID no. 13595558
  misc_feature (198)..(324): Pfam Name: Pfam Description:  OTU-like cysteine protease
  misc_feature (109)..(339): NCBI GI NO: 18410816 NR Description: auxin-regulated protein [Arabidopsis thaliana]
  misc_feature (109)..(339): NCBI GI NO: 11280708 NR Description: hypothetical protein T10K17
  misc_feature (191)..(312): NCBI GI NO: 34902010 NR Description: unknown protein
  misc_feature (195)..(237): NCBI GI NO: 34907704 NR Description: P0035F12.12
MSICFSTSQSSINAVVLKGRTPLLMSSNIHGLWSQGISTSISSSLSPGKSEISHVGLSVCTKLSCSTVMGQTIRGGFLGSCCSKQRGNPRFFSSVVPRKRYHEISLACQTINMRLLVPKQNMMRKVKCNLGSVSWPRGCASVGLIFGLLVCNLSSEPAHAESHSENENRKDDCNEYESNVKVLHGKKVYTNYSVIGIPGDGRCLFRSVARGACLRSGKPPPNESIQRELADDLRARVADEFIKRKEETEWFVEGDFDTYVSQIRKPHVWGGEPELFIASHVLQMPITVYMYDKDAGGLISIAEYGQEYGKENPIRVLYHGFGHYDALEIPRRKGPKPRL

SEQ ID NO: 7659 - protein, 315 aa, Glycine max
  peptide (1)..(315): Ceres Seq. ID no. 13595559
  misc_feature (174)..(300): Pfam Name: Pfam Description:  OTU-like cysteine protease
  misc_feature (85)..(315): NCBI GI NO: 18410816 NR Description: auxin-regulated protein [Arabidopsis thaliana]
  misc_feature (85)..(315): NCBI GI NO: 11280708 NR Description: hypothetical protein T10K17
  misc_feature (167)..(288): NCBI GI NO: 34902010 NR Description: unknown protein
  misc_feature (171)..(213): NCBI GI NO: 34907704 NR Description: P0035F12.12
MSSNIHGLWSQGISTSISSSLSPGKSEISHVGLSVCTKLSCSTVMGQTIRGGFLGSCCSKQRGNPRFFSSVVPRKRYHEISLACQTINMRLLVPKQNMMRKVKCNLGSVSWPRGCASVGLIFGLLVCNLSSEPAHAESHSENENRKDDCNEYESNVKVLHGKKVYTNYSVIGIPGDGRCLFRSVARGACLRSGKPPPNESIQRELADDLRARVADEFIKRKEETEWFVEGDFDTYVSQIRKPHVWGGEPELFIASHVLQMPITVYMYDKDAGGLISIAEYGQEYGKENPIRVLYHGFGHYDALEIPRRKGPKPRL

SEQ ID NO: 7660 - DNA, 635 bp, Glycine max
  misc_feature (1)..(635): Ceres Seq. ID no. 13595610
gatgaagaccgaatccccgcgtcatcttcgtaaccctctgctcgtcctcctcttcctcgcagcagcagcagcagcgtcggcagcccccgtcgtccagatcgccatggcggccgagccggagcaggcgcccgcggcgcaggaggcggccgtgcacatcgtctacgtggaccgccccgaggacgccgaccccgaggagttccacatccgcacccttgcccccgtcctcggcagcgaggagaaggccaggggcgcggtcctctaccactacaagcacgccgccagcggattctccgcaaagctcaccaccgagcaggtcgaggacctcaagaagcaaccaggtgtccttcaggttgtgccgagccagacctaccagctccatggaaatgagggtggacatgccagcacaacccgcaccatgggccttatgtgaaagccccgggtaggctctgttcttctaatgtgggaatggtcgcatctcatggctgtaacctaagaataagagatgtatccacttgactttgaagggatccagttcctgaagtgtgtaaatgtaatgaattaatgcatgatggcgaacaaatgtgctgatctaatctcgtttggctacaagtttgaattaatgtgatggcaaactc

SEQ ID NO: 7661 - protein, 142 aa, Glycine max
  peptide (1)..(142): Ceres Seq. ID no. 13595611
  misc_feature (50)..(126): Pfam Name: Pfam Description:  Subtilisin N-terminal Region
  misc_feature (1)..(131): NCBI GI NO: 21593285 NR Description: unknown [Arabidopsis thaliana]
  misc_feature (1)..(131): NCBI GI NO: 18409953 NR Description: expressed protein [Arabidopsis thaliana]
  misc_feature (47)..(126): NCBI GI NO: 7489176 NR Description: pit2 protein
  misc_feature (29)..(126): NCBI GI NO: 3204125 NR Description: putative Pi starvation-induced protein
  misc_feature (23)..(125): NCBI GI NO: 28376696 NR Description: putative Pi starvation induced protein
  misc_feature (22)..(128): NCBI GI NO: 34394844 NR Description: unknown protein
  misc_feature (5)..(131): NCBI GI NO: 34910838 NR Description: P0456A01.27
  misc_feature (50)..(125): NCBI GI NO: 18408462 NR Description: subtilisin-like serine protease
  misc_feature (42)..(125): NCBI GI NO: 4115919 NR Description: similar to the subtilase family of serine proteases
  misc_feature (42)..(125): NCBI GI NO: 18413351 NR Description: subtilisin-like serine protease
MKTESPRHLRNPLLVLLFLAAAAAASAAPVVQIAMAAEPEQAPAAQEAAVHIVYVDRPEDADPEEFHIRTLAPVLGSEEKARGAVLYHYKHAASGFSAKLTTEQVEDLKKQPGVLQVVPSQTYQLHGNEGGHASTTRTMGLM

SEQ ID NO: 7662 - protein, 108 aa, Glycine max
  peptide (1)..(108): Ceres Seq. ID no. 13595612
  misc_feature (16)..(92): Pfam Name: Pfam Description:  Subtilisin N-terminal Region
  misc_feature (1)..(97): NCBI GI NO: 21593285 NR Description: unknown [Arabidopsis thaliana]
  misc_feature (1)..(97): NCBI GI NO: 18409953 NR Description: expressed protein [Arabidopsis thaliana]
  misc_feature (13)..(92): NCBI GI NO: 7489176 NR Description: pit2 protein
  misc_feature (1)..(92): NCBI GI NO: 3204125 NR Description: putative Pi starvation-induced protein
  misc_feature (1)..(91): NCBI GI NO: 28376696 NR Description: putative Pi starvation induced protein
  misc_feature (1)..(94): NCBI GI NO: 34394844 NR Description: unknown protein
  misc_feature (1)..(97): NCBI GI NO: 34910838 NR Description: P0456A01.27
  misc_feature (16)..(91): NCBI GI NO: 18408462 NR Description: subtilisin-like serine protease
  misc_feature (8)..(91): NCBI GI NO: 4115919 NR Description: similar to the subtilase family of serine proteases
  misc_feature (8)..(91): NCBI GI NO: 18413351 NR Description: subtilisin-like serine protease
MAAEPEQAPAAQEAAVHIVYVDRPEDADPEEFHIRTLAPVLGSEEKARGAVLYHYKHAASGFSAKLTTEQVEDLKKQPGVLQVVPSQTYQLHGNEGGHASTTRTMGLM

SEQ ID NO: 7663 - DNA, 1007 bp, Glycine max
  misc_feature (1)..(1007): Ceres Seq. ID no. 13595613
cctttcccccctcccgttccaactttattgtgtttaacaacctagaacatcctaatcgaaaaacaacccaccccacgtattccccgcacctttcccccctcccccggcctcggcaagaccgcgcgcggcgcgccatgacgagctccgcctcctcctccccttcccgcaaggtgctgagcaagatcgcgtgcctccggctgcagaaggagctcggggagtggcaggccagccctcccggcggcttcacctacaaggtctccgacaacctccagcggtgggtcatcgaggtgtccggggcggaggggacgctctacgccggcgagacgtaccggctgcaggttgacttcccggagcagtaccccatggaggctccacaggttatatttatgcatccggcgccgatgcatccgcacatttacagcaatgggcacatctgtctagatatattgtacgactcgtggtcaccagcaatgacggtcagttccgtgtgcatcagcatcttgtccatgttgtcaagttcaccagcgaaggaacgcccatccgataacgatcgctatgtcaggaactgccgcaacgggaggtctccgaaggagacgaggtggtggtttcatgatgacaaagtgtgatgcgctccagctggtttcttcttccggcatcagcagctcttacacatcatcctgcctaccgtagtatggcgtgcgtcgttcatgaaaagattatttaggcaaatatttcaagccatctatttggcggcaaattgacatgcccatgtatgtggttttgtacatgatgaatctgcacctgtatcaactcccgtgcttaccaactcttatcccttttgatatgatgaaagtagtaatcgagtgttttatcttaacaaaaaaaaaaaaaaaaaaaaaaaaaaaaaaaaaaaaaaaaaaaaaaaaaaaaaaaaaaaaaaaaaaaaaagaaaaaaaaaaaaaaaaaggtttatcgatcccgccaacctcaagggggggcccggaacc

SEQ ID NO: 7664 - protein, 207 aa, Glycine max
  peptide (1)..(207): Ceres Seq. ID no. 13595614
  misc_feature (45)..(207): NCBI GI NO: 18422281 NR Description: ubiquitin-conjugating enzyme 18 (UBC18)
  misc_feature (45)..(207): NCBI GI NO: 481811 NR Description: ubiquitin-conjugating enzyme UBC2-1
  misc_feature (45)..(207): NCBI GI NO: 18401461 NR Description: ubiquitin-conjugating enzyme 15 (UBC15)
  misc_feature (48)..(207): NCBI GI NO: 18410856 NR Description: ubiquitin-conjugating enzyme 16 (UBC16)
  misc_feature (48)..(207): NCBI GI NO: 4090259 NR Description: ubiquitin-conjugating enzyme E2
  misc_feature (48)..(207): NCBI GI NO: 2801444 NR Description: ubiquitin-conjugating enzyme 16
  misc_feature (45)..(207): NCBI GI NO: 18419831 NR Description: ubiquitin-conjugating enzyme 17 (UBC17)
  misc_feature (45)..(176): NCBI GI NO: 34897008 NR Description: putative ubiquitin-conjugating enzyme E2
  misc_feature (111)..(207): NCBI GI NO: 25293670 NR Description: ubiquitin-conjugating enzyme 18
  misc_feature (58)..(207): NCBI GI NO: 17510293 NR Description: Ubiquitin conjugating enzyme UBC-16 (16
FPPSRSNFIVFNNLEHPNRKTTHPTYSPHLSPLPRPRQDRARRAMTSSASSSPSRKVLSKIACLRLQKELGEWQASPPGGFTYKVSDNLQRWVIEVSGAEGTLYAGETYRLQVDFPEQYPMEAPQVIFMHPAPMHPHIYSNGHICLDILYDSWSPAMTVSSVCISILSMLSSSPAKERPSDNDRYVRNCRNGRSPKETRWWFHDDKV

SEQ ID NO: 7665 - protein, 163 aa, Glycine max
  peptide (1)..(163): Ceres Seq. ID no. 13595615
  misc_feature (1)..(163): NCBI GI NO: 18422281 NR Description: ubiquitin-conjugating enzyme 18 (UBC18)
  misc_feature (1)..(163): NCBI GI NO: 481811 NR Description: ubiquitin-conjugating enzyme UBC2-1
  misc_feature (1)..(163): NCBI GI NO: 18401461 NR Description: ubiquitin-conjugating enzyme 15 (UBC15)
  misc_feature (4)..(163): NCBI GI NO: 18410856 NR Description: ubiquitin-conjugating enzyme 16 (UBC16)
  misc_feature (4)..(163): NCBI GI NO: 4090259 NR Description: ubiquitin-conjugating enzyme E2
  misc_feature (4)..(163): NCBI GI NO: 2801444 NR Description: ubiquitin-conjugating enzyme 16
  misc_feature (1)..(163): NCBI GI NO: 18419831 NR Description: ubiquitin-conjugating enzyme 17 (UBC17)
  misc_feature (1)..(132): NCBI GI NO: 34897008 NR Description: putative ubiquitin-conjugating enzyme E2
  misc_feature (67)..(163): NCBI GI NO: 25293670 NR Description: ubiquitin-conjugating enzyme 18
  misc_feature (14)..(163): NCBI GI NO: 17510293 NR Description: Ubiquitin conjugating enzyme UBC-16 (16
MTSSASSSPSRKVLSKIACLRLQKELGEWQASPPGGFTYKVSDNLQRWVIEVSGAEGTLYAGETYRLQVDFPEQYPMEAPQVIFMHPAPMHPHIYSNGHICLDILYDSWSPAMTVSSVCISILSMLSSSPAKERPSDNDRYVRNCRNGRSPKETRWWFHDDKV

SEQ ID NO: 7666 - DNA, 1370 bp, Glycine max
  misc_feature (1)..(1370): Ceres Seq. ID no. 13582350
acactacaactaaacacactagctattagctatagctagaagtccctccaatccctctttgtctttgtgcttttctagttccttccaaaataccaacaaaagcaaagacaatgagttgccaagcatggcccgaacccatagttcgagtccaatccttagctgaaagtggcctaagttcaatcccttcacgctacattaggcctcactcccaaagaccctccaataccacttcttttccaactcctaaaccttttcaaactgatcatcatcatggtcatgatcagaaaacttccgatcatgaccatgatcatgatcatgttaacattcccgtcattgacctgaaacatgttttctcggaggatccgatcctccgagaacaagtgtttgggcaggtggaccaggcatgtcgggagtgggggttcttccaggtggtgaaccatggtgttagccatgagttgatgaagagttctagggaactgtggcgtgagttcttcaaccagccacttgagatgaaggaagagtatgcaaactcccccaccacttatgagggatatggtagtcgcttgggagtgcagaaaggtgccaccttggattggagtgactacttctttctccattacatgcctccttcacttaggaaccaagctaagtggcctgcatttccagaatccttgaggaaagtgattgctgaatatggtgaaggagtggttaagctaggaggaaggatactcaagatgatgtcaataaaccttggtttgaaagaagatttccttctcaatgcatttgggggagagagtgaggttggtgcatgcctaagggtgaatttctatccaaagtgccctcaacctgacctcacttttggactctcccctcactcagatcctggtggcatgaccattcttctccctgatgattttgtgtctggccttcaagtaagaagaggagatgaatggattacagttaagcctgtcccaaatgccttcatcatcaacattggtgaccaaattcaggtgctgagcaatgcaatatacaagagtgtagaacacagggtgattgtgaactcaaacaaagatcgtgtgtccttggccttgttctacaacccgaggagtgatttactcattcaacctgccaaggagcttgtgacagaggagaagccagccttgtactcaccaatgacctatgatgaatacagactttacattaggctaaatggaccttgtggaaaggcccaagttgaatcattggcctcccaaacatgagttaatagtgtgaattaatagcaagtttggtttctcaatgtgattttctatgtttcagatgtcattttaagaagttaataaaaagttaattgttataacttctatattctc

SEQ ID NO: 7667 - protein, 382 aa, Glycine max
  peptide (1)..(382): Ceres Seq. ID no. 13582351
  misc_feature (231)..(331): Pfam Name: II Pfam Description: 2OG-Fe
  misc_feature (25)..(380): NCBI GI NO: 15228785 NR Description: oxidoreductase, 2OG-Fe(II) oxygenase family
  misc_feature (4)..(39): NCBI GI NO: 15228785 NR Description: oxidoreductase, 2OG-Fe(II) oxygenase family
  misc_feature (11)..(377): NCBI GI NO: 15239179 NR Description: oxidoreductase, 2OG-Fe(II) oxygenase family
  misc_feature (40)..(378): NCBI GI NO: 15224472 NR Description: oxidoreductase, 2OG-Fe(II) oxygenase family
  misc_feature (6)..(40): NCBI GI NO: 15224472 NR Description: oxidoreductase, 2OG-Fe(II) oxygenase family
  misc_feature (40)..(378): NCBI GI NO: 21554535 NR Description: putative anthocyanidin synthase
  misc_feature (6)..(40): NCBI GI NO: 21554535 NR Description: putative anthocyanidin synthase
  misc_feature (25)..(377): NCBI GI NO: 21537324 NR Description: leucoanthocyanidin dioxygenase-like protein
  misc_feature (12)..(377): NCBI GI NO: 15229694 NR Description: oxidoreductase, 2OG-Fe(II) oxygenase family
  misc_feature (57)..(302): NCBI GI NO: 34907994 NR Description: leucoanthocyanidin dioxygenase-like protein
MSCQAWPEPIVRVQSLAESGLSSIPSRYIRPHSQRPSNTTSFPTPKPFQTDHHHGHDQKTSDHDHDHDHVNIPVIDLKHVFSEDPILREQVFGQVDQACREWGFFQVVNHGVSHELMKSSRELWREFFNQPLEMKEEYANSPTTYEGYGSRLGVQKGATLDWSDYFFLHYMPPSLRNQAKWPAFPESLRKVIAEYGEGVVKLGGRILKMMSINLGLKEDFLLNAFGGESEVGACLRVNFYPKCPQPDLTFGLSPHSDPGGMTILLPDDFVSGLQVRRGDEWITVKPVPNAFIINIGDQIQVLSNAIYKSVEHRVIVNSNKDRVSLALFYNPRSDLLIQPAKELVTEEKPALYSPMTYDEYRLYIRLNGPCGKAQVESLASQT

SEQ ID NO: 7668 - protein, 266 aa, Glycine max
  peptide (1)..(266): Ceres Seq. ID no. 13582352
  misc_feature (115)..(215): Pfam Name: II Pfam Description: 2OG-Fe
  misc_feature (1)..(264): NCBI GI NO: 15228785 NR Description: oxidoreductase, 2OG-Fe(II) oxygenase family
  misc_feature (1)..(261): NCBI GI NO: 15239179 NR Description: oxidoreductase, 2OG-Fe(II) oxygenase family
  misc_feature (1)..(262): NCBI GI NO: 15224472 NR Description: oxidoreductase, 2OG-Fe(II) oxygenase family
  misc_feature (1)..(262): NCBI GI NO: 21554535 NR Description: putative anthocyanidin synthase
  misc_feature (1)..(261): NCBI GI NO: 21537324 NR Description: leucoanthocyanidin dioxygenase-like protein
  misc_feature (1)..(261): NCBI GI NO: 15229694 NR Description: oxidoreductase, 2OG-Fe(II) oxygenase family
  misc_feature (1)..(186): NCBI GI NO: 34907994 NR Description: leucoanthocyanidin dioxygenase-like protein
  misc_feature (181)..(266): NCBI GI NO: 34907994 NR Description: leucoanthocyanidin dioxygenase-like protein
  misc_feature (1)..(244): NCBI GI NO: 22266677 NR Description: leucoanthocyanidin dioxgenase
  misc_feature (1)..(244): NCBI GI NO: 29423729 NR Description: anthocyanidin synthase [Brassica oleracea]
MKSSRELWREFFNQPLEMKEEYANSPTTYEGYGSRLGVQKGATLDWSDYFFLHYMPPSLRNQAKWPAFPESLRKVIAEYGEGVVKLGGRILKMMSINLGLKEDFLLNAFGGESEVGACLRVNFYPKCPQPDLTFGLSPHSDPGGMTILLPDDFVSGLQVRRGDEWITVKPVPNAFIINIGDQIQVLSNAIYKSVEHRVIVNSNKDRVSLALFYNPRSDLLIQPAKELVTEEKPALYSPMTYDEYRLYIRLNGPCGKAQVESLASQT

SEQ ID NO: 7669 - protein, 249 aa, Glycine max
  peptide (1)..(249): Ceres Seq. ID no. 13582353
  misc_feature (98)..(198): Pfam Name: II Pfam Description: 2OG-Fe
  misc_feature (1)..(247): NCBI GI NO: 15228785 NR Description: oxidoreductase, 2OG-Fe(II) oxygenase family
  misc_feature (1)..(244): NCBI GI NO: 15239179 NR Description: oxidoreductase, 2OG-Fe(II) oxygenase family
  misc_feature (1)..(245): NCBI GI NO: 15224472 NR Description: oxidoreductase, 2OG-Fe(II) oxygenase family
  misc_feature (1)..(245): NCBI GI NO: 21554535 NR Description: putative anthocyanidin synthase
  misc_feature (1)..(244): NCBI GI NO: 21537324 NR Description: leucoanthocyanidin dioxygenase-like protein
  misc_feature (1)..(244): NCBI GI NO: 15229694 NR Description: oxidoreductase, 2OG-Fe(II) oxygenase family
  misc_feature (1)..(169): NCBI GI NO: 34907994 NR Description: leucoanthocyanidin dioxygenase-like protein
  misc_feature (164)..(249): NCBI GI NO: 34907994 NR Description: leucoanthocyanidin dioxygenase-like protein
  misc_feature (1)..(227): NCBI GI NO: 22266677 NR Description: leucoanthocyanidin dioxgenase
  misc_feature (1)..(227): NCBI GI NO: 29423729 NR Description: anthocyanidin synthase [Brassica oleracea]
MKEEYANSPTTYEGYGSRLGVQKGATLDWSDYFFLHYMPPSLRNQAKWPAFPESLRKVIAEYGEGVVKLGGRILKMMSINLGLKEDFLLNAFGGESEVGACLRVNFYPKCPQPDLTFGLSPHSDPGGMTILLPDDFVSGLQVRRGDEWITVKPVPNAFIINIGDQIQVLSNAIYKSVEHRVIVNSNKDRVSLALFYNPRSDLLIQPAKELVTEEKPALYSPMTYDEYRLYIRLNGPCGKAQVESLASQT

SEQ ID NO: 7670 - DNA, 1541 bp, Glycine max
  misc_feature (1)..(1541): Ceres Seq. ID no. 13595560
actgcctcagtgttctccataacaccataaaacactgacccaatctttctcctcctcctccctcacaatctgacacactaacacaccaaaattcaaattacattaccaaaaaaagaaaaatggtgggtacatatgcatatacatatacatatagactactatagagtgaaagtgatatacttcttgctattcaatttttatgtctgttttgaagttaattctgttcactctcctggcgcaaacacagatcaaaattcaaattgcaaagtaaaaaaaaaaaaccatgttcgtttcttcttcatcgcatgttccccgttggctccaagttctcctcacggagaagttctacaacgtttgcataattcacgaagaggcaaagaagaacgagaagaacgtttattgcttggattgttgcattagcctctgccctcactgtttgtccccccaccgctctcatagactcttgcagattagaagatatgtgtatcacgatgttataaggttggatgatgctgcaaagttaattgactgcaattccgttcaatcctacacaaccaacagcgcaaaagtggtatttttaaaccaaaggccacagacaaggaacttcagaggctccggcaatttctgcagcacctgtgacagaagcctgcaagacccataccacttctgctccctctcttgcaaggtctttcctttggtcactcccattttcgccctctcaccaacgttaccattattctttattcttattatatatattattattattactattctttttttctcttatttatgtaatgtgtgtcttctaataatgtttatgtttatgtttatttcctcaatttttttttctcgtttttgtttttgttttaaacagataaattatctcgtcagaacaacggactctctctgcggctacctcttcgagtgcaactacctgccgctactggaatctgggctcgacgatggtctaatgatgactcctgattcggttctcgaaccgtctggttcaggggggtacggaggggtggattgtaggaccaccttggcttgcactgccaccaccgagattgtgaggaagaagaggaccggcggtgccgctttccggcttccgttccggccggcgtgctcgccggtctcggaaatctcggcgtgtctcatgaaccggaggaaagggaacccccagcgggccccactccattgaagaacttgagagagagggtgagtttttttttatatgaaaagagaaaaaaaaacgtttattaaatattaatattctaaatactgttattattattatggagtttaaatctggggttggaacttactatacctttacagggagaaaaaaataacctcctagttttgtagagattatcaccctctgctttgttgctgctgtgtatctatctacccggattgttagaatttattgaggtttattactgcttctgttatagtactagtatatataatttgataatttgaaaraamaamwaaaaaaagyttatcrataccgtcsacctcsagggggggcccgg

SEQ ID NO: 7671 - protein, 306 aa, Glycine max
  peptide (1)..(306): Ceres Seq. ID no. 15221611
  misc_feature (10)..(139): Pfam Name: Pfam Description:  Protein of unknown function, DUF597
  misc_feature (6)..(139): NCBI GI NO: 15232396 NR Description: hypothetical protein [Arabidopsis thaliana]
  misc_feature (10)..(135): NCBI GI NO: 16117799 NR Description: zinc-binding protein [Pisum sativum]
  misc_feature (10)..(138): NCBI GI NO: 9755373 NR Description: F17F8.4 [Arabidopsis thaliana]
  misc_feature (10)..(135): NCBI GI NO: 38346725 NR Description: OSJNBa0086O06.23
  misc_feature (10)..(157): NCBI GI NO: 15236696 NR Description: expressed protein [Arabidopsis thaliana]
  misc_feature (10)..(135): NCBI GI NO: 6714272 NR Description: F6N18.8 [Arabidopsis thaliana]
  misc_feature (10)..(135): NCBI GI NO: 18398555 NR Description: expressed protein [Arabidopsis thaliana]
  misc_feature (10)..(135): NCBI GI NO: 21554139 NR Description: unknown [Arabidopsis thaliana]
  misc_feature (10)..(135): NCBI GI NO: 18394936 NR Description: expressed protein [Arabidopsis thaliana]
  misc_feature (10)..(135): NCBI GI NO: 25337907 NR Description: hypothetical protein F9H16
MFVSSSSHVPRWLQVLLTEKFYNVCIIHEEAKKNEKNVYCLDCCISLCPHCLSPHRSHRLLQIRRYVYHDVIRLDDAAKLIDCNSVQSYTTNSAKVVFLNQRPQTRNFRGSGNFCSTCDRSLQDPYHFCSLSCKVFPLVTPIFALSPTLPLFFILIIYIIIITILFFSYLCNVCLLIMFMFMFISSIFFSRFCFCFKQINYLVRTTDSLCGYLFECNYLPLLESGLDDGLMMTPDSVLEPSGSGGYGGVDCRTTLACTATTEIVRKKRTGGAAFRLPFRPACSPVSEISACLMNRRKGNPQRAPLH

SEQ ID NO: 7672 - DNA, 2214 bp, Glycine max
  misc_feature (1)..(2214): Ceres Seq. ID no. 12611726
aaaaacatggacgaatggcgcgccaccatcaaaatggatcacagaacccaacgaacttagaaaacctaaccgagtcctccatcagtcatattcccatcgaccgttcagaatgattgatggtagcgatcatgcaacagcagcagcagcatcaacagcaacagcagaacccctctgcactggtgccacctcagctcaagaatccccaatcctccaccacaaccaccaccgccaccaccactccccttaggtcaccctccgcccagtcgccgctctccgtcgtccaacccatccggcaacccccacccccctctcatccggtggtgccggttacgacggtggagcccggtctgacggcggtgccgacgtgtccgctggtcagagtccggctctcggacattgccccctatgacggggcaccagggggaccctatctgagagcaatggaggcactgtgtgggtctctgttgcggcacaatgctgctttgatcgaattggggaacgaagacactgctctgatgcgatgcggcttggaaggtgcgaggttgttcttcagaagtagggcccaccttggttctggcaagggcagccgtggggtttacatgtacagagcaggaagggctttggaggattgggattcttctcccccttgcatggctgatattttcaggtgcatgggaaaggcatctcgatccgccttgtgtgccattgcgaggcatttgcgtcttagaagcgatgtttttaaccatttgcttgatgatgctccattgcctgctaatgaggtgtcttcgtcggttcttgttgtgacctactcacatgcttctttgcaaaatggaaggggtgccattggaggcagtaagcctaccatgaatggtgaagttgagaagggattgttgacgttgatatcttctgacactcctggtcttcaggtatgtgatcccagtggtcgatggtatctggcagacagtgggtttgggcctggagatcttttacttataacaggcaaggcacttagccatgctactgctggcctatgtcctgctgcatcatatagagcttctcctgattattttctgagtcctaatggtggaggaaggtcttctcttgcatataggctcatgccacagggcaatgctatattagattgttccccaattgcagcagctggccatgttattccccaaagctatgttcgaatatctgtaagccaatttatggatgaccttgctgccgaagaactgataggcagcagatgtgataatgctgatgctgctgctcaacacaatgtgaataaggagccatcattaagaagtgttctatcagatcctttatctggcacattccttgaagatgccatgcttgtctcatgtggacattcttttggtggtctcatgctgaggagagtcattgaaacgtcaaaatgtactctctgcaatgtggaaattgaaactggttctttgatccctaatcatgctcttagagctgcagcagctgctgtcaagcatgaggatgatcggaggttatttcgtaatgccgctctccgaaagcggcggaaagaaatgggtgaccaaatggattcaatgagaagagtgaatggggaaaatggagattttactgctgccgatggacttcagcggggagtacaatatccatttttggtaaatgagaaagttgttattaagggcaacaggagaacaccagaaaaatttgttgggaaagaagctgtgattacatctcagtgtctcaatggctggtatttgctcaagattattgaaactggagagaatgtccgcctgcagtaccgttctcttaggaagctcttaaactcaccagcggaccagtgcccctcccagccaattcaaaatagcagctcttaaaatagatttattgtaggttttccttctttcttttttcctccaccagaaaaaggaaacttttgtagtcttgatcctttgaagcaaagaattgactcatctagtcttgatctatgattgtaaagaattacattgactggtccggctccttatagcatgtgatagaggtttataatgtatcaacgaggttatttgtgtagatgccaatgctaggtcggcttataattattgtaaagaagaaagcaggcaaagataaattagatagcatgtaaattgtagcttgcacttactgaaatggatcatatgtttaattttatttattttgcaactattcagtttttgt

SEQ ID NO: 7673 - protein, 585 aa, Glycine max
  peptide (1)..(585): Ceres Seq. ID no. 12611727
  misc_feature (41)..(584): NCBI GI NO: 30685540 NR Description: expressed protein [Arabidopsis thaliana]
  misc_feature (41)..(584): NCBI GI NO: 11994201 NR Description: gb|AAF35943
  misc_feature (41)..(489): NCBI GI NO: 20453175 NR Description: At3g19895 [Arabidopsis thaliana]
  misc_feature (396)..(566): NCBI GI NO: 28876015 NR Description: hypothetical protein
  misc_feature (176)..(374): NCBI GI NO: 33146538 NR Description: unknown protein
  misc_feature (86)..(181): NCBI GI NO: 33146538 NR Description: unknown protein
  misc_feature (176)..(374): NCBI GI NO: 33146537 NR Description: unknown protein
  misc_feature (86)..(181): NCBI GI NO: 33146537 NR Description: unknown protein
  misc_feature (176)..(374): NCBI GI NO: 34901828 NR Description: contains EST AU068498
  misc_feature (86)..(181): NCBI GI NO: 34901828 NR Description: contains EST AU068498
MVAIMQQQQQHQQQQQNPSALVPPQLKNPQSSTTTTTATTTPLRSPSAQSPLSVVQPIRQPPPPSHPVVPVTTVEPGLTAVPTCPLVRVRLSDIAPYDGAPGGPYLRAMEALCGSLLRHNAALIELGNEDTALMRCGLEGARLFFRSRAHLGSGKGSRGVYMYRAGRALEDWDSSPPCMADIFRCMGKASRSALCAIARHLRLRSDVFNHLLDDAPLPANEVSSSVLVVTYSHASLQNGRGAIGGSKPTMNGEVEKGLLTLISSDTPGLQVCDPSGRWYLADSGFGPGDLLLITGKALSHATAGLCPAASYRASPDYFLSPNGGGRSSLAYRLMPQGNAILDCSPIAAAGHVIPQSYVRISVSQFMDDLAAEELIGSRCDNADAAAQHNVNKEPSLRSVLSDPLSGTFLEDAMLVSCGHSFGGLMLRRVIETSKCTLCNVEIETGSLIPNHALRAAAAAVKHEDDRRLFRNAALRKRRKEMGDQMDSMRRVNGENGDFTAADGLQRGVQYPFLVNEKVVIKGNRRTPEKFVGKEAVITSQCLNGWYLLKIIETGENVRLQYRSLRKLLNSPADQCPSQPIQNSSS

SEQ ID NO: 7674 - protein, 581 aa, Glycine max
  peptide (1)..(581): Ceres Seq. ID no. 12611728
  misc_feature (37)..(580): NCBI GI NO: 30685540 NR Description: expressed protein [Arabidopsis thaliana]
  misc_feature (37)..(580): NCBI GI NO: 11994201 NR Description: gb|AAF35943
  misc_feature (37)..(485): NCBI GI NO: 20453175 NR Description: At3g19895 [Arabidopsis thaliana]
  misc_feature (392)..(562): NCBI GI NO: 28876015 NR Description: hypothetical protein
  misc_feature (172)..(370): NCBI GI NO: 33146538 NR Description: unknown protein
  misc_feature (82)..(177): NCBI GI NO: 33146538 NR Description: unknown protein
  misc_feature (172)..(370): NCBI GI NO: 33146537 NR Description: unknown protein
  misc_feature (82)..(177): NCBI GI NO: 33146537 NR Description: unknown protein
  misc_feature (172)..(370): NCBI GI NO: 34901828 NR Description: contains EST AU068498
  misc_feature (82)..(177): NCBI GI NO: 34901828 NR Description: contains EST AU068498
MQQQQQHQQQQQNPSALVPPQLKNPQSSTTTTTATTTPLRSPSAQSPLSVVQPIRQPPPPSHPVVPVTTVEPGLTAVPTCPLVRVRLSDIAPYDGAPGGPYLRAMEALCGSLLRHNAALIELGNEDTALMRCGLEGARLFFRSRAHLGSGKGSRGVYMYRAGRALEDWDSSPPCMADIFRCMGKASRSALCAIARHLRLRSDVFNHLLDDAPLPANEVSSSVLVVTYSHASLQNGRGAIGGSKPTMNGEVEKGLLTLISSDTPGLQVCDPSGRWYLADSGFGPGDLLLITGKALSHATAGLCPAASYRASPDYFLSPNGGGRSSLAYRLMPQGNAILDCSPIAAAGHVIPQSYVRISVSQFMDDLAAEELIGSRCDNADAAAQHNVNKEPSLRSVLSDPLSGTFLEDAMLVSCGHSFGGLMLRRVIETSKCTLCNVEIETGSLIPNHALRAAAAAVKHEDDRRLFRNAALRKRRKEMGDQMDSMRRVNGENGDFTAADGLQRGVQYPFLVNEKVVIKGNRRTPEKFVGKEAVITSQCLNGWYLLKIIETGENVRLQYRSLRKLLNSPADQCPSQPIQNSSS

SEQ ID NO: 7675 - protein, 477 aa, Glycine max
  peptide (1)..(477): Ceres Seq. ID no. 12611729
  misc_feature (1)..(476): NCBI GI NO: 30685540 NR Description: expressed protein [Arabidopsis thaliana]
  misc_feature (1)..(476): NCBI GI NO: 11994201 NR Description: gb|AAF35943
  misc_feature (1)..(381): NCBI GI NO: 20453175 NR Description: At3g19895 [Arabidopsis thaliana]
  misc_feature (288)..(458): NCBI GI NO: 28876015 NR Description: hypothetical protein
  misc_feature (68)..(266): NCBI GI NO: 33146538 NR Description: unknown protein
  misc_feature (1)..(73): NCBI GI NO: 33146538 NR Description: unknown protein
  misc_feature (68)..(266): NCBI GI NO: 33146537 NR Description: unknown protein
  misc_feature (1)..(73): NCBI GI NO: 33146537 NR Description: unknown protein
  misc_feature (68)..(266): NCBI GI NO: 34901828 NR Description: contains EST AU068498
  misc_feature (1)..(73): NCBI GI NO: 34901828 NR Description: contains EST AU068498
MEALCGSLLRHNAALIELGNEDTALMRCGLEGARLFFRSRAHLGSGKGSRGVYMYRAGRALEDWDSSPPCMADIFRCMGKASRSALCAIARHLRLRSDVFNHLLDDAPLPANEVSSSVLVVTYSHASLQNGRGAIGGSKPTMNGEVEKGLLTLISSDTPGLQVCDPSGRWYLADSGFGPGDLLLITGKALSHATAGLCPAASYRASPDYFLSPNGGGRSSLAYRLMPQGNAILDCSPIAAAGHVIPQSYVRISVSQFMDDLAAEELIGSRCDNADAAAQHNVNKEPSLRSVLSDPLSGTFLEDAMLVSCGHSFGGLMLRRVIETSKCTLCNVEIETGSLIPNHALRAAAAAVKHEDDRRLFRNAALRKRRKEMGDQMDSMRRVNGENGDFTAADGLQRGVQYPFLVNEKVVIKGNRRTPEKFVGKEAVITSQCLNGWYLLKIIETGENVRLQYRSLRKLLNSPADQCPSQPIQNSSS

SEQ ID NO: 7676 - DNA, 1016 bp, Glycine max
  misc_feature (1)..(1016): Ceres Seq. ID no. 13595561
aatcaaatccatgttctagctctgctgtacagttaaccttaagaaacgatgaatcagtgggcgattcagccaaaggctttcgctgcgggaggagagcagagtgttgtagtttgcccaaaaccccgtcgtattggtctcggtaaccatctccaccatccctcctcccgctctctgcgatgttacttcagccagcaagttgaatccaaggctgagactgatatcttagatatcatactcaccaaggaacaagttaatcactcgcaggtattagactcgccgtccccgtttttatgtgggtcgccgccgagtagagtcgctaacccattaacacaggatgctcgtttcagagatgaaatcaagctggtctcttcttccccgatcacgactccgctgggccaacctccgtcgtccccttcttcctctgggaggaaaggaggatgtgttagaggcaattttggtaacagcccagcggttaggatcgaagggtttgattgccttgacagggacagtagaaactgcagcatccctgccttggcttagaaaccaaaccaacctcgaaaacgcatccactctgttgaattatctcatgaaaaccaatttagtgcgtcgtacatatatgagtttaaggatatggaaatgtgtggaatataatctttgagggaagtgaaagagcatgtgagatcaatcttttggragtttggttgttttgtttttaaagagtgtaaataggtgacggagtaaaaccgattttctgggttaagtttttagtattcgtggtcattttgtaagtataagtatcaagtctaaagatgaatcgttgaggataaggaagaataacatttgaaggtcaggttttcttgtgtaaagagagatcgagatagaaaagtgcattttgggtattttctacttttgtttttgtttctattatgtgttcatgttggttatgaagatgagaaagaagaatttgtacaaaaggaaagaaatttaaatgatgtaaattttacttttgaattccg

SEQ ID NO: 7677 - protein, 163 aa, Glycine max
  peptide (1)..(163): Ceres Seq. ID no. 15221612
  misc_feature (16)..(163): NCBI GI NO: 18409044 NR Description: expressed protein [Arabidopsis thaliana]
  misc_feature (1)..(163): NCBI GI NO: 11762168 NR Description: AT5g16110 [Arabidopsis thaliana]
  misc_feature (1)..(163): NCBI GI NO: 30685676 NR Description: expressed protein [Arabidopsis thaliana]
  misc_feature (1)..(163): NCBI GI NO: 15222278 NR Description: expressed protein [Arabidopsis thaliana]
  misc_feature (20)..(163): NCBI GI NO: 18396232 NR Description: expressed protein [Arabidopsis thaliana]
MNQWAIQPKAFAAGGEQSVVVCPKPRRIGLGNHLHHPSSRSLRCYFSQQVESKAETDILDIILTKEQVNHSQVLDSPSPFLCGSPPSRVANPLTQDARFRDEIKLVSSSPITTPLGQPPSSPSSSGRKGGCVRGNFGNSPAVRIEGFDCLDRDSRNCSIPALA

SEQ ID NO: 7678 - protein, 107 aa, Glycine max
  peptide (1)..(107): Ceres Seq. ID no. 15221613
MLVSEMKSSWSLLPRSRLRWANLRRPLLPLGGKEDVLEAILVTAQRLGSKGLIALTGTVETAASLPWLRNQTNLENASTLLNYLMKTNLVRRTYMSLRIWKCVEYNL

SEQ ID NO: 7679 - protein, 102 aa, Glycine max
  peptide (1)..(102): Ceres Seq. ID no. 15221614
MKSSWSLLPRSRLRWANLRRPLLPLGGKEDVLEAILVTAQRLGSKGLIALTGTVETAASLPWLRNQTNLENASTLLNYLMKTNLVRRTYMSLRIWKCVEYNL

SEQ ID NO: 7680 - DNA, 520 bp, Glycine max
  misc_feature (1)..(520): Ceres Seq. ID no. 12611730
atctcaaaagcattgcccgagagagagaagaatcaaaaacgtagaatcaaatcaattattaagcaatggcatcgatgagcatgacagccacattcgtcccggccgttgcaaaggtcccgtcaaccaccggcggacgaaggctctcagtgatcagagcttcaacgagcgacaacacaaccagcttacaagtcaaggagacacagaacagcaccacgatgaggagggatctcatgttcacagctgcagctgcggcagttttttccttggccaaggcagccatggcagacgaggaggagcccaaacgagggacagatgcagcgaagaagaagtacgctcaagtttgtgtcacaatgccaacagccaagatctgtcgctactgattcaacaatccatctttcatgtctctctccctctatctttctaatatttcggtaaaattttctcaaactttgtttgtaatcatatactaaatcaatttcatattttgctactagattttcgaatataaactaaacttgac

SEQ ID NO: 7681 - protein, 140 aa, Glycine max
  peptide (1)..(140): Ceres Seq. ID no. 12611731
SQKHCPRERRIKNVESNQLLSNGIDEHDSHIRPGRCKGPVNHRRTKALSDQSFNERQHNQLTSQGDTEQHHDEEGSHVHSCSCGSFFLGQGSHGRRGGAQTRDRCSEEEVRSSLCHNANSQDLSLLIQQSIFHVSLPLSF

SEQ ID NO: 7682 - protein, 104 aa, Glycine max
  peptide (1)..(104): Ceres Seq. ID no. 12611732
  misc_feature (1)..(104): NCBI GI NO: 18402859 NR Description: Expressed protein; protein id: At3g21055
  misc_feature (1)..(104): NCBI GI NO: 1465366 NR Description: photosystem II [Arabidopsis thaliana]
  misc_feature (1)..(103): NCBI GI NO: 21537121 NR Description: photosystem II [Arabidopsis thaliana]
  misc_feature (1)..(103): NCBI GI NO: 18403499 NR Description: photosystem II 5 KD protein; protein id:At1g51400
  misc_feature (1)..(104): NCBI GI NO: 2129671 NR Description: photosystem II protein psbT - Arabidopsis thaliana
  misc_feature (1)..(103): NCBI GI NO: 400198 NR Description: Photosystem II 5 kDa protein
MASMSMTATFVPAVAKVPSTTGGRRLSVIRASTSDNTTSLQVKETQNSTTMRRDLMFTAAAAAVFSLAKAAMADEEEPKRGTDAAKKKYAQVCVTMPTAKICRY

SEQ ID NO: 7683 - protein, 101 aa, Glycine max
  peptide (1)..(101): Ceres Seq. ID no. 12611733
  misc_feature (1)..(101): NCBI GI NO: 18402859 NR Description: Expressed protein; protein id: At3g21055
  misc_feature (1)..(101): NCBI GI NO: 1465366 NR Description: photosystem II [Arabidopsis thaliana]
  misc_feature (1)..(100): NCBI GI NO: 21537121 NR Description: photosystem II [Arabidopsis thaliana]
  misc_feature (1)..(100): NCBI GI NO: 18403499 NR Description: photosystem II 5 KD protein; protein id:At1g51400
  misc_feature (1)..(101): NCBI GI NO: 2129671 NR Description: photosystem II protein psbT - Arabidopsis thaliana
  misc_feature (1)..(100): NCBI GI NO: 400198 NR Description: Photosystem II 5 kDa protein
MSMTATFVPAVAKVPSTTGGRRLSVIRASTSDNTTSLQVKETQNSTTMRRDLMFTAAAAAVFSLAKAAMADEEEPKRGTDAAKKKYAQVCVTMPTAKICRY

SEQ ID NO: 7684 - DNA, 793 bp, Glycine max
  misc_feature (1)..(793): Ceres Seq. ID no. 15226360
cttgatcgacatgcactctctctctcccaaaacgccatgagaaaaagacgaaaaagaagccacaagacccacactcgtctctgctgaagaacaaaatactaggagaagaagctgtaccaaaaaggaaatttcgagtacaaaaccccacaccttcatcttcaaatttcagaaaatgtgctacgtggggaaagcaacaaagatcttcatcttcattgtgacggtgctcgttgttctgggtctagttttgggattggggctccttcgccgccgccaccaccacaacactgcaaataaatgctcagacgaatcttgcattccttcaccaaccacatttccaaaccccaatttcaacacaccaaccccaccttctccaattgacaacaaccccactaccccacaaactcctcagcttccaaatccaattcctccacctccttactccaataacccatctttgccgccgccgccgccgattctgcagtctccgccgccgccggaggaaacaacccctccgactcctcctagtgtggcggcgccgcctatgaacactcccacaccagggtcggcgctgttgaccccaggtcctgtgcatgctatggcctaatgagctatctatctgagtggttcttcttttttactttctttcatatttttactgatggggttatttaatttgtgaatgttttaattgatgagagagagagagagtattgagataattagagcatttgtaaggtgggatagtgaatttacagagccgtccctggcatctatattgattttcaaggatgac

SEQ ID NO: 7685 - protein, 143 aa, Glycine max
  peptide (1)..(143): Ceres Seq. ID no. 15226361
  misc_feature (49)..(129): Pfam Name: Pfam Description:  Extensin-like region
  misc_feature (1)..(141): NCBI GI NO: 26450091 NR Description: unknown protein [Arabidopsis thaliana]
  misc_feature (1)..(136): NCBI GI NO: 21592647 NR Description: unknown [Arabidopsis thaliana]
  misc_feature (1)..(141): NCBI GI NO: 18403249 NR Description: proline-rich protein family [Arabidopsis thaliana]
  misc_feature (1)..(129): NCBI GI NO: 33354213 NR Description: extensin-like protein
  misc_feature (49)..(141): NCBI GI NO: 21592647 NR Description: unknown [Arabidopsis thaliana]
  misc_feature (10)..(138): NCBI GI NO: 15320736 NR Description: unknown
  misc_feature (49)..(138): NCBI GI NO: 81286 NR Description: extensin - Volvox carteri (fragment)
  misc_feature (11)..(138): NCBI GI NO: 23577891 NR Description: unknown
  misc_feature (13)..(138): NCBI GI NO: 30387315 NR Description: unknown [Choristoneura fumiferana MNPV]
  misc_feature (48)..(138): NCBI GI NO: 30685319 NR Description: late embryogenesis abundant protein -related
MCYVGKATKIFIFIVTVLVVLGLVLGLGLLRRRHHHNTANKCSDESCIPSPTTFPNPNFNTPTPPSPIDNNPTTPQTPQLPNPIPPPPYSNNPSLPPPPPILQSPPPPEETTPPTPPSVAAPPMNTPTPGSALLTPGPVHAMA

SEQ ID NO: 7686 - DNA, 1666 bp, Glycine max
  misc_feature (1)..(1666): Ceres Seq. ID no. 13595562
catcaaggatattagagtgtgaaaaaggtgaagaacaaaccaaatctttatcatagtcataaatggtaggataggaatgtacatggaaactaggaaaagattgagtaaatatcaaatgtaatataccctttttagtgtgaggcttgaagcccaaaaaaatggaagcagaggctctaagatcaagttttttttttgttattagtgagagtgttgatgtagcataagcaaccaaagactttcaaagaagaaatgtcatatgcagtaccatataatttttcaaaaggagacttattattaagaaatggagttggcaaacaattgatgagtaaaacagcatgttgtaaagcaaaagaccaaaagattggtggtaacttggactgaaaaagaagggctcgagtaacatttaataaatgttgatgctttctttccacaattccattttgttgtagggtttcaacacaggaagtctggtgtatgataccagtattatgataaaactatttcataataaattctggaccattgtctgatcggatagctttcacttttgtattgaattgcctctcaacataggaaacaaaggcttgtaaatgagtttgagtctcagcttttgaagtcattataaaaatccaaacaaatctagtatgatcatccacaattctcgtgcaaaaataatgctagaaaaggttgcaaggtgaaggggtaggtgctcaaaaggggactctgtctgggaaggaagatcttagtggcttctttcgtagcttctgctgccccggttgttgttccacctcttgttgttgcttctgctattggcatggctctttctatgccttgtgttattttcttggctagccatgtttgcactctgagtttaatgagtaagttgctccctaggcctactcctcaggatactttgttgcatgaagagatgtgttttcggccaggtaatgatgttattcacacatataaagaggttgctccctaggcctattacattgcccaatgagaagttagataataacaattttgactttgaaaatcaagaatcacagttgcatgaattaaatgaagggatgtacccgttagatgcagaagctagagaaattgctaatgaaagtgcacttgatttgtttgatggaaaccaaatagaccatgacgagtatgcatacacaattgatttaaatgaaggctcttcaaatgttgtaaggcatacaaattctatgcaggttcttgtttcgtctgttgaaaaagagtcaaggccatctaaatgttcctctgcagaaaaccatgtttgcccttctcaagagctattgcaggttgtattgggtgaagagaacatatggaaaaagatgaatatgatacggaagatagtaggatatgaaggtagaatgcaagcatcatgttcagatgaattaaaagctctctacatgttcactggagttgagcccccaacttgttctctcgctgaaatcaaggagaagctcccwctccttatgtccatccttggaattaaatmgaatgatgctyagacakgtcacacatctttgtactgttttttacatatttccgttaacatgtaatgwgtgttctttttattctccgyggayttccctgggcgatatggagacccaagaaaaggaaaggaaaattattcaamactttcttc

SEQ ID NO: 7687 - protein, 219 aa, Glycine max
  peptide (1)..(219): Ceres Seq. ID no. 15221615
  misc_feature (42)..(197): NCBI GI NO: 15220925 NR Description: hypothetical protein [Arabidopsis thaliana]
  misc_feature (134)..(180): NCBI GI NO: 4646194 NR Description: T23K8.1 [Arabidopsis thaliana]
  misc_feature (134)..(197): NCBI GI NO: 25404523 NR Description: hypothetical protein F16G16.9
  misc_feature (189)..(189): Xaa is any aa, unknown or other
  misc_feature (199)..(199): Xaa is any aa, unknown or other
  misc_feature (203)..(203): Xaa is any aa, unknown or other
  misc_feature (205)..(205): Xaa is any aa, unknown or other
MKRCVFGQVMMLFTHIKRLLPRPITLPNEKLDNNNFDFENQESQLHELNEGMYPLDAEAREIANESALDLFDGNQIDHDEYAYTIDLNEGSSNVVRHTNSMQVLVSSVEKESRPSKCSSAENHVCPSQELLQVVLGEENIWKKMNMIRKIVGYEGRMQASCSDELKALYMFTGVEPPTCSLAEIKEKLXLLMSILGIKXNDAXTXHTSLYCFLHISVNM

SEQ ID NO: 7688 - protein, 210 aa, Glycine max
  peptide (1)..(210): Ceres Seq. ID no. 15221616
  misc_feature (33)..(188): NCBI GI NO: 15220925 NR Description: hypothetical protein [Arabidopsis thaliana]
  misc_feature (125)..(171): NCBI GI NO: 4646194 NR Description: T23K8.1 [Arabidopsis thaliana]
  misc_feature (125)..(188): NCBI GI NO: 25404523 NR Description: hypothetical protein F16G16.9
  misc_feature (180)..(180): Xaa is any aa, unknown or other
  misc_feature (190)..(190): Xaa is any aa, unknown or other
  misc_feature (194)..(194): Xaa is any aa, unknown or other
  misc_feature (196)..(196): Xaa is any aa, unknown or other
MMLFTHIKRLLPRPITLPNEKLDNNNFDFENQESQLHELNEGMYPLDAEAREIANESALDLFDGNQIDHDEYAYTIDLNEGSSNVVRHTNSMQVLVSSVEKESRPSKCSSAENHVCPSQELLQVVLGEENIWKKMNMIRKIVGYEGRMQASCSDELKALYMFTGVEPPTCSLAEIKEKLXLLMSILGIKXNDAXTXHTSLYCFLHISVNM

SEQ ID NO: 7689 - protein, 209 aa, Glycine max
  peptide (1)..(209): Ceres Seq. ID no. 15221617
  misc_feature (32)..(187): NCBI GI NO: 15220925 NR Description: hypothetical protein [Arabidopsis thaliana]
  misc_feature (124)..(170): NCBI GI NO: 4646194 NR Description: T23K8.1 [Arabidopsis thaliana]
  misc_feature (124)..(187): NCBI GI NO: 25404523 NR Description: hypothetical protein F16G16.9
  misc_feature (179)..(179): Xaa is any aa, unknown or other
  misc_feature (189)..(189): Xaa is any aa, unknown or other
  misc_feature (193)..(193): Xaa is any aa, unknown or other
  misc_feature (195)..(195): Xaa is any aa, unknown or other
MLFTHIKRLLPRPITLPNEKLDNNNFDFENQESQLHELNEGMYPLDAEAREIANESALDLFDGNQIDHDEYAYTIDLNEGSSNVVRHTNSMQVLVSSVEKESRPSKCSSAENHVCPSQELLQVVLGEENIWKKMNMIRKIVGYEGRMQASCSDELKALYMFTGVEPPTCSLAEIKEKLXLLMSILGIKXNDAXTXHTSLYCFLHISVNM

SEQ ID NO: 7690 - DNA, 1242 bp, Glycine max
  misc_feature (1)..(1242): Ceres Seq. ID no. 13595660
aagaatgaatgaaaggcattagaaatcagtgaccggcgtgagagagcaaagatggtggttcttggcaccacctcaccttcaatttcctgcttgccgtcttcaactcaaaccgactacaaggcgcgtcgatactgttcttttccgcaacgcccacgcccacgcccacgcgcttcacgtttcttttgcggattccctttcgctccaaatgccatccattctccttctctgtctgtgacgaatgaagcactgaatgttatgatttctggggctcctgcttctggtaaaggaacccagtgccacctcatcaccaacaagtacggtttggttcatattgctgctggagatttacttagggcagaaattgccactggaagtgataatggaaagcgagccaaacagtatatggagaagggacagttggtccctgacgaaattgttgtgatgatggttaaggagcgtctcttgaaaccagattcgaaagagaatggttggcttttggatggatatcccatgagcttatcacaggccactgcacttgaggctcttggctttcggcctcatatttttcttcttcttgaggtttctgaagatgttcttgtggagagagtagttggacggagattagatcctgttaccggcaagatatatcacttgaagtattctcctccagagacacaagaaatagccgcaaggcttacccaacgctttgatgatacagaagaaaaggtgaaattgcgattgaatacccatcatcaaaatgtggagtcagtcctttccatgtacaaagacataactgttaagattaacggaaatgtctcaaaggaggaagtatttgctcaaattgatagtgcactgacaagtcttatagaggaaaggaaggctgcttcaggatctgtggcagcatagaagacccatcttttgacattttgatctagcatggtgcgttgctggtggtagtggattttaaatgatttatttatagagttaaacaaaagagtcttcactcaaactaagctgcattttctcgtgaagattgtctcacggcttatatcctcccatttggaaagcaatgtgatgattggcttggaccatgcatgaggacctgtgatagtgtagtgcgcagtatattttacaaatttattttttatgagaaaatgattaccttaaattaaaatcgtttttatgtaatgactagcttgtaaatgcaggattttgtgaattatcgtttgttggtttcctgtt

SEQ ID NO: 7691 - protein, 284 aa, Glycine max
  peptide (1)..(284): Ceres Seq. ID no. 13595661
  misc_feature (70)..(249): Pfam Name: Pfam Description:  Adenylate kinase
  misc_feature (63)..(282): NCBI GI NO: 15238822 NR Description: expressed protein [Arabidopsis thaliana]
  misc_feature (64)..(275): NCBI GI NO: 1170606 NR Description: ADENYLATE KINASE, CHLOROPLAST
  misc_feature (1)..(271): NCBI GI NO: 22327339 NR Description: adenylate kinase -related protein
  misc_feature (69)..(254): NCBI GI NO: 10176815 NR Description: adenylate kinase-like [Arabidopsis thaliana]
  misc_feature (68)..(276): NCBI GI NO: 37727511 NR Description: adenylate kinase [Trypanosoma cruzi]
  misc_feature (68)..(278): NCBI GI NO: 7687936 NR Description: possible adenylate kinase [Leishmania major]
  misc_feature (118)..(273): NCBI GI NO: 38175634 NR Description: putative Adenylate kinase, chloroplast
  misc_feature (49)..(268): NCBI GI NO: 1773156 NR Description: adenylate kinase [Escherichia coli]
  misc_feature (49)..(268): NCBI GI NO: 26246489 NR Description: Adenylate kinase [Escherichia coli CFT073]
  misc_feature (65)..(268): NCBI GI NO: 24111857 NR Description: adenylate kinase [Shigella flexneri 2a str. 301]
MVVLGTTSPSISCLPSSTQTDYKARRYCSFPQRPRPRPRASRFFCGFPFAPNAIHSPSLSVTNEALNVMISGAPASGKGTQCHLITNKYGLVHIAAGDLLRAEIATGSDNGKRAKQYMEKGQLVPDEIVVMMVKERLLKPDSKENGWLLDGYPMSLSQATALEALGFRPHIFLLLEVSEDVLVERVVGRRLDPVTGKIYHLKYSPPETQEIAARLTQRFDDTEEKVKLRLNTHHQNVESVLSMYKDITVKINGNVSKEEVFAQIDSALTSLIEERKAASGSVAA

SEQ ID NO: 7692 - protein, 216 aa, Glycine max
  peptide (1)..(216): Ceres Seq. ID no. 13595662
  misc_feature (2)..(181): Pfam Name: Pfam Description:  Adenylate kinase
  misc_feature (1)..(214): NCBI GI NO: 15238822 NR Description: expressed protein [Arabidopsis thaliana]
  misc_feature (1)..(207): NCBI GI NO: 1170606 NR Description: ADENYLATE KINASE, CHLOROPLAST
  misc_feature (1)..(203): NCBI GI NO: 22327339 NR Description: adenylate kinase -related protein
  misc_feature (1)..(186): NCBI GI NO: 10176815 NR Description: adenylate kinase-like [Arabidopsis thaliana]
  misc_feature (1)..(208): NCBI GI NO: 37727511 NR Description: adenylate kinase [Trypanosoma cruzi]
  misc_feature (1)..(210): NCBI GI NO: 7687936 NR Description: possible adenylate kinase [Leishmania major]
  misc_feature (50)..(205): NCBI GI NO: 38175634 NR Description: putative Adenylate kinase, chloroplast
  misc_feature (1)..(200): NCBI GI NO: 1773156 NR Description: adenylate kinase [Escherichia coli]
  misc_feature (1)..(200): NCBI GI NO: 26246489 NR Description: Adenylate kinase [Escherichia coli CFT073]
  misc_feature (1)..(200): NCBI GI NO: 24111857 NR Description: adenylate kinase [Shigella flexneri 2a str. 301]
MISGAPASGKGTQCHLITNKYGLVHIAAGDLLRAEIATGSDNGKRAKQYMEKGQLVPDEIVVMMVKERLLKPDSKENGWLLDGYPMSLSQATALEALGFRPHIFLLLEVSEDVLVERVVGRRLDPVTGKIYHLKYSPPETQEIAARLTQRFDDTEEKVKLRLNTHHQNVESVLSMYKDITVKINGNVSKEEVFAQIDSALTSLIEERKAASGSVAA

SEQ ID NO: 7693 - protein, 167 aa, Glycine max
  peptide (1)..(167): Ceres Seq. ID no. 13595663
  misc_feature (1)..(132): Pfam Name: Pfam Description:  Adenylate kinase
  misc_feature (1)..(165): NCBI GI NO: 15238822 NR Description: expressed protein [Arabidopsis thaliana]
  misc_feature (1)..(158): NCBI GI NO: 1170606 NR Description: ADENYLATE KINASE, CHLOROPLAST
  misc_feature (1)..(154): NCBI GI NO: 22327339 NR Description: adenylate kinase -related protein
  misc_feature (1)..(137): NCBI GI NO: 10176815 NR Description: adenylate kinase-like [Arabidopsis thaliana]
  misc_feature (1)..(159): NCBI GI NO: 37727511 NR Description: adenylate kinase [Trypanosoma cruzi]
  misc_feature (1)..(161): NCBI GI NO: 7687936 NR Description: possible adenylate kinase [Leishmania major]
  misc_feature (1)..(156): NCBI GI NO: 38175634 NR Description: putative Adenylate kinase, chloroplast
  misc_feature (1)..(151): NCBI GI NO: 1773156 NR Description: adenylate kinase [Escherichia coli]
  misc_feature (1)..(151): NCBI GI NO: 26246489 NR Description: Adenylate kinase [Escherichia coli CFT073]
  misc_feature (1)..(151): NCBI GI NO: 24111857 NR Description: adenylate kinase [Shigella flexneri 2a str. 301]
MEKGQLVPDEIVVMMVKERLLKPDSKENGWLLDGYPMSLSQATALEALGFRPHIFLLLEVSEDVLVERVVGRRLDPVTGKIYHLKYSPPETQEIAARLTQRFDDTEEKVKLRLNTHHQNVESVLSMYKDITVKINGNVSKEEVFAQIDSALTSLIEERKAASGSVAA

SEQ ID NO: 7694 - DNA, 740 bp, Glycine max
  misc_feature (1)..(740): Ceres Seq. ID no. 12611816
catttgttcttctttggctgggcggcaatggcggaggagcaaaagacgactaaggttgacgtagaatctccggcggtttcagctccggagaaggaaccagctcctgctccggtggaagcttctacagaggttgcggaggagaaagttcatgatccaccacctcccgtcgagtccaaagctcttgccgttgttgaaaaacccattgaggagcctacaccaaagaaaagttcatctggttcgatcgacagagatgtgaaacttgcagacttggaaaaagagaagaaaacatcattcatcaaagcatgggaagagagtgagaagtcaaaggcagagaacaaggcacaaaagaaggtatctgatgtgctcgcttgggagaacagccagaaagcagccgttgaagcccagctcaggaagattgaagaaaaattagagaagaaaaaggcagagtacggtgagaaaatgaagaacaaagtggctgcgattcacaaggaagcagaagagaagagagcaatggttgaagctaaaagaggagaggagcttcttaaagctgaagaaatggctgccaagtacagagccactggtatagtacccaaggcaacttgtggatgtttctaagctgttctcagctcattgtatttatccatctctcttttttgtgtgattcggttactttttctttgtttgttgtcatgtttatatattggtgactttgtgtttaaaagaagatcagtttcacttcg

SEQ ID NO: 7695 - protein, 204 aa, Glycine max
  peptide (1)..(204): Ceres Seq. ID no. 12611817
  misc_feature (92)..(201): Pfam Name: Pfam Description:  Remorin, C-terminal region
  misc_feature (10)..(204): NCBI GI NO: 15225899 NR Description: remorin; protein id: At2g45820
  misc_feature (10)..(204): NCBI GI NO: 601843 NR Description: DNA-binding protein
  misc_feature (16)..(204): NCBI GI NO: 15233068 NR Description: putative DNA-binding protein; protein id:At3g61260
  misc_feature (10)..(204): NCBI GI NO: 32489830 NR Description: OSJNBb0039L24.13
  misc_feature (13)..(204): NCBI GI NO: 34925093 NR Description: Remorin (pp34)
  misc_feature (13)..(204): NCBI GI NO: 4731573 NR Description: remorin 1 [Lycopersicon esculentum]
  misc_feature (10)..(203): NCBI GI NO: 15237822 NR Description: putative protein; protein id: At5g23750
  misc_feature (10)..(203): NCBI GI NO: 21555669 NR Description: remorin [Arabidopsis thaliana]
  misc_feature (39)..(203): NCBI GI NO: 4883530 NR Description: remorin 2 [Lycopersicon esculentum]
  misc_feature (46)..(204): NCBI GI NO: 15229057 NR Description: remorin -like protein; protein id: At3g48940.1
HLFFFGWAAMAEEQKTTKVDVESPAVSAPEKEPAPAPVEASTEVAEEKVHDPPPPVESKALAVVEKPIEEPTPKKSSSGSIDRDVKLADLEKEKKTSFIKAWEESEKSKAENKAQKKVSDVLAWENSQKAAVEAQLRKIEEKLEKKKAEYGEKMKNKVAAIHKEAEEKRAMVEAKRGEELLKAEEMAAKYRATGIVPKATCGCF

SEQ ID NO: 7696 - protein, 195 aa, Glycine max
  peptide (1)..(195): Ceres Seq. ID no. 12611818
  misc_feature (83)..(192): Pfam Name: Pfam Description:  Remorin, C-terminal region
  misc_feature (1)..(195): NCBI GI NO: 15225899 NR Description: remorin; protein id: At2g45820
  misc_feature (1)..(195): NCBI GI NO: 601843 NR Description: DNA-binding protein
  misc_feature (7)..(195): NCBI GI NO: 15233068 NR Description: putative DNA-binding protein; protein id:At3g61260
  misc_feature (1)..(195): NCBI GI NO: 32489830 NR Description: OSJNBb0039L24.13
  misc_feature (4)..(195): NCBI GI NO: 34925093 NR Description: Remorin (pp34)
  misc_feature (4)..(195): NCBI GI NO: 4731573 NR Description: remorin 1 [Lycopersicon esculentum]
  misc_feature (1)..(194): NCBI GI NO: 15237822 NR Description: putative protein; protein id: At5g23750
  misc_feature (1)..(194): NCBI GI NO: 21555669 NR Description: remorin [Arabidopsis thaliana]
  misc_feature (30)..(194): NCBI GI NO: 4883530 NR Description: remorin 2 [Lycopersicon esculentum]
  misc_feature (37)..(195): NCBI GI NO: 15229057 NR Description: remorin -like protein; protein id: At3g48940.1
MAEEQKTTKVDVESPAVSAPEKEPAPAPVEASTEVAEEKVHDPPPPVESKALAVVEKPIEEPTPKKSSSGSIDRDVKLADLEKEKKTSFIKAWEESEKSKAENKAQKKVSDVLAWENSQKAAVEAQLRKIEEKLEKKKAEYGEKMKNKVAAIHKEAEEKRAMVEAKRGEELLKAEEMAAKYRATGIVPKATCGCF

SEQ ID NO: 7697 - DNA, 1945 bp, Glycine max
  misc_feature (1)..(1945): Ceres Seq. ID no. 13595833
atattttcgtttttgccgagatagggttttcggttttcttcactgctctctcaccaggggcgagttgtgaatggaagcacaaggcataaagtataaagcataaagcatagttagttgagtcaatggaaggtgttgatcaaagaaatagttctgcatttggtgttccagttccaagaccaccaaaccagaaatctcgtatgccaccatctcaccctagtatcaatgtttcaccttcagcaactccttattcccaataccctcagcgattgcgttctccgggttcctcccattcgaggtctttgtctcaacctcccattttctcgttggattcattgcccccattgagtccttcccctgctgctgttacctccatgtttgactcaatctcaacaactgatatgtctgtggaggaaagtaatgtttcctctcaggtgcccctcaatagagggcatgcccttcttcctcctaggaagggacacaggcgctctagtagtgattcccctttgggaatctctggttttatgcagtcttctccagttccctccggaggagagagctcggggttcgagaagccgattcagttggtcttgaaggcgtcctttagggacagcctggatgggggccatgctaatgagcctgttaatgggaggaaggaggaggctgcggatgatttgttcagggaatacatgaatttggacaactttgataatctgaactttcctggcatggaagataaggacttggatagcaggaccagtggttccaagacagttgagagcagcgataatgaagttgagagtcatgtcaatgggaaggcgagtggggctcagggggcaagttcaagctgctcggaggaaaggagggaaggagtcaagaggagttcaaatggggaggttgcaccgggttcccggcatcggaggagtttttcgttggatagttccatagggaactttaacattgaagatggattgcctaagcttcctccttcgaaaaatcaaatgggtcagcactcacctagcaattcgatggacggcaaaatgtcagaaacctccacggagtttggaaatggcgaatttagtgcagaggaggtaaagaaaataatggaaagtgataaactagctgaaattgcttcgactgatcccaaacgtgcaaaaaggattttggctaatcgtcaatcagctgctcgttcaaaggagaggaagatgcgatacattgctgaattggaacacaaagtgcaaactcttcagacagaaacaaccacattgtctactcagtttaccaaattacagagggataactctgaccttaaaagtgagaacaacgagtgcaaattaaggcttcaagccatggaacaacagtctctattgaaagatgctctgaacgagactttggatgctgaagtccggcgtttgaggcgtgctgttgcagaacttggcggtgaatccctcacaagttgcatggctcgacagcttgctattaaccaacaaatgttcgagttacagcatcagcagcccagccaacagagacattttctactgcaaaatcaccatactcaggaagagatagagtctcgatcacagcagattcaaggcaatgaattgcatccccaggcacagattcagtcacagcagattcaacgcaatgaattgcatccccagccttaaattgcagagaaatatgttgcctattaatggtgccaaatagtggaagcaaaatacttttggacgtggagctggtgaggtataagtataatctcaatcgtacataagcagtgatctagcattagtttgcttgaagtttcataagatcggttcatcatctttatttaatttattattttgactgttttacctgcatacaaactcggactatcctattcatgtagtaaaccttattgtcatgaatacaacccacctttctctattgagaggggtcatgttgttgc

SEQ ID NO: 7698 - protein, 513 aa, Glycine max
  peptide (1)..(513): Ceres Seq. ID no. 13595834
  misc_feature (339)..(401): Pfam Name: Pfam Description:  bZIP transcription factor
  misc_feature (55)..(468): NCBI GI NO: 1076603 NR Description: vsf-1 protein - tomato
  misc_feature (55)..(468): NCBI GI NO: 1838976 NR Description: vsf-1 [Lycopersicon esculentum]
  misc_feature (55)..(468): NCBI GI NO: 3425907 NR Description: transcription factor VSF-1
  misc_feature (19)..(478): NCBI GI NO: 30692108 NR Description: bZIP protein [Arabidopsis thaliana]
  misc_feature (19)..(478): NCBI GI NO: 19423874 NR Description: unknown protein [Arabidopsis thaliana]
  misc_feature (37)..(480): NCBI GI NO: 15226487 NR Description: bZIP family transcription factor
  misc_feature (14)..(478): NCBI GI NO: 15234865 NR Description: bZIP protein [Arabidopsis thaliana]
  misc_feature (167)..(473): NCBI GI NO: 34902256 NR Description: Putative bZIP transcription factor
  misc_feature (258)..(413): NCBI GI NO: 4586586 NR Description: bZIP DNA binding protein [Cicer arietinum]
  misc_feature (299)..(467): NCBI GI NO: 37536376 NR Description: putative transcription factor
MEGVDQRNSSAFGVPVPRPPNQKSRMPPSHPSINVSPSATPYSQYPQRLRSPGSSHSRSLSQPPIFSLDSLPPLSPSPAAVTSMFDSISTTDMSVEESNVSSQVPLNRGHALLPPRKGHRRSSSDSPLGISGFMQSSPVPSGGESSGFEKPIQLVLKASFRDSLDGGHANEPVNGRKEEAADDLFREYMNLDNFDNLNFPGMEDKDLDSRTSGSKTVESSDNEVESHVNGKASGAQGASSSCSEERREGVKRSSNGEVAPGSRHRRSFSLDSSIGNFNIEDGLPKLPPSKNQMGQHSPSNSMDGKMSETSTEFGNGEFSAEEVKKIMESDKLAEIASTDPKRAKRILANRQSAARSKERKMRYIAELEHKVQTLQTETTTLSTQFTKLQRDNSDLKSENNECKLRLQAMEQQSLLKDALNETLDAEVRRLRRAVAELGGESLTSCMARQLAINQQMFELQHQQPSQQRHFLLQNHHTQEEIESRSQQIQGNELHPQAQIQSQQIQRNELHPQP

SEQ ID NO: 7699 - protein, 488 aa, Glycine max
  peptide (1)..(488): Ceres Seq. ID no. 13595835
  misc_feature (314)..(376): Pfam Name: Pfam Description:  bZIP transcription factor
  misc_feature (30)..(443): NCBI GI NO: 1076603 NR Description: vsf-1 protein - tomato
  misc_feature (30)..(443): NCBI GI NO: 1838976 NR Description: vsf-1 [Lycopersicon esculentum]
  misc_feature (30)..(443): NCBI GI NO: 3425907 NR Description: transcription factor VSF-1
  misc_feature (1)..(453): NCBI GI NO: 30692108 NR Description: bZIP protein [Arabidopsis thaliana]
  misc_feature (1)..(453): NCBI GI NO: 19423874 NR Description: unknown protein [Arabidopsis thaliana]
  misc_feature (12)..(455): NCBI GI NO: 15226487 NR Description: bZIP family transcription factor
  misc_feature (1)..(453): NCBI GI NO: 15234865 NR Description: bZIP protein [Arabidopsis thaliana]
  misc_feature (142)..(448): NCBI GI NO: 34902256 NR Description: Putative bZIP transcription factor
  misc_feature (233)..(388): NCBI GI NO: 4586586 NR Description: bZIP DNA binding protein [Cicer arietinum]
  misc_feature (274)..(442): NCBI GI NO: 37536376 NR Description: putative transcription factor
MPPSHPSINVSPSATPYSQYPQRLRSPGSSHSRSLSQPPIFSLDSLPPLSPSPAAVTSMFDSISTTDMSVEESNVSSQVPLNRGHALLPPRKGHRRSSSDSPLGISGFMQSSPVPSGGESSGFEKPIQLVLKASFRDSLDGGHANEPVNGRKEEAADDLFREYMNLDNFDNLNFPGMEDKDLDSRTSGSKTVESSDNEVESHVNGKASGAQGASSSCSEERREGVKRSSNGEVAPGSRHRRSFSLDSSIGNFNIEDGLPKLPPSKNQMGQHSPSNSMDGKMSETSTEFGNGEFSAEEVKKIMESDKLAEIASTDPKRAKRILANRQSAARSKERKMRYIAELEHKVQTLQTETTTLSTQFTKLQRDNSDLKSENNECKLRLQAMEQQSLLKDALNETLDAEVRRLRRAVAELGGESLTSCMARQLAINQQMFELQHQQPSQQRHFLLQNHHTQEEIESRSQQIQGNELHPQAQIQSQQIQRNELHPQP

SEQ ID NO: 7700 - protein, 430 aa, Glycine max
  peptide (1)..(430): Ceres Seq. ID no. 13595836
  misc_feature (256)..(318): Pfam Name: Pfam Description:  bZIP transcription factor
  misc_feature (1)..(385): NCBI GI NO: 1076603 NR Description: vsf-1 protein - tomato
  misc_feature (1)..(385): NCBI GI NO: 1838976 NR Description: vsf-1 [Lycopersicon esculentum]
  misc_feature (1)..(385): NCBI GI NO: 3425907 NR Description: transcription factor VSF-1
  misc_feature (1)..(395): NCBI GI NO: 30692108 NR Description: bZIP protein [Arabidopsis thaliana]
  misc_feature (1)..(395): NCBI GI NO: 19423874 NR Description: unknown protein [Arabidopsis thaliana]
  misc_feature (1)..(397): NCBI GI NO: 15226487 NR Description: bZIP family transcription factor
  misc_feature (1)..(395): NCBI GI NO: 15234865 NR Description: bZIP protein [Arabidopsis thaliana]
  misc_feature (84)..(390): NCBI GI NO: 34902256 NR Description: Putative bZIP transcription factor
  misc_feature (175)..(330): NCBI GI NO: 4586586 NR Description: bZIP DNA binding protein [Cicer arietinum]
  misc_feature (216)..(384): NCBI GI NO: 37536376 NR Description: putative transcription factor
MFDSISTTDMSVEESNVSSQVPLNRGHALLPPRKGHRRSSSDSPLGISGFMQSSPVPSGGESSGFEKPIQLVLKASFRDSLDGGHANEPVNGRKEEAADDLFREYMNLDNFDNLNFPGMEDKDLDSRTSGSKTVESSDNEVESHVNGKASGAQGASSSCSEERREGVKRSSNGEVAPGSRHRRSFSLDSSIGNFNIEDGLPKLPPSKNQMGQHSPSNSMDGKMSETSTEFGNGEFSAEEVKKIMESDKLAEIASTDPKRAKRILANRQSAARSKERKMRYIAELEHKVQTLQTETTTLSTQFTKLQRDNSDLKSENNECKLRLQAMEQQSLLKDALNETLDAEVRRLRRAVAELGGESLTSCMARQLAINQQMFELQHQQPSQQRHFLLQNHHTQEEIESRSQQIQGNELHPQAQIQSQQIQRNELHPQP

SEQ ID NO: 7701 - DNA, 1250 bp, Glycine max
  misc_feature (1)..(1250): Ceres Seq. ID no. 13595652
attgttattattattattagcagaactcaatgggtgtttgttggtttcattggtgggagtggaagctccaatccaatggcaatttttgtctgtgactgtgatgcacagtgaaataatcaaccctattcatcaatctccagtgttgcactgccatcaatgtccaccaccatttcttcccttcccttctctctcccccttcgccaaaactctagggttacccttttcaatccaccctcttctcctaatccatcccaatcatcagtcacctttcctaaaaaaaaatggagacttttgtggtttaggcatggaaacacttcatcaaaaactgatggttctgagctcaatgaagataaattgtcagaagatttggtgaagctcgaaggtgtccagtccaaagacctgaagaaagactggcttgcaaccatccttacgcactccctaaactactggcttcgaggcaccagcaacctcctaaggagaagaagacacagagaagaagaggtcataactgtcattcgtggtgtggaaccctggacagttccttggacagcaaagaccattgttcaggtaatgctcctgtggattgcctcattttggtttgtaggatcttggatagttccatttttagcatacacagcagggtttagaaaggaatctcttacatacagagggcaagcattgtgcagcctcttgactgatgttgctgaaggcgtggttggaatagcaattcttcgccattgtcttgcaaagtttcaacctctttcatctgattggttcaaatttgaagtcaaggggaagtggcagtttgatgttggtttaggctgcctcatgttcccccttatcaatcagctatcacaaatgaacctaaatttgctgcctgttcttcaatatactccagttaccatctcaagtgtagagcaatccattgttgcgcgagaccctgtggcaatggccctctatgcagtggtagtctcggtttgtgccccaatatgggaggagattgttttccgtggtttccttcttccatctttaaccaagtacatgcctgtatggagtgcaatattagttagctcaatagcttttgccttggcacattttaacattcagagaatgctaccacttgtatttcttggcatggtgatgggtactgtctttgtacggtctaggaacctctttccatcaatgttgttgcatagtttgtggaatgcttttgtatttctggatctcatgaaataaattaaaagtttttg

SEQ ID NO: 7702 - protein, 359 aa, Glycine max
  peptide (1)..(359): Ceres Seq. ID no. 13595653
  misc_feature (267)..(357): Pfam Name: Pfam Description:  CAAX amino terminal protease family
  misc_feature (126)..(359): NCBI GI NO: 9759339 NR Description: gene_id:MUP24
  misc_feature (126)..(359): NCBI GI NO: 18424393 NR Description: CAAX amino terminal protease family
  misc_feature (125)..(357): NCBI GI NO: 23130090 NR Description: hypothetical protein [Nostoc punctiforme]
  misc_feature (105)..(357): NCBI GI NO: 17231277 NR Description: hypothetical protein [Nostoc sp. PCC 7120]
  misc_feature (114)..(357): NCBI GI NO: 16331018 NR Description: unknown protein [Synechocystis sp. PCC 6803]
  misc_feature (260)..(357): NCBI GI NO: 23043203 NR Description: hypothetical protein
  misc_feature (126)..(357): NCBI GI NO: 37522744 NR Description: hypothetical protein gll3175
  misc_feature (108)..(358): NCBI GI NO: 22299433 NR Description: ORF_ID:tlr1890~hypothetical protein
  misc_feature (123)..(355): NCBI GI NO: 21593106 NR Description: unknown [Arabidopsis thaliana]
  misc_feature (121)..(358): NCBI GI NO: 33863519 NR Description: Possible membrane associated protease
MSTTISSLPFSLPLRQNSRVTLFNPPSSPNPSQSSVTFPKKKWRLLWFRHGNTSSKTDGSELNEDKLSEDLVKLEGVQSKDLKKDWLATILTHSLNYWLRGTSNLLRRRRHREEEVITVIRGVEPWTVPWTAKTIVQVMLLWIASFWFVGSWIVPFLAYTAGFRKESLTYRGQALCSLLTDVAEGVVGIAILRHCLAKFQPLSSDWFKFEVKGKWQFDVGLGCLMFPLINQLSQMNLNLLPVLQYTPVTISSVEQSIVARDPVAMALYAVVVSVCAPIWEEIVFRGFLLPSLTKYMPVWSAILVSSIAFALAHFNIQRMLPLVFLGMVMGTVFVRSRNLFPSMLLHSLWNAFVFLDLMK

SEQ ID NO: 7703 - protein, 221 aa, Glycine max
  peptide (1)..(221): Ceres Seq. ID no. 13595654
  misc_feature (129)..(219): Pfam Name: Pfam Description:  CAAX amino terminal protease family
  misc_feature (1)..(221): NCBI GI NO: 9759339 NR Description: gene_id:MUP24
  misc_feature (1)..(221): NCBI GI NO: 18424393 NR Description: CAAX amino terminal protease family
  misc_feature (1)..(219): NCBI GI NO: 23130090 NR Description: hypothetical protein [Nostoc punctiforme]
  misc_feature (1)..(219): NCBI GI NO: 17231277 NR Description: hypothetical protein [Nostoc sp. PCC 7120]
  misc_feature (1)..(219): NCBI GI NO: 16331018 NR Description: unknown protein [Synechocystis sp. PCC 6803]
  misc_feature (122)..(219): NCBI GI NO: 23043203 NR Description: hypothetical protein
  misc_feature (1)..(219): NCBI GI NO: 37522744 NR Description: hypothetical protein gll3175
  misc_feature (1)..(220): NCBI GI NO: 22299433 NR Description: ORF_ID:tlr1890~hypothetical protein
  misc_feature (1)..(217): NCBI GI NO: 21593106 NR Description: unknown [Arabidopsis thaliana]
  misc_feature (1)..(220): NCBI GI NO: 33863519 NR Description: Possible membrane associated protease
MLLWIASFWFVGSWIVPFLAYTAGFRKESLTYRGQALCSLLTDVAEGVVGIAILRHCLAKFQPLSSDWFKFEVKGKWQFDVGLGCLMFPLINQLSQMNLNLLPVLQYTPVTISSVEQSIVARDPVAMALYAVVVSVCAPIWEEIVFRGFLLPSLTKYMPVWSAILVSSIAFALAHFNIQRMLPLVFLGMVMGTVFVRSRNLFPSMLLHSLWNAFVFLDLMK

SEQ ID NO: 7704 - DNA, 1317 bp, Glycine max
  misc_feature (1)..(1317): Ceres Seq. ID no. 13595567
gaacatcctaatcgaaaacttattattagaccctttctcttagagccaagaggtttaagttatagtaacattacttgaggagattaccacttgctagaaaaatatgaagttccatttggtgctatttgttataatagccgccatttttggagttgggcttgaagggtgccaatgcaaggttgtgcagttcatttttggagactctctctctgatgttggaaataacaattacctttctaagagccttgctcaggcaagtttaccttggtatggtattgatttgggcaatggactccctaatggcaggttctcaaatggtcgcacggttgctgatataataggtgataatatgggccttcctaggcctccagcattccttgacccatctttatctgaagatgttatattggaaaatggagtgaattatgcttctgggggtggaggcatcttgaatgaaacaggcagttattttattcaaaggttttctctctacaagcaaatggagctgtttcaggggacacaagaactgattagaagcagaattgggaaagaggaggcagagaagtttttccagggagctcattatgttgttgctttaggcagcaatgacttcatcaacaactacttgatgcctgtttacagtgattcatggacatataatgatcaaaccttcatggattacttgataggaactctaggagaacaattaaagctactgcatggtctaggagcaaggcagttgatggtgtttgggctgggcccaatgggctgcattccacttcaaagggtgcttagtacatctggggaatgtcaaagtagaacaaataatctggctattagctttaataaggctacaagcaagttagttgttgacttgggaaagcaacttcccaattcaagctacagatttggagatgcatatgacgttgttaatgatgtgattaccaacccgaacaaatatgggttccaaaactctgattcaccctgttgctcctttgggaatattcgaccagctcttacatgtatacctgcatcaaaactgtgcaaagatagaagcaagtacgttttttgggatgagtaccatccttcagacagagctaatgagctaattgccaatgaactcatcaagaaatttgggtttgtgcgtgttgatcaaacaaaacctccttcaccatcacccgctcttgctccgtcttcagacgattaatcgtgcatgtgaaggttttattactaaatgctcttaaattgcttttgttaaatttgtaatcaaagttggttctctttaattacaagtcggttacactaatttattgatgc

SEQ ID NO: 7705 - protein, 367 aa, Glycine max
  peptide (1)..(367): Ceres Seq. ID no. 15221618
  misc_feature (1)..(367): NCBI GI NO: 15221260 NR Description: GDSL-motif lipase/hydrolase protein
  misc_feature (96)..(367): NCBI GI NO: 27808542 NR Description: At1g74460 [Arabidopsis thaliana]
  misc_feature (1)..(359): NCBI GI NO: 21537293 NR Description: GDSL-motif lipase/hydrolase-like protein
  misc_feature (1)..(359): NCBI GI NO: 30693137 NR Description: lipase family [Arabidopsis thaliana]
  misc_feature (5)..(341): NCBI GI NO: 15229742 NR Description: GDSL-motif lipase/hydrolase protein
  misc_feature (29)..(349): NCBI GI NO: 15227849 NR Description: GDSL-motif lipase/hydrolase protein
  misc_feature (29)..(343): NCBI GI NO: 18417760 NR Description: GDSL-motif lipase/hydrolase protein
  misc_feature (29)..(343): NCBI GI NO: 11280578 NR Description: hypothetical protein F14F8_100 - Arabidopsisthaliana
  misc_feature (29)..(337): NCBI GI NO: 15241626 NR Description: GDSL-motif lipase/hydrolase protein
  misc_feature (1)..(337): NCBI GI NO: 15224005 NR Description: GDSL-motif lipase/hydrolase protein
MKFHLVLFVIIAAIFGVGLEGCQCKVVQFIFGDSLSDVGNNNYLSKSLAQASLPWYGIDLGNGLPNGRFSNGRTVADIIGDNMGLPRPPAFLDPSLSEDVILENGVNYASGGGGILNETGSYFIQRFSLYKQMELFQGTQELIRSRIGKEEAEKFFQGAHYVVALGSNDFINNYLMPVYSDSWTYNDQTFMDYLIGTLGEQLKLLHGLGARQLMVFGLGPMGCIPLQRVLSTSGECQSRTNNLAISFNKATSKLVVDLGKQLPNSSYRFGDAYDVVNDVITNPNKYGFQNSDSPCCSFGNIRPALTCIPASKLCKDRSKYVFWDEYHPSDRANELIANELIKKFGFVRVDQTKPPSPSPALAPSSDD

SEQ ID NO: 7706 - protein, 285 aa, Glycine max
  peptide (1)..(285): Ceres Seq. ID no. 15221619
  misc_feature (1)..(285): NCBI GI NO: 15221260 NR Description: GDSL-motif lipase/hydrolase protein
  misc_feature (14)..(285): NCBI GI NO: 27808542 NR Description: At1g74460 [Arabidopsis thaliana]
  misc_feature (1)..(277): NCBI GI NO: 21537293 NR Description: GDSL-motif lipase/hydrolase-like protein
  misc_feature (1)..(277): NCBI GI NO: 30693137 NR Description: lipase family [Arabidopsis thaliana]
  misc_feature (1)..(259): NCBI GI NO: 15229742 NR Description: GDSL-motif lipase/hydrolase protein
  misc_feature (1)..(267): NCBI GI NO: 15227849 NR Description: GDSL-motif lipase/hydrolase protein
  misc_feature (1)..(261): NCBI GI NO: 18417760 NR Description: GDSL-motif lipase/hydrolase protein
  misc_feature (1)..(261): NCBI GI NO: 11280578 NR Description: hypothetical protein F14F8_100 - Arabidopsisthaliana
  misc_feature (1)..(255): NCBI GI NO: 15241626 NR Description: GDSL-motif lipase/hydrolase protein
  misc_feature (1)..(255): NCBI GI NO: 15224005 NR Description: GDSL-motif lipase/hydrolase protein
MGLPRPPAFLDPSLSEDVILENGVNYASGGGGILNETGSYFIQRFSLYKQMELFQGTQELIRSRIGKEEAEKFFQGAHYVVALGSNDFINNYLMPVYSDSWTYNDQTFMDYLIGTLGEQLKLLHGLGARQLMVFGLGPMGCIPLQRVLSTSGECQSRTNNLAISFNKATSKLVVDLGKQLPNSSYRFGDAYDVVNDVITNPNKYGFQNSDSPCCSFGNIRPALTCIPASKLCKDRSKYVFWDEYHPSDRANELIANELIKKFGFVRVDQTKPPSPSPALAPSSDD

SEQ ID NO: 7707 - protein, 235 aa, Glycine max
  peptide (1)..(235): Ceres Seq. ID no. 15221620
  misc_feature (1)..(235): NCBI GI NO: 15221260 NR Description: GDSL-motif lipase/hydrolase protein
  misc_feature (1)..(235): NCBI GI NO: 27808542 NR Description: At1g74460 [Arabidopsis thaliana]
  misc_feature (1)..(227): NCBI GI NO: 21537293 NR Description: GDSL-motif lipase/hydrolase-like protein
  misc_feature (1)..(227): NCBI GI NO: 30693137 NR Description: lipase family [Arabidopsis thaliana]
  misc_feature (1)..(209): NCBI GI NO: 15229742 NR Description: GDSL-motif lipase/hydrolase protein
  misc_feature (1)..(217): NCBI GI NO: 15227849 NR Description: GDSL-motif lipase/hydrolase protein
  misc_feature (1)..(211): NCBI GI NO: 18417760 NR Description: GDSL-motif lipase/hydrolase protein
  misc_feature (1)..(211): NCBI GI NO: 11280578 NR Description: hypothetical protein F14F8_100 - Arabidopsisthaliana
  misc_feature (1)..(205): NCBI GI NO: 15241626 NR Description: GDSL-motif lipase/hydrolase protein
  misc_feature (1)..(205): NCBI GI NO: 15224005 NR Description: GDSL-motif lipase/hydrolase protein
MELFQGTQELIRSRIGKEEAEKFFQGAHYVVALGSNDFINNYLMPVYSDSWTYNDQTFMDYLIGTLGEQLKLLHGLGARQLMVFGLGPMGCIPLQRVLSTSGECQSRTNNLAISFNKATSKLVVDLGKQLPNSSYRFGDAYDVVNDVITNPNKYGFQNSDSPCCSFGNIRPALTCIPASKLCKDRSKYVFWDEYHPSDRANELIANELIKKFGFVRVDQTKPPSPSPALAPSSDD

SEQ ID NO: 7708 - DNA, 995 bp, Glycine max
  misc_feature (1)..(995): Ceres Seq. ID no. 13595568
gaaataatctcgatttggacaaaagacagagaacgatggagtcttgccagcaaaaggttatggagaagctgcttcacggccatgggtgtgccaaccagctcaagctaatcatggaccaccacgccgagtcagattcgtccgttgaaagggaggatctggccaagtccgtcctccattgtttctcggatgctctctccattttgatcgatacgaatgatcataacaaagatgatgataaatccaataactcatctccccaagactcttcacatgttcttgagagcagcaggaaaccttttcacaagaggggaagaaagacatcaatggcggagagctcagattaccgcagacacgaatccccaaacccgatctaccacgacggctttctttggaggaaatacggacaaaagcaaatcaaagaatcggaccaccaaaggagttactacaagtgtgcgtacacaaacgaccagaaatgcgaagcaaagaagcaggttcaaatgatccaaaacaaccctccattgtactcaaccacttacttcggccgccacacatgtcagcttcatcaagcctttgaaacttttcccattgacacctcagatccccaagattcacgcatgatccgatttgataacccagattcctctacccatcaacatcaaaatcagataattcatctcaaagctgaacaaatgatgccctctgagaaagcagaagagtggtcgtccccatctgagtatatgtcctccgaggttgcctacgctgtggaggctttcgggtttaaccctgctcgcacatcaagtgacttatcatgaccatatatgcccttcccgtcgctatcatcagacatctaaagcaactttagttatttgtttcctcataatatcctatagtatacctcctgttactttttttttgtgttttgcatctcatgtatttgcctacctctactttgaacttttgttttgagtttaatattaatcagctttaataacgcg

SEQ ID NO: 7709 - protein, 269 aa, Glycine max
  peptide (1)..(269): Ceres Seq. ID no. 15221621
  misc_feature (7)..(269): NCBI GI NO: 13506735 NR Description: WRKY DNA-binding protein 62 [Arabidopsis thaliana]
  misc_feature (12)..(269): NCBI GI NO: 30679452 NR Description: WRKY family transcription factor
  misc_feature (20)..(269): NCBI GI NO: 11358138 NR Description: hypothetical protein T20L15
  misc_feature (12)..(236): NCBI GI NO: 9758663 NR Description: contains similarity to DNA-bindingprotein~gene_id:MQJ16
  misc_feature (12)..(236): NCBI GI NO: 30688540 NR Description: WRKY family transcription factor
  misc_feature (12)..(234): NCBI GI NO: 18408541 NR Description: WRKY family transcription factor
  misc_feature (17)..(230): NCBI GI NO: 15219685 NR Description: WRKY family transcription factor
  misc_feature (18)..(268): NCBI GI NO: 15219706 NR Description: expressed protein [Arabidopsis thaliana]
  misc_feature (12)..(234): NCBI GI NO: 25404630 NR Description: probable wrky-type DNA binding protein F28G11.3
  misc_feature (82)..(209): NCBI GI NO: 15220174 NR Description: WRKY family transcription factor
NNLDLDKRQRTMESCQQKVMEKLLHGHGCANQLKLIMDHHAESDSSVEREDLAKSVLHCFSDALSILIDTNDHNKDDDKSNNSSPQDSSHVLESSRKPFHKRGRKTSMAESSDYRRHESPNPIYHDGFLWRKYGQKQIKESDHQRSYYKCAYTNDQKCEAKKQVQMIQNNPPLYSTTYFGRHTCQLHQAFETFPIDTSDPQDSRMIRFDNPDSSTHQHQNQIIHLKAEQMMPSEKAEEWSSPSEYMSSEVAYAVEAFGFNPARTSSDLS

SEQ ID NO: 7710 - protein, 258 aa, Glycine max
  peptide (1)..(258): Ceres Seq. ID no. 15221622
  misc_feature (1)..(258): NCBI GI NO: 13506735 NR Description: WRKY DNA-binding protein 62 [Arabidopsis thaliana]
  misc_feature (1)..(258): NCBI GI NO: 30679452 NR Description: WRKY family transcription factor
  misc_feature (9)..(258): NCBI GI NO: 11358138 NR Description: hypothetical protein T20L15
  misc_feature (1)..(225): NCBI GI NO: 9758663 NR Description: contains similarity to DNA-bindingprotein~gene_id:MQJ16
  misc_feature (1)..(225): NCBI GI NO: 30688540 NR Description: WRKY family transcription factor
  misc_feature (1)..(223): NCBI GI NO: 18408541 NR Description: WRKY family transcription factor
  misc_feature (6)..(219): NCBI GI NO: 15219685 NR Description: WRKY family transcription factor
  misc_feature (7)..(257): NCBI GI NO: 15219706 NR Description: expressed protein [Arabidopsis thaliana]
  misc_feature (1)..(223): NCBI GI NO: 25404630 NR Description: probable wrky-type DNA binding protein F28G11.3
  misc_feature (71)..(198): NCBI GI NO: 15220174 NR Description: WRKY family transcription factor
MESCQQKVMEKLLHGHGCANQLKLIMDHHAESDSSVEREDLAKSVLHCFSDALSILIDTNDHNKDDDKSNNSSPQDSSHVLESSRKPFHKRGRKTSMAESSDYRRHESPNPIYHDGFLWRKYGQKQIKESDHQRSYYKCAYTNDQKCEAKKQVQMIQNNPPLYSTTYFGRHTCQLHQAFETFPIDTSDPQDSRMIRFDNPDSSTHQHQNQIIHLKAEQMMPSEKAEEWSSPSEYMSSEVAYAVEAFGFNPARTSSDLS

SEQ ID NO: 7711 - protein, 250 aa, Glycine max
  peptide (1)..(250): Ceres Seq. ID no. 15221623
  misc_feature (1)..(250): NCBI GI NO: 13506735 NR Description: WRKY DNA-binding protein 62 [Arabidopsis thaliana]
  misc_feature (1)..(250): NCBI GI NO: 30679452 NR Description: WRKY family transcription factor
  misc_feature (1)..(250): NCBI GI NO: 11358138 NR Description: hypothetical protein T20L15
  misc_feature (1)..(217): NCBI GI NO: 9758663 NR Description: contains similarity to DNA-bindingprotein~gene_id:MQJ16
  misc_feature (1)..(217): NCBI GI NO: 30688540 NR Description: WRKY family transcription factor
  misc_feature (1)..(215): NCBI GI NO: 18408541 NR Description: WRKY family transcription factor
  misc_feature (1)..(211): NCBI GI NO: 15219685 NR Description: WRKY family transcription factor
  misc_feature (1)..(249): NCBI GI NO: 15219706 NR Description: expressed protein [Arabidopsis thaliana]
  misc_feature (1)..(215): NCBI GI NO: 25404630 NR Description: probable wrky-type DNA binding protein F28G11.3
  misc_feature (63)..(190): NCBI GI NO: 15220174 NR Description: WRKY family transcription factor
MEKLLHGHGCANQLKLIMDHHAESDSSVEREDLAKSVLHCFSDALSILIDTNDHNKDDDKSNNSSPQDSSHVLESSRKPFHKRGRKTSMAESSDYRRHESPNPIYHDGFLWRKYGQKQIKESDHQRSYYKCAYTNDQKCEAKKQVQMIQNNPPLYSTTYFGRHTCQLHQAFETFPIDTSDPQDSRMIRFDNPDSSTHQHQNQIIHLKAEQMMPSEKAEEWSSPSEYMSSEVAYAVEAFGFNPARTSSDLS

SEQ ID NO: 7712 - DNA, 858 bp, Glycine max
  misc_feature (1)..(858): Ceres Seq. ID no. 12611801
gcaggccacataaaaccaaaggaagaagagaacgtctgtcatctgcttaattcctctgtgccgaggtagctgccaattccaaagactctgagtaagaggagaacgtggttagctaggaaatgtgcggcggagctgttatcgccgacttcgtcccggccggggcccgccgcccggatggctcctccgccgacgtccccggctccatcctcgccggtggggaggtgaaggagaaaccgctggcgccggggcggaagacggcgtaccgtgggatcaggcgccggccatggggccgctgggctgcggagatccgggaccccacgaagggcgcgcgcgtctggctgggcacgtacgccaccgcggaggaggccgcgcgcgcctacgacgtcgcggcgcgcgatatccgcgggccgaaggccaagctcaacttcccgcccgcggtgggcgcgccgcaggcggccgcggccgtggaggggccgggggcgcccaagaagcgtcggtgggtcgctgccgaggagagttcggcatcttcgtctccccttccggtcacagctgccggcggcacggagagcctgcgggagcgcatgtccgggctggaggcgttcctggggctggaggacgacgacgtggaggcctggggggccgtcgatctcatcttggattaggcgtgtgccgtcgccacgtgcggcgtccatggggtacatttaccgataaataaataagcagattggtcgaagtcttttgatttgattagctaaagtatcgattggctttcctgggcttttgccagcatatccaggtcctttgtagtgggatgctatgtaattcgagcatgacgatcagaaaaaatgtggttccgag

SEQ ID NO: 7713 - protein, 180 aa, Glycine max
  peptide (1)..(180): Ceres Seq. ID no. 12611802
  misc_feature (45)..(109): Pfam Name: Pfam Description:  AP2 domain
  misc_feature (1)..(123): NCBI GI NO: 34894554 NR Description: B1011A07.25
  misc_feature (19)..(156): NCBI GI NO: 33146866 NR Description: EREB-like protein
  misc_feature (19)..(156): NCBI GI NO: 34906702 NR Description: EREBP
  misc_feature (36)..(159): NCBI GI NO: 2467088 NR Description: putative Ckc2 [Arabidopsis thaliana]
  misc_feature (8)..(151): NCBI GI NO: 31745667 NR Description: AP2 domain transcription factor EREBP
  misc_feature (8)..(151): NCBI GI NO: 34393859 NR Description: AP2 domain transcription factor EREBP
  misc_feature (1)..(104): NCBI GI NO: 15226619 NR Description: putative AP2 domain transcription factor
  misc_feature (12)..(119): NCBI GI NO: 24940524 NR Description: ethylene response element binding protein
  misc_feature (34)..(167): NCBI GI NO: 10798644 NR Description: AP2 domain-containing transcription factor
  misc_feature (36)..(146): NCBI GI NO: 15228312 NR Description: AP2 domain protein RAP2
MCGGAVIADFVPAGARRPDGSSADVPGSILAGGEVKEKPLAPGRKTAYRGIRRRPWGRWAAEIRDPTKGARVWLGTYATAEEAARAYDVAARDIRGPKAKLNFPPAVGAPQAAAAVEGPGAPKKRRWVAAEESSASSSPLPVTAAGGTESLRERMSGLEAFLGLEDDDVEAWGAVDLILD

SEQ ID NO: 7714 - protein, 143 aa, Glycine max
  peptide (1)..(143): Ceres Seq. ID no. 12611803
  misc_feature (1)..(130): NCBI GI NO: 38175548 NR Description: unknown protein
MGPLGCGDPGPHEGRARLAGHVRHRGGGRARLRRRGARYPRAEGQAQLPARGGRAAGGRGRGGAGGAQEASVGRCRGEFGIFVSPSGHSCRRHGEPAGAHVRAGGVPGAGGRRRGGLGGRRSHLGLGVCRRHVRRPWGTFTDK

SEQ ID NO: 7715 - DNA, 1157 bp, Glycine max
  misc_feature (1)..(1157): Ceres Seq. ID no. 13595655
atcgaaatactgttgtagaaagctttgtgttgtattgtggctgagccaccacaattctgattcctttctcttctcggcagtttgcttcctccgtagcagatcgtaaggaacttttgccttgtaagtgtaactattggtaccatggtgtaaacctaaagcattggaagaactgaaacattgccttatgaagactgtgggagtaggctctagtaaagtgacattgtctctaagataaaattctcaactcagaaagatggtcatattctcaataagtaatgccagatatacttatgtgcatgatcagaaatatccctctaaagatgttgacatacaccatatagtttcaaggaggagtaatgctaaatatctcgtgtatgccacagcacttcttgtattagcatgtgccttgtatctgtatgttcttaagggaaaatcaattagttttgtgtattacagcttgctttttgacatatttcttgtcaagttgttacttgggaagcctgttaagaaagagtctgttgtgattatgccagcttttggagtacagcttgagactcattatgtgagtggaaaagtcatccgatactttgttcccattgacaatattctgaaacctgttctaatagaatgtgtgactccagtgacttgctattggactctatcgttgattattcgtggtgaatcagaaatggtgttagttttcaagaacttacgcccaccagtgaaaatgttggtccatgtctggaaggccctgtgtgctgcaactgatagtaaagaagagacctgtactcatgcagaatgaataattgacagttatggcttatgtactgtttctgtactggtgtgtactccccatcattttacgctgttctgtcacattgaacaccaatcctatgtaagagtaggattggatttcaacatacattggaaagtgaattttttgataaaccacactcttctccagttgatagtttgggacgtgcgttcactatcagcactccaaggcattgaatttagaggccaattggctctaccttttgaaactgcatactaagtagcttatttataactaggtagaaattttgtatcatgacctaggactgatagaactagtatgtttccgtgagtcttttgtaactaaaatagagcacaggttc

SEQ ID NO: 7716 - protein, 182 aa, Glycine max
  peptide (1)..(182): Ceres Seq. ID no. 13595656
  misc_feature (1)..(182): NCBI GI NO: 22329188 NR Description: expressed protein [Arabidopsis thaliana]
  misc_feature (1)..(182): NCBI GI NO: 7486656 NR Description: hypothetical protein F8D20
MVIFSISNARYTYVHDQKYPSKDVDIHHIVSRRSNAKYLVYATALLVLACALYLYVLKGKSISFVYYSLLFDIFLVKLLLGKPVKKESVVIMPAFGVQLETHYVSGKVIRYFVPIDNILKPVLIECVTPVTCYWTLSLIIRGESEMVLVFKNLRPPVKMLVHVWKALCAATDSKEETCTHAE

SEQ ID NO: 7717 - protein, 91 aa, Glycine max
  peptide (1)..(91): Ceres Seq. ID no. 13595657
  misc_feature (1)..(91): NCBI GI NO: 22329188 NR Description: expressed protein [Arabidopsis thaliana]
  misc_feature (1)..(91): NCBI GI NO: 7486656 NR Description: hypothetical protein F8D20
MPAFGVQLETHYVSGKVIRYFVPIDNILKPVLIECVTPVTCYWTLSLIIRGESEMVLVFKNLRPPVKMLVHVWKALCAATDSKEETCTHAE

SEQ ID NO: 7718 - DNA, 1211 bp, Glycine max
  misc_feature (1)..(1211): Ceres Seq. ID no. 12611829
atccctctccctttccttcccctctctctctcgctcgtcttccttgccccctcgcgcaacagcagcgccacaacgcagtgagtggcacttccgtgatttcgccgccgcgggggcggggggaggaggaggaggaggaggaggagggaggccatgggcaacgccagcggcagggaggaggacgccgccgcgcccggggaggccgacgccgccgacgtcgacgttgaggacggaggcgacgactcctcggcccgcggcttccctccctacggcggaggcgccaaccacgtgcgccgtgcgtgctcggtgggcgtcgtgggggccagcggcgggcccggatcgccgcccgggagccccggccgctccctctcgccgcggatgttcgtgccccagacacctgtacctccattgcaaagacctgctgatgtaactccagtgttcaatgaaatactgatgaatgaacaagaagaagaatttgatggccctcctcaaaaggaaatacctgctttggttgtttggactctcggaggaaagaatgtatctgttgaaggatcctgggataactggaaatcaaggaaaccaatgcagaaatctggaaaagatcattctcttctgttgatccttccttctggagtttatcgttatagatttgttgtagatggagagagaagatgttttcctgaccttccatgtgaaactgacgccatgggcaatgctgttaaccttcttgatgttcatgattttgttcctgaaagtgttgaaagtgtatcagaatttgaggctcctccatctccagaatctagctacagtttcctggcacccgaggaaaaggactttgcgaaggagccacctgctcttccgtctcagcttcacctcggcgttcttaactcacagaactcagaggaaatatgtgcacggccccagcacatcgtcctcaaccaccttttcattgagaagggttggggtgcccatccgctggtggctcttggtgtaacccacagatttgagtccaaatatgtaacggtcgtcttgtacaagcccatagaacgatagcatagcaaccgcatgaaagttgaagctaatgcttgacaactcaccgcgaaagcagcaacgaacagcaacatcgtggcctctccccctgtaaaagcacttcaggtacaggaatattttcgataacttgcaggagcttctagtcgtgatattgctccccttcg

SEQ ID NO: 7719 - protein, 299 aa, Glycine max
  peptide (1)..(299): Ceres Seq. ID no. 12611830
  misc_feature (211)..(297): Pfam Name: Pfam Description:  5'-AMP-activated protein kinase
  misc_feature (1)..(299): NCBI GI NO: 22324436 NR Description: AKIN beta1-like protein
  misc_feature (1)..(299): NCBI GI NO: 6686782 NR Description: AKIN gamma [Arabidopsis thaliana]
  misc_feature (1)..(299): NCBI GI NO: 15242175 NR Description: AKIN beta1; protein id: At5g21170
  misc_feature (1)..(299): NCBI GI NO: 5702015 NR Description: GAL83 protein [Solanum tuberosum]
  misc_feature (63)..(299): NCBI GI NO: 32364486 NR Description: AKIN beta1 [Medicago truncatula]
  misc_feature (1)..(299): NCBI GI NO: 32364488 NR Description: AKIN beta2 [Medicago truncatula]
  misc_feature (1)..(299): NCBI GI NO: 6686784 NR Description: AKIN beta2 [Arabidopsis thaliana]
  misc_feature (76)..(299): NCBI GI NO: 11935162 NR Description: SNF1-related kinase complex anchoring protein SIP1
  misc_feature (63)..(299): NCBI GI NO: 15234895 NR Description: kinase like protein; protein id: At4g16360.1
  misc_feature (63)..(257): NCBI GI NO: 29725558 NR Description: SNF1 kinase complex anchoring protein
MGNASGREEDAAAPGEADAADVDVEDGGDDSSARGFPPYGGGANHVRRACSVGVVGASGGPGSPPGSPGRSLSPRMFVPQTPVPPLQRPADVTPVFNEILMNEQEEEFDGPPQKEIPALVVWTLGGKNVSVEGSWDNWKSRKPMQKSGKDHSLLLILPSGVYRYRFVVDGERRCFPDLPCETDAMGNAVNLLDVHDFVPESVESVSEFEAPPSPESSYSFLAPEEKDFAKEPPALPSQLHLGVLNSQNSEEICARPQHIVLNHLFIEKGWGAHPLVALGVTHRFESKYVTVVLYKPIER

SEQ ID NO: 7720 - protein, 224 aa, Glycine max
  peptide (1)..(224): Ceres Seq. ID no. 12611831
  misc_feature (136)..(222): Pfam Name: Pfam Description:  5'-AMP-activated protein kinase
  misc_feature (1)..(224): NCBI GI NO: 22324436 NR Description: AKIN beta1-like protein
  misc_feature (1)..(224): NCBI GI NO: 6686782 NR Description: AKIN gamma [Arabidopsis thaliana]
  misc_feature (1)..(224): NCBI GI NO: 15242175 NR Description: AKIN beta1; protein id: At5g21170
  misc_feature (1)..(224): NCBI GI NO: 5702015 NR Description: GAL83 protein [Solanum tuberosum]
  misc_feature (1)..(224): NCBI GI NO: 32364486 NR Description: AKIN beta1 [Medicago truncatula]
  misc_feature (1)..(224): NCBI GI NO: 32364488 NR Description: AKIN beta2 [Medicago truncatula]
  misc_feature (1)..(224): NCBI GI NO: 6686784 NR Description: AKIN beta2 [Arabidopsis thaliana]
  misc_feature (1)..(224): NCBI GI NO: 11935162 NR Description: SNF1-related kinase complex anchoring protein SIP1
  misc_feature (1)..(224): NCBI GI NO: 15234895 NR Description: kinase like protein; protein id: At4g16360.1
  misc_feature (1)..(182): NCBI GI NO: 29725558 NR Description: SNF1 kinase complex anchoring protein
MFVPQTPVPPLQRPADVTPVFNEILMNEQEEEFDGPPQKEIPALVVWTLGGKNVSVEGSWDNWKSRKPMQKSGKDHSLLLILPSGVYRYRFVVDGERRCFPDLPCETDAMGNAVNLLDVHDFVPESVESVSEFEAPPSPESSYSFLAPEEKDFAKEPPALPSQLHLGVLNSQNSEEICARPQHIVLNHLFIEKGWGAHPLVALGVTHRFESKYVTVVLYKPIER

SEQ ID NO: 7721 - protein, 199 aa, Glycine max
  peptide (1)..(199): Ceres Seq. ID no. 12611832
  misc_feature (111)..(197): Pfam Name: Pfam Description:  5'-AMP-activated protein kinase
  misc_feature (1)..(199): NCBI GI NO: 22324436 NR Description: AKIN beta1-like protein
  misc_feature (1)..(199): NCBI GI NO: 6686782 NR Description: AKIN gamma [Arabidopsis thaliana]
  misc_feature (1)..(199): NCBI GI NO: 15242175 NR Description: AKIN beta1; protein id: At5g21170
  misc_feature (1)..(199): NCBI GI NO: 5702015 NR Description: GAL83 protein [Solanum tuberosum]
  misc_feature (1)..(199): NCBI GI NO: 32364486 NR Description: AKIN beta1 [Medicago truncatula]
  misc_feature (1)..(199): NCBI GI NO: 32364488 NR Description: AKIN beta2 [Medicago truncatula]
  misc_feature (1)..(199): NCBI GI NO: 6686784 NR Description: AKIN beta2 [Arabidopsis thaliana]
  misc_feature (1)..(199): NCBI GI NO: 11935162 NR Description: SNF1-related kinase complex anchoring protein SIP1
  misc_feature (1)..(199): NCBI GI NO: 15234895 NR Description: kinase like protein; protein id: At4g16360.1
  misc_feature (1)..(157): NCBI GI NO: 29725558 NR Description: SNF1 kinase complex anchoring protein
MNEQEEEFDGPPQKEIPALVVWTLGGKNVSVEGSWDNWKSRKPMQKSGKDHSLLLILPSGVYRYRFVVDGERRCFPDLPCETDAMGNAVNLLDVHDFVPESVESVSEFEAPPSPESSYSFLAPEEKDFAKEPPALPSQLHLGVLNSQNSEEICARPQHIVLNHLFIEKGWGAHPLVALGVTHRFESKYVTVVLYKPIER

SEQ ID NO: 7722 - DNA, 1104 bp, Glycine max
  misc_feature (1)..(1104): Ceres Seq. ID no. 13595647
aaaaaggacctatatgttaggccataactagcctgcactttgaaatctatttcagtttgaattttgaaagtgagtgtggcgtaccgtgtacgtatctgcagaaagtgaatgaatggtaatgggggaagaagggtgcaaggtatgtgttacaggaggcagtggttacattggttcctggctcatcaagaagctactggccaagggctacacagttcatgcaactctcagagacttgaagaatgagtcaaaggttggcctcttaaagagccttccacaatcagaaggaaaactggtgctgtttgaagctgatatttacaacccaaatgattttgaccttgcaattgaaggctgcaagtttgtgtttcatgttgctactcccatgatccatgaacctggctcccagggctatacttattcaaagacactgtcggagagacatgtgctgagctacgggaacgaagaaaatggtggaggaatggaggtggtaacactcacttgtggactagtgggaggtgacacccttctatcttctacacccgctagcggagtagtttgtatcgctcagatcatgcagaatgaaagggcgtacatatcactcaagttcctaaaggaattgttggggaaaattcctcttgtacacgttgatgatgtctgtgaagctcatattttctgcatggaaagcacctcgatcagtggaagattcttgtgtgcaagttcatatatttcattagaagagatggctaatcattacgctcttcattatccagaattcaatgtgaaacaagaatatgaagatgggctgaagaaggatatcaagtgggcctcaacaaagctgtgtgacaaaggctttgtatacaaatatgacgccaagatgctattggatgattgtatcaaatgtgcaagaaggatgggtgatatctagtctccatctacacccttgattgctatatctgcttgtaatacaatatgcaccaggcgtctgcctcatttcttcttgctccctatcttactgttgttactattgttttcgcaattatgattaaaaaataaactcggcttcaaatcaattagaaaagtgaattgactgcgactatgagagtttcc

SEQ ID NO: 7723 - protein, 269 aa, Glycine max
  peptide (1)..(269): Ceres Seq. ID no. 13595648
  misc_feature (10)..(87): Pfam Name: Pfam Description:  NAD dependent epimerase/dehydratase family
  misc_feature (98)..(269): NCBI GI NO: 33146534 NR Description: putative NADPH HC toxin reductase
  misc_feature (98)..(269): NCBI GI NO: 33146535 NR Description: putative NADPH HC toxin reductase
  misc_feature (9)..(99): NCBI GI NO: 33146534 NR Description: putative NADPH HC toxin reductase
  misc_feature (9)..(99): NCBI GI NO: 33146535 NR Description: putative NADPH HC toxin reductase
  misc_feature (96)..(267): NCBI GI NO: 34393584 NR Description: putative NADPH HC toxin reductase
  misc_feature (8)..(97): NCBI GI NO: 34393584 NR Description: putative NADPH HC toxin reductase
  misc_feature (99)..(267): NCBI GI NO: 33146536 NR Description: putative NADPH HC toxin reductase
  misc_feature (10)..(111): NCBI GI NO: 33146536 NR Description: putative NADPH HC toxin reductase
  misc_feature (99)..(267): NCBI GI NO: 1888485 NR Description: dihydroflavonol 4-reductase [Vitis vinifera]
  misc_feature (3)..(93): NCBI GI NO: 1888485 NR Description: dihydroflavonol 4-reductase [Vitis vinifera]
MVMGEEGCKVCVTGGSGYIGSWLIKKLLAKGYTVHATLRDLKNESKVGLLKSLPQSEGKLVLFEADIYNPNDFDLAIEGCKFVFHVATPMIHEPGSQGYTYSKTLSERHVLSYGNEENGGGMEVVTLTCGLVGGDTLLSSTPASGVVCIAQIMQNERAYISLKFLKELLGKIPLVHVDDVCEAHIFCMESTSISGRFLCASSYISLEEMANHYALHYPEFNVKQEYEDGLKKDIKWASTKLCDKGFVYKYDAKMLLDDCIKCARRMGDI

SEQ ID NO: 7724 - protein, 267 aa, Glycine max
  peptide (1)..(267): Ceres Seq. ID no. 13595649
  misc_feature (8)..(85): Pfam Name: Pfam Description:  NAD dependent epimerase/dehydratase family
  misc_feature (96)..(267): NCBI GI NO: 33146534 NR Description: putative NADPH HC toxin reductase
  misc_feature (96)..(267): NCBI GI NO: 33146535 NR Description: putative NADPH HC toxin reductase
  misc_feature (7)..(97): NCBI GI NO: 33146534 NR Description: putative NADPH HC toxin reductase
  misc_feature (7)..(97): NCBI GI NO: 33146535 NR Description: putative NADPH HC toxin reductase
  misc_feature (94)..(265): NCBI GI NO: 34393584 NR Description: putative NADPH HC toxin reductase
  misc_feature (6)..(95): NCBI GI NO: 34393584 NR Description: putative NADPH HC toxin reductase
  misc_feature (97)..(265): NCBI GI NO: 33146536 NR Description: putative NADPH HC toxin reductase
  misc_feature (8)..(109): NCBI GI NO: 33146536 NR Description: putative NADPH HC toxin reductase
  misc_feature (97)..(265): NCBI GI NO: 1888485 NR Description: dihydroflavonol 4-reductase [Vitis vinifera]
  misc_feature (1)..(91): NCBI GI NO: 1888485 NR Description: dihydroflavonol 4-reductase [Vitis vinifera]
MGEEGCKVCVTGGSGYIGSWLIKKLLAKGYTVHATLRDLKNESKVGLLKSLPQSEGKLVLFEADIYNPNDFDLAIEGCKFVFHVATPMIHEPGSQGYTYSKTLSERHVLSYGNEENGGGMEVVTLTCGLVGGDTLLSSTPASGVVCIAQIMQNERAYISLKFLKELLGKIPLVHVDDVCEAHIFCMESTSISGRFLCASSYISLEEMANHYALHYPEFNVKQEYEDGLKKDIKWASTKLCDKGFVYKYDAKMLLDDCIKCARRMGDI

SEQ ID NO: 7725 - protein, 180 aa, Glycine max
  peptide (1)..(180): Ceres Seq. ID no. 13595650
  misc_feature (9)..(180): NCBI GI NO: 33146534 NR Description: putative NADPH HC toxin reductase
  misc_feature (9)..(180): NCBI GI NO: 33146535 NR Description: putative NADPH HC toxin reductase
  misc_feature (7)..(178): NCBI GI NO: 34393584 NR Description: putative NADPH HC toxin reductase
  misc_feature (10)..(178): NCBI GI NO: 33146536 NR Description: putative NADPH HC toxin reductase
  misc_feature (1)..(22): NCBI GI NO: 33146536 NR Description: putative NADPH HC toxin reductase
  misc_feature (10)..(178): NCBI GI NO: 1888485 NR Description: dihydroflavonol 4-reductase [Vitis vinifera]
  misc_feature (10)..(180): NCBI GI NO: 28629484 NR Description: dihydroflavonol 4-reductase [Pyrus communis]
  misc_feature (10)..(180): NCBI GI NO: 28629488 NR Description: putative dihydroflavonol 4-reductase
  misc_feature (4)..(172): NCBI GI NO: 6689826 NR Description: DFR-like protein [Arabidopsis thaliana]
  misc_feature (10)..(180): NCBI GI NO: 4588781 NR Description: dihydroflavonol reductase [Malus x domestica]
MIHEPGSQGYTYSKTLSERHVLSYGNEENGGGMEVVTLTCGLVGGDTLLSSTPASGVVCIAQIMQNERAYISLKFLKELLGKIPLVHVDDVCEAHIFCMESTSISGRFLCASSYISLEEMANHYALHYPEFNVKQEYEDGLKKDIKWASTKLCDKGFVYKYDAKMLLDDCIKCARRMGDI

SEQ ID NO: 7726 - DNA, 1169 bp, Glycine max
  misc_feature (1)..(1169): Ceres Seq. ID no. 13595423
atttagaagttgaatcggtgctacggggtatggaggcgaagacacatggcgaggatgaatccgcataactcaaccgccgatcttctttcggaatctctccaagctgctaacgagccgtctgatgtagccagcaagaaccttagttgcggtcaaatcaccaacgaggaagatgaatctcttgacaagcaaaacaagtgttgtagtgacattgtctctgacagttgtaaagatgattcaaattacaagacaggactcaattgccatcaggaggaccagcggaggacgagtctagtagcatcgattgtggagacatctcacgacgctcccactaggagaaccattgatcttggtcatggaagtgacctcatctacatccagaggtttcttccctttcaaaagtcttggactttatttgattatctcgacaagcatattccttggaccaggcccaccatccgcgtctttggtcgttcttgcctccagccaagagatacatgttacgttgcaagtagcggattgactccgctaatgtacagtggataccgacctgatgcctattcttgggatgactttccacctctcaaggacatccttgatgctatttgcgtagcgtttcctggaagcagattcaacagcttgcttttgaataggtacaacggcgccaacgactacgttggttggcatgctgatgatgaaaagctttacggccccactcctgaaattgcttccctctcttttggatgcaaacgtgactttgtgctcaagaaaaagaaacttcaagactcttcccgtgagaaaagaggagagggtggaccagcgaagaagaggttgaagaaaagcagcagcggagaggaggatcagcatagtttcgcattgaagcatggatcgttgctggtgatgaggggatacactcaaagggactggattcattctgtgccaaagcgtgcaaaggcggagggcactcgtatcaacctcaccttcaggcttgttttgtaaaccatgcatcattcatcattcatcatcatcatcaacaagcttagcttgatctcaagtcacattgattgactaggcttttctcatcttagttcttcgacatgagatataacatataagttggtgtagacattttgaaaaatcttaattactaattaacgtgaagattattaagg

SEQ ID NO: 7727 - protein, 316 aa, Glycine max
  peptide (1)..(316): Ceres Seq. ID no. 13595424
  misc_feature (194)..(316): Pfam Name: II Pfam Description: 2OG-Fe
  misc_feature (5)..(316): NCBI GI NO: 18399917 NR Description: oxidoreductase, 2OG-Fe(II) oxygenase family
  misc_feature (5)..(316): NCBI GI NO: 25412094 NR Description: hypothetical protein At2g22260
  misc_feature (92)..(240): NCBI GI NO: 27367984 NR Description: Alkylated DNA repair protein
  misc_feature (270)..(316): NCBI GI NO: 27367984 NR Description: Alkylated DNA repair protein
  misc_feature (107)..(255): NCBI GI NO: 28900052 NR Description: hypothetical protein
  misc_feature (272)..(316): NCBI GI NO: 28900052 NR Description: hypothetical protein
  misc_feature (104)..(242): NCBI GI NO: 33865381 NR Description: possible alkylated DNA repair protein
  misc_feature (270)..(313): NCBI GI NO: 33865381 NR Description: possible alkylated DNA repair protein
  misc_feature (107)..(243): NCBI GI NO: 15601714 NR Description: hypothetical protein [Vibrio cholerae]
  misc_feature (256)..(316): NCBI GI NO: 15601714 NR Description: hypothetical protein [Vibrio cholerae]
MARMNPHNSTADLLSESLQAANEPSDVASKNLSCGQITNEEDESLDKQNKCCSDIVSDSCKDDSNYKTGLNCHQEDQRRTSLVASIVETSHDAPTRRTIDLGHGSDLIYIQRFLPFQKSWTLFDYLDKHIPWTRPTIRVFGRSCLQPRDTCYVASSGLTPLMYSGYRPDAYSWDDFPPLKDILDAICVAFPGSRFNSLLLNRYNGANDYVGWHADDEKLYGPTPEIASLSFGCKRDFVLKKKKLQDSSREKRGEGGPAKKRLKKSSSGEEDQHSFALKHGSLLVMRGYTQRDWIHSVPKRAKAEGTRINLTFRLVL

SEQ ID NO: 7728 - protein, 313 aa, Glycine max
  peptide (1)..(313): Ceres Seq. ID no. 13595425
  misc_feature (191)..(313): Pfam Name: II Pfam Description: 2OG-Fe
  misc_feature (2)..(313): NCBI GI NO: 18399917 NR Description: oxidoreductase, 2OG-Fe(II) oxygenase family
  misc_feature (2)..(313): NCBI GI NO: 25412094 NR Description: hypothetical protein At2g22260
  misc_feature (89)..(237): NCBI GI NO: 27367984 NR Description: Alkylated DNA repair protein
  misc_feature (267)..(313): NCBI GI NO: 27367984 NR Description: Alkylated DNA repair protein
  misc_feature (104)..(252): NCBI GI NO: 28900052 NR Description: hypothetical protein
  misc_feature (269)..(313): NCBI GI NO: 28900052 NR Description: hypothetical protein
  misc_feature (101)..(239): NCBI GI NO: 33865381 NR Description: possible alkylated DNA repair protein
  misc_feature (267)..(310): NCBI GI NO: 33865381 NR Description: possible alkylated DNA repair protein
  misc_feature (104)..(240): NCBI GI NO: 15601714 NR Description: hypothetical protein [Vibrio cholerae]
  misc_feature (253)..(313): NCBI GI NO: 15601714 NR Description: hypothetical protein [Vibrio cholerae]
MNPHNSTADLLSESLQAANEPSDVASKNLSCGQITNEEDESLDKQNKCCSDIVSDSCKDDSNYKTGLNCHQEDQRRTSLVASIVETSHDAPTRRTIDLGHGSDLIYIQRFLPFQKSWTLFDYLDKHIPWTRPTIRVFGRSCLQPRDTCYVASSGLTPLMYSGYRPDAYSWDDFPPLKDILDAICVAFPGSRFNSLLLNRYNGANDYVGWHADDEKLYGPTPEIASLSFGCKRDFVLKKKKLQDSSREKRGEGGPAKKRLKKSSSGEEDQHSFALKHGSLLVMRGYTQRDWIHSVPKRAKAEGTRINLTFRLVL

SEQ ID NO: 7729 - DNA, 1119 bp, Glycine max
  misc_feature (1)..(1119): Ceres Seq. ID no. 13595569
aattcctaagatgctgatcataattgtaataacaaagaccaatattttgtgtgtgccagtgagctagttaggtgttaaatatttgattgcaatattaatatgaaggcacagtgtgagtagtgagaaggggcattagtaaagaggatgggtagacgaccctgctgccccaaagagatcaacaaaggtgcttggtctcgagaagaagatgaaaccctctccaaatatgtttccatccatggagaaggaaaatggcagaaggttgcccaaaatgcagggttaaagcgatgtggaaagagttgcagacaaagatggttgaattatctcaagcccggtataaaaagaggccacatctctgtggatgaagaggatatgattataagacttcatcgtcttcttggtaacagataggcattgattgcaaagaggctacctggacgaacagacaatgaaatcaagaactattggaacacaaatctgtcaaagaagttacaaaaacatccaacatcatcagtttcttcacttcaacacaaacgtcatgaaaaagaaaaaaccatacaaatgcatgtatcacccgaagcaccacggcctaggagagttaatgcagttgaatacagtaaaaatttggagaatggtgggtgtggaaatagacctagtacaactcccagtccctcaaataaagtagagggtagtagtgaagaagcttcttttagtgatttcctcatccacgacattgatcaaaaccaatttttgattgctgatgattcaaactcaaaggtgccacaaatggaagaagatcaccaccacaacaacaaggtggaattaataaccaacaacagtcctagctcttcatcaccttctgatcattgtcaccatctcttgccagagaaatttgacccttttgagacccttttggatgtggagctggcttcctttcttggatttgaaaatgattgatcaagagattttatttattattattgcatgcagtgagatgaatgaaaaaaggtcaagtacttagggagtgttatagataatatcccatctatatatggaatgcctaactaattatgcatctagctatagctagatgtaatatacaaatccagggtttctttttcg

SEQ ID NO: 7730 - protein, 131 aa, Glycine max
  peptide (1)..(131): Ceres Seq. ID no. 13595570
  misc_feature (1)..(106): NCBI GI NO: 13346192 NR Description: GHMYB38 [Gossypium hirsutum]
  misc_feature (1)..(60): NCBI GI NO: 15238535 NR Description: myb family transcription factor
  misc_feature (1)..(23): NCBI GI NO: 6467223 NR Description: DNA-binding protein [Arabidopsis thaliana]
  misc_feature (1)..(23): NCBI GI NO: 15236236 NR Description: myb family transcription factor
  misc_feature (1)..(26): NCBI GI NO: 30687964 NR Description: myb family transcription factor
  misc_feature (1)..(17): NCBI GI NO: 7438344 NR Description: myb-related protein 1 - rice
  misc_feature (1)..(19): NCBI GI NO: 15233968 NR Description: transcription factor (MYB4) -related
  misc_feature (1)..(48): NCBI GI NO: 11358528 NR Description: myb-related transcription factor MYB12
  misc_feature (1)..(48): NCBI GI NO: 15226609 NR Description: myb family transcription factor
  misc_feature (1)..(78): NCBI GI NO: 282963 NR Description: myb-related protein Ph2 - garden petunia
MHVSPEAPRPRRVNAVEYSKNLENGGCGNRPSTTPSPSNKVEGSSEEASFSDFLIHDIDQNQFLIADDSNSKVPQMEEDHHHNNKVELITNNSPSSSSPSDHCHHLLPEKFDPFETLLDVELASFLGFEND

SEQ ID NO: 7731 - protein, 87 aa, Glycine max
  peptide (1)..(87): Ceres Seq. ID no. 13595571
  misc_feature (1)..(87): NCBI GI NO: 13346192 NR Description: GHMYB38 [Gossypium hirsutum]
  misc_feature (1)..(87): NCBI GI NO: 1101770 NR Description: MYB-like transcriptional factor MBF1
  misc_feature (1)..(87): NCBI GI NO: 13346186 NR Description: GHMYB10 [Gossypium hirsutum]
  misc_feature (1)..(87): NCBI GI NO: 7446179 NR Description: myb-related protein 3 - rice
  misc_feature (1)..(87): NCBI GI NO: 7438347 NR Description: anthocyanin biosynthesis regulatory protein Pl -maize
  misc_feature (1)..(87): NCBI GI NO: 7438349 NR Description: anthocyanin biosynthesis regulatory protein Pl-Bh -maize
  misc_feature (1)..(87): NCBI GI NO: 7438351 NR Description: anthocyanin biosynthesis regulatory protein
  misc_feature (1)..(87): NCBI GI NO: 25989608 NR Description: PL transcription factor [Zea mays]
  misc_feature (1)..(87): NCBI GI NO: 7438350 NR Description: anthocyanin biosynthesis regulatory protein Pl -maize
  misc_feature (1)..(87): NCBI GI NO: 13346190 NR Description: GHMYB36 [Gossypium hirsutum]
MGRRPCCPKEINKGAWSREEDETLSKYVSIHGEGKWQKVAQNAGLKRCGKSCRQRWLNYLKPGIKRGHISVDEEDMIIRLHRLLGNR

SEQ ID NO: 7732 - protein, 78 aa, Glycine max
  peptide (1)..(78): Ceres Seq. ID no. 13595572
MKSRTIGTQICQRSYKNIQHHQFLHFNTNVMKKKKPYKCMYHPKHHGLGELMQLNTVKIWRMVGVEIDLVQLPVPQIK

SEQ ID NO: 7733 - DNA, 992 bp, Glycine max
  misc_feature (1)..(992): Ceres Seq. ID no. 13595658
agaacatcctaatcgaaaaaccaagctcctcctcctccacaggaaaagcaacagcgcagcgcggcttcactggtttcgccctcaatttcgagagcgagtcttggaaggccttccatggctcagccgtcgctgctcctcggctctccggcatcgatcgtcctcctccttctctccttcttccaagggccggtagtgagcgccatcacgttcaccttcgccaaccggtgcacggacacggtgtggcccgggctgctctcgggctccacctcgccgccgctggaaaccaccggcttcgcgctctcgccgggccagtcgcgctcaatctacgggcccaccgggtggtcgggccgcttctgggcgcgctctggctgtaatttcaacggcggcaagggcacctgcgtcacgggggactgcggctccggcgagatagagtgccgcggcgccggggccaccccgcccgccacgctcgcggagttcaccctcgacggcgacggcgggaaggacttctacgacgtcagcctcgtcgacggctacaacctgcccatgctggtgcagccgtccgcgcctgggtgccccgacaccgggtgcctcgtcgacctcaacgagcgctgcccctcggagctccgctccggcggcggcctcgcctgccgcagcgcctgcgaggccttcggcaagcccgagttctgctgcaacggcgcctacgggaaccctgacacgtgccacccctcccagtactcgcagctcttcaagtcggcgtgccccaagtcctacagctacgcctacgacgacgccacctccaccttcacctgcaaccacaccgattacaccattaccttctgcccgcagtccaatccttacaggtacctacctctgaatagtttctgatgctatgacagtgcaatctagttgaaatcatagtgttgcagatctgaatctgattcaactcaacaatgatattttctctgggctagaaatataatgagattttgatt

SEQ ID NO: 7734 - protein, 256 aa, Glycine max
  peptide (1)..(256): Ceres Seq. ID no. 13595659
  misc_feature (36)..(243): Pfam Name: Pfam Description:  Thaumatin family
  misc_feature (7)..(243): NCBI GI NO: 15233738 NR Description: thaumatin family [Arabidopsis thaliana]
  misc_feature (15)..(245): NCBI GI NO: 21592749 NR Description: putative thaumatin-like protein
  misc_feature (15)..(245): NCBI GI NO: 18420282 NR Description: thaumatin-like protein, putative
  misc_feature (31)..(245): NCBI GI NO: 7442168 NR Description: pathogenesis-related protein F20M13
  misc_feature (15)..(243): NCBI GI NO: 2262099 NR Description: thaumatin isolog [Arabidopsis thaliana]
  misc_feature (29)..(243): NCBI GI NO: 37531042 NR Description: putative thaumatin-like protein
  misc_feature (15)..(247): NCBI GI NO: 15233437 NR Description: thaumatin family [Arabidopsis thaliana]
  misc_feature (18)..(246): NCBI GI NO: 25296204 NR Description: hypothetical protein T20H2.19
  misc_feature (11)..(246): NCBI GI NO: 15222875 NR Description: thaumatin family [Arabidopsis thaliana]
  misc_feature (11)..(246): NCBI GI NO: 4105697 NR Description: thaumatin-like protein [Arabidopsis thaliana]
MAQPSLLLGSPASIVLLLLSFFQGPVVSAITFTFANRCTDTVWPGLLSGSTSPPLETTGFALSPGQSRSIYGPTGWSGRFWARSGCNFNGGKGTCVTGDCGSGEIECRGAGATPPATLAEFTLDGDGGKDFYDVSLVDGYNLPMLVQPSAPGCPDTGCLVDLNERCPSELRSGGGLACRSACEAFGKPEFCCNGAYGNPDTCHPSQYSQLFKSACPKSYSYAYDDATSTFTCNHTDYTITFCPQSNPYRYLPLNSF

SEQ ID NO: 7735 - DNA, 1609 bp, Glycine max
  misc_feature (1)..(1609): Ceres Seq. ID no. 13582380
actgcattaaggccaagtcaccactctcctcttccattggtggatctttttttttctctcttttaatagggaaaccattggtgtgtgtttcagctttgctgacccttctgttgtttctgccaatctctgttagtatttagacccttttgatatacgaagccttcaattacaatgctttacttcctcatatctttcgtctcctttctcatcctttccaagtctttcaccagcaggcctttctcatcaggggagagagggatcaaaccagggtcaattgggttttgggggagtctttcaagttggttagtttctaggctcaagaaaggaagcacaacaggcaccaccccttttagttttttttcagttttctcttggcatgttattgaaaaagaatagtttagtgtctaaggtggagaatgaggaggaggaggggaatgtttctctcttggatttgcctgatttgccattggaatgcatccttgagcacctttcaccagctgaattatgcagggtggcaacagtgtgcacatctctgagggatagatgtaggagtgatcatttatggaagaaacacatggagaggaaatggggtaaggtgtttggtgatgctgcttataggcaatggaaatggcatgtagcttccaagaacagagaaaaaatctcctccaaccagcacaatcagaaaggaatatttgctttccttcgtggtggttttctccccttcatatggatcaaagcaaaatcagaaaagggcacagagtcaagtagctcattaccagaagattcaatagcagctttatatctttctcttgaaagtggcaaattttggttccctgctcaagtctataaccgtgagaatggtcatgctgggttcatgctctcatgttatgatgcccaactatgctatgattctcgatccgacacttttctggcaaggtactcgcctcatgggagatggacaactgaggaaaacatacaatgggaccggctaagagtgccaccaattgctacttctccacatgctcttcacatctctgactgtttggatgacttgagacctggagatcacattgagattcagtggagaagaaacaaagaatttccttatggttggtggtatggtgtcattggtcatttggaacaatgtcaaggacatgggaaccattgccattgtcactataatgatatagtgattttggagttcacacagtacactgctgggtccagatggagacaaaccgtgataaacagaaagcatcatatagaaaaaggcaatgaaatagatggtttttatggaggaatcaggaagctgcatagcaaggaagaaattgcaaggtggaagaacctctggccaactaaaattgtgatacatgattgacttgattagaatttttgtaaattaagcagtcacccttcctaaaatgtgaaggattacttttgtcacagaacgatgtcattcctaacaataggtataaacttggaaagagtttatggaagaattttcagaggctgtaacatctgtagcacgacataacaaatagtggatatgttgcagctttcttatacgtgtctatatataattttatagaagaacattggtgcatagtgc

SEQ ID NO: 7736 - protein, 333 aa, Glycine max
  peptide (1)..(333): Ceres Seq. ID no. 13582381
  misc_feature (21)..(330): NCBI GI NO: 30685347 NR Description: F-box protein family [Arabidopsis thaliana]
  misc_feature (15)..(330): NCBI GI NO: 34903372 NR Description: unnamed protein product
  misc_feature (11)..(328): NCBI GI NO: 30688559 NR Description: F-box protein family [Arabidopsis thaliana]
  misc_feature (19)..(244): NCBI GI NO: 15225802 NR Description: F-box protein family [Arabidopsis thaliana]
  misc_feature (270)..(330): NCBI GI NO: 15225802 NR Description: F-box protein family [Arabidopsis thaliana]
  misc_feature (124)..(266): NCBI GI NO: 7459607 NR Description: hypothetical protein At2g41170
  misc_feature (21)..(62): NCBI GI NO: 7459607 NR Description: hypothetical protein At2g41170
  misc_feature (272)..(312): NCBI GI NO: 7459607 NR Description: hypothetical protein At2g41170
  misc_feature (21)..(245): NCBI GI NO: 7487431 NR Description: hypothetical protein At2g32560
  misc_feature (13)..(244): NCBI GI NO: 34909060 NR Description: P0702B09.33
MLLKKNSLVSKVENEEEEGNVSLLDLPDLPLECILEHLSPAELCRVATVCTSLRDRCRSDHLWKKHMERKWGKVFGDAAYRQWKWHVASKNREKISSNQHNQKGIFAFLRGGFLPFIWIKAKSEKGTESSSSLPEDSIAALYLSLESGKFWFPAQVYNRENGHAGFMLSCYDAQLCYDSRSDTFLARYSPHGRWTTEENIQWDRLRVPPIATSPHALHISDCLDDLRPGDHIEIQWRRNKEFPYGWWYGVIGHLEQCQGHGNHCHCHYNDIVILEFTQYTAGSRWRQTVINRKHHIEKGNEIDGFYGGIRKLHSKEEIARWKNLWPTKIVIHD

SEQ ID NO: 7737 - protein, 267 aa, Glycine max
  peptide (1)..(267): Ceres Seq. ID no. 13582382
  misc_feature (1)..(264): NCBI GI NO: 30685347 NR Description: F-box protein family [Arabidopsis thaliana]
  misc_feature (1)..(264): NCBI GI NO: 34903372 NR Description: unnamed protein product
  misc_feature (1)..(262): NCBI GI NO: 30688559 NR Description: F-box protein family [Arabidopsis thaliana]
  misc_feature (1)..(178): NCBI GI NO: 15225802 NR Description: F-box protein family [Arabidopsis thaliana]
  misc_feature (204)..(264): NCBI GI NO: 15225802 NR Description: F-box protein family [Arabidopsis thaliana]
  misc_feature (58)..(200): NCBI GI NO: 7459607 NR Description: hypothetical protein At2g41170
  misc_feature (206)..(246): NCBI GI NO: 7459607 NR Description: hypothetical protein At2g41170
  misc_feature (1)..(179): NCBI GI NO: 7487431 NR Description: hypothetical protein At2g32560
  misc_feature (1)..(178): NCBI GI NO: 34909060 NR Description: P0702B09.33
  misc_feature (168)..(264): NCBI GI NO: 34909060 NR Description: P0702B09.33
MERKWGKVFGDAAYRQWKWHVASKNREKISSNQHNQKGIFAFLRGGFLPFIWIKAKSEKGTESSSSLPEDSIAALYLSLESGKFWFPAQVYNRENGHAGFMLSCYDAQLCYDSRSDTFLARYSPHGRWTTEENIQWDRLRVPPIATSPHALHISDCLDDLRPGDHIEIQWRRNKEFPYGWWYGVIGHLEQCQGHGNHCHCHYNDIVILEFTQYTAGSRWRQTVINRKHHIEKGNEIDGFYGGIRKLHSKEEIARWKNLWPTKIVIHD

SEQ ID NO: 7738 - protein, 167 aa, Glycine max
  peptide (1)..(167): Ceres Seq. ID no. 13582383
  misc_feature (1)..(164): NCBI GI NO: 30685347 NR Description: F-box protein family [Arabidopsis thaliana]
  misc_feature (1)..(164): NCBI GI NO: 34903372 NR Description: unnamed protein product
  misc_feature (1)..(162): NCBI GI NO: 30688559 NR Description: F-box protein family [Arabidopsis thaliana]
  misc_feature (1)..(78): NCBI GI NO: 15225802 NR Description: F-box protein family [Arabidopsis thaliana]
  misc_feature (104)..(164): NCBI GI NO: 15225802 NR Description: F-box protein family [Arabidopsis thaliana]
  misc_feature (1)..(100): NCBI GI NO: 7459607 NR Description: hypothetical protein At2g41170
  misc_feature (106)..(146): NCBI GI NO: 7459607 NR Description: hypothetical protein At2g41170
  misc_feature (1)..(79): NCBI GI NO: 7487431 NR Description: hypothetical protein At2g32560
  misc_feature (1)..(78): NCBI GI NO: 34909060 NR Description: P0702B09.33
  misc_feature (68)..(164): NCBI GI NO: 34909060 NR Description: P0702B09.33
MLSCYDAQLCYDSRSDTFLARYSPHGRWTTEENIQWDRLRVPPIATSPHALHISDCLDDLRPGDHIEIQWRRNKEFPYGWWYGVIGHLEQCQGHGNHCHCHYNDIVILEFTQYTAGSRWRQTVINRKHHIEKGNEIDGFYGGIRKLHSKEEIARWKNLWPTKIVIHD

SEQ ID NO: 7739 - DNA, 1051 bp, Glycine max
  misc_feature (1)..(1051): Ceres Seq. ID no. 13595667
  misc_feature (648)..(648): n is a, c, t, g, unknown, or other
ctctaggtttccaccgccgccgcctcccctctactcctcgctatcggccacgctccgcctcctttcctctgccccgcaactccgccgtcctccgcgccgccgcctcgccggacctccgccgccccgacctcccctcctcctcctccggagctacatagaggtttgattgagcgagatggggttgagggacaagaagaggaaccagaggcgcgtgctctcgcgccgctcggctggtcccaagaccggcgagggcaaggatttcctgccgctggaggggaaagagcagagggtccgggagaagaagcagcccgaggagccggagagcacggccaccgtcctctacatcggccatatcccccacggtttctacgaggaccagatgcaaggtttctttcagcagtttggggctgttaagagggtcagggttgcccggaaccgcaagacagggaagtctaagcattatggattcattgagttcgagaaccctgaggtggcgaagattgtggctgatgagatgaataactacctgttgtttgagcacactctgcagattgcgcctgtcccgccggagaaagttcatgccaaattatggaaaggtgtgcgtaagggatttataccagttgaccgatgtttaaacrcaataaagtntgaactggaggsggsttagtaaggataaaacagtggaagagcacaagaagatgctcgaaggaattgtaaagcgggatgagaagcgccgcaaaagaatcaaggctgctggtatcgattacgagtgtccagcccttatcggaagcgttcagccttcagctaagaagatcaagtttgatgaggattagctatagagaaggcagatggatctttctttatcgggtaggagtgacgggactctgctgagttaacctggctggtccattttagctggggatgagatggcgatttcgtactttggctttgtatctgtgtttggtcgatgttatgtaagttgaatgactggtttatgttggtgaagaagcataaagctgtggtggaaaattaatgaacttgctttctttcc

SEQ ID NO: 7740 - protein, 163 aa, Glycine max
  peptide (1)..(163): Ceres Seq. ID no. 15221635
  misc_feature (55)..(126): Pfam Name: a.k.a. RRM, RBD, or RNP domain Pfam Description: RNA recognition motif.
  misc_feature (1)..(150): NCBI GI NO: 18652180 NR Description: RNA binding protein [Elaeis oleifera]
  misc_feature (1)..(150): NCBI GI NO: 15238220 NR Description: RNA recognition motif (RRM)-containing protein
  misc_feature (41)..(146): NCBI GI NO: 40741317 NR Description: hypothetical protein AN4346.2
  misc_feature (27)..(146): NCBI GI NO: 27545352 NR Description: mki67
  misc_feature (28)..(157): NCBI GI NO: 20302745 NR Description: unknown [Branchiostoma floridae]
  misc_feature (33)..(141): NCBI GI NO: 19076051 NR Description: putative RNA-binding protein
  misc_feature (32)..(133): NCBI GI NO: 17945733 NR Description: RE32504p [Drosophila melanogaster]
  misc_feature (32)..(133): NCBI GI NO: 24649072 NR Description: CG6937-PA [Drosophila melanogaster]
  misc_feature (33)..(161): NCBI GI NO: 6324219 NR Description: Nucleolar protein 15; Nop15p
  misc_feature (37)..(140): NCBI GI NO: 13699902 NR Description: nucleolar phosphoprotein Nopp34 [Homo sapiens]
  misc_feature (155)..(155): Xaa is any aa, unknown or other
  misc_feature (158)..(158): Xaa is any aa, unknown or other
  misc_feature (162)..(162): Xaa is any aa, unknown or other
  misc_feature (163)..(163): Xaa is any aa, unknown or other
MGLRDKKRNQRRVLSRRSAGPKTGEGKDFLPLEGKEQRVREKKQPEEPESTATVLYIGHIPHGFYEDQMQGFFQQFGAVKRVRVARNRKTGKSKHYGFIEFENPEVAKIVADEMNNYLLFEHTLQIAPVPPEKVHAKLWKGVRKGFIPVDRCLNXIKXELEXX

SEQ ID NO: 7741 - protein, 95 aa, Glycine max
  peptide (1)..(95): Ceres Seq. ID no. 15221636
  misc_feature (1)..(58): Pfam Name: a.k.a. RRM, RBD, or RNP domain Pfam Description: RNA recognition motif.
  misc_feature (1)..(82): NCBI GI NO: 18652180 NR Description: RNA binding protein [Elaeis oleifera]
  misc_feature (1)..(82): NCBI GI NO: 15238220 NR Description: RNA recognition motif (RRM)-containing protein
  misc_feature (1)..(78): NCBI GI NO: 40741317 NR Description: hypothetical protein AN4346.2
  misc_feature (1)..(78): NCBI GI NO: 27545352 NR Description: mki67
  misc_feature (1)..(89): NCBI GI NO: 20302745 NR Description: unknown [Branchiostoma floridae]
  misc_feature (1)..(73): NCBI GI NO: 19076051 NR Description: putative RNA-binding protein
  misc_feature (1)..(65): NCBI GI NO: 17945733 NR Description: RE32504p [Drosophila melanogaster]
  misc_feature (1)..(65): NCBI GI NO: 24649072 NR Description: CG6937-PA [Drosophila melanogaster]
  misc_feature (1)..(93): NCBI GI NO: 6324219 NR Description: Nucleolar protein 15; Nop15p
  misc_feature (1)..(72): NCBI GI NO: 13699902 NR Description: nucleolar phosphoprotein Nopp34 [Homo sapiens]
  misc_feature (87)..(87): Xaa is any aa, unknown or other
  misc_feature (90)..(90): Xaa is any aa, unknown or other
  misc_feature (94)..(94): Xaa is any aa, unknown or other
  misc_feature (95)..(95): Xaa is any aa, unknown or other
MQGFFQQFGAVKRVRVARNRKTGKSKHYGFIEFENPEVAKIVADEMNNYLLFEHTLQIAPVPPEKVHAKLWKGVRKGFIPVDRCLNXIKXELEXX

SEQ ID NO: 7742 - DNA, 1514 bp, Glycine max
  misc_feature (1)..(1514): Ceres Seq. ID no. 12612425
acccttgagcctttaagcagagaaagcaaaagaaggcaagaagctgagagttttgagttttgagatttgactcacgagaggagagtaatgtgtgggaagtagaagtagaagtagaaggagagaagcaccactacgtcagcgattcctttgcctttttcttctttcttagactcgaagacaagtttgatcctattttgagaatcgcattcagatggaaagcgcatcagagcttgtggaattcccgttgttgctgacaccaatcgattccaactacagagcttgcaccattccttacagattcccctccgataaccctcgcaagcccactcccaccgaaatctcttggattgatctcttcctcaactcaatcccctctttcaagaagcgtgcagagagtgatacttctgttcctgatgctgcagctaaagctgaaaaatttgctcaaagatatgctgatatacttgaagatttgaagaaagatcctgaaagtcatggtgggcctcctgattgcattcttctctgcagacttcgtgaacttgtgcttagagaattgggattcagagatatcttcaaaaaagtcaaggatgaagaaaatgcaaaagccatctcactgtttgagaatgttgttcatcttaatgatgccattgaagatgaaggcaagcgacttgagaatctagttagaggaatttttgctggaaacatatttgatcttggttctgcacagcttgcagaggttttctctaaggatggaatgtcctttttggctagttgtcaaaatctcgttcctcgaccttgggtcattgatgatcttgacactttcaaattgaaatggagcaagaacccatggaagaaggttatcatatttgttgataactctggtgcagatatcattttgggtattatgccatttgcaagagaactacttcggcgtgggagtcaggttgtattggctgctaatgacttaccatccatcaatgatgtgacttgttctgagctagttgaaattatatcaaagttaaaggatgaagatggacagcttgtgggtgtcagtacttcaaatctcttaattgcgaactctggcaatgatttacctgtcattgatcttacaagagtgtcacaggagcttgcttaccttgccagcgatgcagatcttgtcatcttagaagggatgggtcgtggaatagaaacaaatctctatgctcaatttaaatgtgattctcttaagattggaatggtgaaacatcccgaggtagcacaatttctcggtggacgtttgtatgactgtgtattcaaatacaatgaagtttcaagttagctatgaagttatattcttttcctactaatgctgcagacctgcaatttttctactgttaatccttcatcttgatacaccattacatgcctgtagtttggatactctttaaaatgtcattttagtattataaaggtgataaaaccaaaacatcttacttgtaataagaagttattctacatacatgacttggtctctctct

SEQ ID NO: 7743 - protein, 367 aa, Glycine max
  peptide (1)..(367): Ceres Seq. ID no. 12612426
  misc_feature (37)..(362): Pfam Name: Pfam Description:  Protein of unknown function DUF89
  misc_feature (1)..(365): NCBI GI NO: 21554145 NR Description: unknown [Arabidopsis thaliana]
  misc_feature (1)..(365): NCBI GI NO: 18418688 NR Description: putative protein; protein id: At4g35360
  misc_feature (1)..(367): NCBI GI NO: 18398388 NR Description: expressed protein; protein id: At2g17340
  misc_feature (1)..(367): NCBI GI NO: 21554574 NR Description: unknown [Arabidopsis thaliana]
  misc_feature (7)..(173): NCBI GI NO: 15227811 NR Description: unknown protein; protein id: At2g17320.1
  misc_feature (264)..(367): NCBI GI NO: 15227811 NR Description: unknown protein; protein id: At2g17320.1
  misc_feature (164)..(215): NCBI GI NO: 15227811 NR Description: unknown protein; protein id: At2g17320.1
  misc_feature (1)..(167): NCBI GI NO: 25370535 NR Description: hypothetical protein At2g17340
  misc_feature (243)..(367): NCBI GI NO: 25370535 NR Description: hypothetical protein At2g17340
  misc_feature (7)..(171): NCBI GI NO: 7486028 NR Description: hypothetical protein F23E12
MESASELVEFPLLLTPIDSNYRACTIPYRFPSDNPRKPTPTEISWIDLFLNSIPSFKKRAESDTSVPDAAAKAEKFAQRYADILEDLKKDPESHGGPPDCILLCRLRELVLRELGFRDIFKKVKDEENAKAISLFENVVHLNDAIEDEGKRLENLVRGIFAGNIFDLGSAQLAEVFSKDGMSFLASCQNLVPRPWVIDDLDTFKLKWSKNPWKKVIIFVDNSGADIILGIMPFARELLRRGSQVVLAANDLPSINDVTCSELVEIISKLKDEDGQLVGVSTSNLLIANSGNDLPVIDLTRVSQELAYLASDADLVILEGMGRGIETNLYAQFKCDSLKIGMVKHPEVAQFLGGRLYDCVFKYNEVSS

SEQ ID NO: 7744 - protein, 187 aa, Glycine max
  peptide (1)..(187): Ceres Seq. ID no. 12612427
  misc_feature (1)..(182): Pfam Name: Pfam Description:  Protein of unknown function DUF89
  misc_feature (1)..(185): NCBI GI NO: 21554145 NR Description: unknown [Arabidopsis thaliana]
  misc_feature (1)..(185): NCBI GI NO: 18418688 NR Description: putative protein; protein id: At4g35360
  misc_feature (1)..(187): NCBI GI NO: 18398388 NR Description: expressed protein; protein id: At2g17340
  misc_feature (1)..(187): NCBI GI NO: 21554574 NR Description: unknown [Arabidopsis thaliana]
  misc_feature (84)..(187): NCBI GI NO: 15227811 NR Description: unknown protein; protein id: At2g17320.1
  misc_feature (1)..(35): NCBI GI NO: 15227811 NR Description: unknown protein; protein id: At2g17320.1
  misc_feature (63)..(187): NCBI GI NO: 25370535 NR Description: hypothetical protein At2g17340
  misc_feature (1)..(158): NCBI GI NO: 7486028 NR Description: hypothetical protein F23E12
  misc_feature (1)..(182): NCBI GI NO: 8922665 NR Description: pantothenate kinase 4; pantothenic acid kinase
  misc_feature (1)..(87): NCBI GI NO: 33112586 NR Description: Probable pantothenate kinase 1
MSFLASCQNLVPRPWVIDDLDTFKLKWSKNPWKKVIIFVDNSGADIILGIMPFARELLRRGSQVVLAANDLPSINDVTCSELVEIISKLKDEDGQLVGVSTSNLLIANSGNDLPVIDLTRVSQELAYLASDADLVILEGMGRGIETNLYAQFKCDSLKIGMVKHPEVAQFLGGRLYDCVFKYNEVSS

SEQ ID NO: 7745 - DNA, 1572 bp, Glycine max
  misc_feature (1)..(1572): Ceres Seq. ID no. 13582332
gaacacaagacaacaacaacaaatcttaagttggctttcttctcttttgttcgaccgtgtcacgtgcgagaacaatgagaattgccattttccactccctatctaaacctttgaatcttattcgattcaatttcatcacaacttaaataccatcgcatgttcattcattgatggtcatgttcttcccttaaaccttcctcaaaaagtcaaaattgaaaacctttctctctcttaactccttctcgtcatcgccccaaagcttctcaacaacatgacggataatgaagaaccgatgatcgtacctggatcgatgtctgaattagcgtttaataaatataagcgatggcaatggtggtgtcttgtgacactcagcatagcctttcttatagttggccaatctgctgctgttatccttggaagattttattatgatcagggtggaaatagtaaatggatggctactctagttcaaactgctgccttcccgatcttgttcattccattatttacaattccttcacctccagaggcttcaacttctgcttcacctcccatcaaaattattcttttgatatattttggtcttggagtcttaattgctgctgacaatatgatgtactccactggactcttatacctctcggcttctacctattcgctgatttgtgcatcacagttagcttttaatgcagttttctcatattttatcaattctcaaaagttcactgccttgattataaactctacagtggttctcactttatctgctgcactccttgctgttaacgaagacacagatgaaccatctggtttctccaagggaaagtacattattggtttcctatgtacccttggagcttctgcagtgtactctcttttgctttccctcatgcagctgacctttgagaaggttctgaagaaggaaacattttctgttgttttggaaatgcaaatctacacatcattcgttgcctctggtgcttctgtcataggcctatttgcaagtggggaatggcgtactttgcatggagaaatggagggttttcagaaaggatatgttgcttatgttatgactttggtttggacttcaatagcctggcaggtatgctctgttggtgttgttggcttgatcttcctagtgtcttctctctactccaatgttataagcacagtttctttagccgtaactcctattgctgctgttatagtttttcatgataagatgaatggggtgaagataatttctatgcttttggctctatggggttttgcctcttatatttatcagaattatcttgatgattcaaagacaagacatgcacaagctgctactaagtcccaaaatgattcttcatgttgagaatattcaatttggtcatacctttgtcgaagtttccttttttctttttagatttaaatccttcagtacaccattcgctagctttagattttatttttccttcagtctcactgaacttgtgaggtagtatagttatgaagttattggtcattctagattattgctctctcatttaagaaatgaaaagtttattggtgtctcggactggttgg

SEQ ID NO: 7746 - protein, 362 aa, Glycine max
  peptide (1)..(362): Ceres Seq. ID no. 13582333
  misc_feature (172)..(351): Pfam Name: Pfam Description:  Domain of unknown function, DUF250
  misc_feature (1)..(362): NCBI GI NO: 15219436 NR Description: purine permease family [Arabidopsis thaliana]
  misc_feature (23)..(357): NCBI GI NO: 38344290 NR Description: OSJNBa0013K16.22
  misc_feature (23)..(359): NCBI GI NO: 38605752 NR Description: OSJNBb0016D16.5
  misc_feature (21)..(353): NCBI GI NO: 18413147 NR Description: purine permease family [Arabidopsis thaliana]
  misc_feature (21)..(353): NCBI GI NO: 25407443 NR Description: hypothetical protein AT4g08700
  misc_feature (21)..(353): NCBI GI NO: 15237573 NR Description: purine permease-related [Arabidopsis thaliana]
  misc_feature (1)..(362): NCBI GI NO: 30684325 NR Description: purine permease family [Arabidopsis thaliana]
  misc_feature (23)..(361): NCBI GI NO: 38605752 NR Description: OSJNBb0016D16.5
  misc_feature (23)..(361): NCBI GI NO: 38344291 NR Description: OSJNBa0013K16.23
  misc_feature (39)..(348): NCBI GI NO: 15236799 NR Description: purine permease family [Arabidopsis thaliana]
MTDNEEPMIVPGSMSELAFNKYKRWQWWCLVTLSIAFLIVGQSAAVILGRFYYDQGGNSKWMATLVQTAAFPILFIPLFTIPSPPEASTSASPPIKIILLIYFGLGVLIAADNMMYSTGLLYLSASTYSLICASQLAFNAVFSYFINSQKFTALIINSTVVLTLSAALLAVNEDTDEPSGFSKGKYIIGFLCTLGASAVYSLLLSLMQLTFEKVLKKETFSVVLEMQIYTSFVASGASVIGLFASGEWRTLHGEMEGFQKGYVAYVMTLVWTSIAWQVCSVGVVGLIFLVSSLYSNVISTVSLAVTPIAAVIVFHDKMNGVKIISMLLALWGFASYIYQNYLDDSKTRHAQAATKSQNDSSC

SEQ ID NO: 7747 - protein, 355 aa, Glycine max
  peptide (1)..(355): Ceres Seq. ID no. 13582334
  misc_feature (165)..(344): Pfam Name: Pfam Description:  Domain of unknown function, DUF250
  misc_feature (1)..(355): NCBI GI NO: 15219436 NR Description: purine permease family [Arabidopsis thaliana]
  misc_feature (16)..(350): NCBI GI NO: 38344290 NR Description: OSJNBa0013K16.22
  misc_feature (16)..(352): NCBI GI NO: 38605752 NR Description: OSJNBb0016D16.5
  misc_feature (14)..(346): NCBI GI NO: 18413147 NR Description: purine permease family [Arabidopsis thaliana]
  misc_feature (14)..(346): NCBI GI NO: 25407443 NR Description: hypothetical protein AT4g08700
  misc_feature (14)..(346): NCBI GI NO: 15237573 NR Description: purine permease-related [Arabidopsis thaliana]
  misc_feature (1)..(355): NCBI GI NO: 30684325 NR Description: purine permease family [Arabidopsis thaliana]
  misc_feature (16)..(354): NCBI GI NO: 38605752 NR Description: OSJNBb0016D16.5
  misc_feature (16)..(354): NCBI GI NO: 38344291 NR Description: OSJNBa0013K16.23
  misc_feature (32)..(341): NCBI GI NO: 15236799 NR Description: purine permease family [Arabidopsis thaliana]
MIVPGSMSELAFNKYKRWQWWCLVTLSIAFLIVGQSAAVILGRFYYDQGGNSKWMATLVQTAAFPILFIPLFTIPSPPEASTSASPPIKIILLIYFGLGVLIAADNMMYSTGLLYLSASTYSLICASQLAFNAVFSYFINSQKFTALIINSTVVLTLSAALLAVNEDTDEPSGFSKGKYIIGFLCTLGASAVYSLLLSLMQLTFEKVLKKETFSVVLEMQIYTSFVASGASVIGLFASGEWRTLHGEMEGFQKGYVAYVMTLVWTSIAWQVCSVGVVGLIFLVSSLYSNVISTVSLAVTPIAAVIVFHDKMNGVKIISMLLALWGFASYIYQNYLDDSKTRHAQAATKSQNDSSC

SEQ ID NO: 7748 - protein, 349 aa, Glycine max
  peptide (1)..(349): Ceres Seq. ID no. 13582335
  misc_feature (159)..(338): Pfam Name: Pfam Description:  Domain of unknown function, DUF250
  misc_feature (1)..(349): NCBI GI NO: 15219436 NR Description: purine permease family [Arabidopsis thaliana]
  misc_feature (10)..(344): NCBI GI NO: 38344290 NR Description: OSJNBa0013K16.22
  misc_feature (10)..(346): NCBI GI NO: 38605752 NR Description: OSJNBb0016D16.5
  misc_feature (8)..(340): NCBI GI NO: 18413147 NR Description: purine permease family [Arabidopsis thaliana]
  misc_feature (8)..(340): NCBI GI NO: 25407443 NR Description: hypothetical protein AT4g08700
  misc_feature (8)..(340): NCBI GI NO: 15237573 NR Description: purine permease-related [Arabidopsis thaliana]
  misc_feature (1)..(349): NCBI GI NO: 30684325 NR Description: purine permease family [Arabidopsis thaliana]
  misc_feature (10)..(348): NCBI GI NO: 38605752 NR Description: OSJNBb0016D16.5
  misc_feature (10)..(348): NCBI GI NO: 38344291 NR Description: OSJNBa0013K16.23
  misc_feature (26)..(335): NCBI GI NO: 15236799 NR Description: purine permease family [Arabidopsis thaliana]
MSELAFNKYKRWQWWCLVTLSIAFLIVGQSAAVILGRFYYDQGGNSKWMATLVQTAAFPILFIPLFTIPSPPEASTSASPPIKIILLIYFGLGVLIAADNMMYSTGLLYLSASTYSLICASQLAFNAVFSYFINSQKFTALIINSTVVLTLSAALLAVNEDTDEPSGFSKGKYIIGFLCTLGASAVYSLLLSLMQLTFEKVLKKETFSVVLEMQIYTSFVASGASVIGLFASGEWRTLHGEMEGFQKGYVAYVMTLVWTSIAWQVCSVGVVGLIFLVSSLYSNVISTVSLAVTPIAAVIVFHDKMNGVKIISMLLALWGFASYIYQNYLDDSKTRHAQAATKSQNDSSC

SEQ ID NO: 7749 - DNA, 1076 bp, Glycine max
  misc_feature (1)..(1076): Ceres Seq. ID no. 13595668
atctctcccccacgttttccacccaccagacactcccacggctgccggcaatggcggcggcggcggagcaggactactggggcctgttccgggaggagacgggctggtacaacgagatcttcctcagcgccgtcgtgccgggcggcggcggctggtggcgggcgctgccgcacccgctccgctcctggctgcgcaactgcatcggcggctacctcctctacttcgccaccggcttcctctggtgcttcgtcatctactactggaagcgcaacgcctacatccccaaagatgctgtccctacagtagaagctatgaagaagcaaataattgttgcatcaaaggctatgccgttctactgtgctcttccgtccatatctgagcacatgattgagagtggatggacacggtgtttttttcatatcagtgaagttggttggcctatgtacattgtctatgtgtctctatatctcatctttgtggagttcggaatttactggatgcacagagagttgcatgacataaagccactatacaagcacctacatgcaacccaccacatttacaacaaggagaataccctatcaccatttgctggactagcattccatccattggacgggatactgcaagccatatcgcacgtgattgctctgttccttctgccgatgcacttcaggacgcacattgctctgttattcatagaggcggtgtggacggccaacatccatgactgcatccacggcaagatctggccagtgatgggtgccggctaccacaccatccaccacacgacgtaccggcacaactatggccactacaccgtgtggatggactggctgtttggcaccctccgcgagccggaggatctcctcaagaaggactgagctcgtgtgagcgcggtctttcctgtctctgtagcaatgtgaagtgtagtagaagtgttaaggcttaaccctccatctgttctcttattctgctgaaagatgtttgttgtggtgtttacgacagttagcggtgtgctgtttcagtctccgtccggtaggtggaaataataaggttgttcatttaccagacat

SEQ ID NO: 7750 - protein, 293 aa, Glycine max
  peptide (1)..(293): Ceres Seq. ID no. 13595669
  misc_feature (24)..(197): NCBI GI NO: 34895618 NR Description: putative sterol-C5(6)-desaturase
  misc_feature (232)..(293): NCBI GI NO: 34895618 NR Description: putative sterol-C5(6)-desaturase
  misc_feature (24)..(292): NCBI GI NO: 4426627 NR Description: sterol-C5(6)-desaturase homolog
  misc_feature (23)..(292): NCBI GI NO: 33301670 NR Description: Delta-7-sterol-C5
  misc_feature (20)..(293): NCBI GI NO: 5031219 NR Description: delta7 sterol C-5 desaturase
  misc_feature (20)..(293): NCBI GI NO: 15232935 NR Description: delta 7-sterol-C5-desaturase (STE1)
  misc_feature (20)..(293): NCBI GI NO: 21594971 NR Description: sterol-C5-desaturase [Arabidopsis thaliana]
  misc_feature (20)..(293): NCBI GI NO: 2129741 NR Description: C-5 sterol desaturase (EC 1
  misc_feature (19)..(293): NCBI GI NO: 15232937 NR Description: delta 7-sterol-C5-desaturase, putative
  misc_feature (67)..(286): NCBI GI NO: 25742651 NR Description: sterol-C5-desaturase
LSPTFSTHQTLPRLPAMAAAAEQDYWGLFREETGWYNEIFLSAVVPGGGGWWRALPHPLRSWLRNCIGGYLLYFATGFLWCFVIYYWKRNAYIPKDAVPTVEAMKKQIIVASKAMPFYCALPSISEHMIESGWTRCFFHISEVGWPMYIVYVSLYLIFVEFGIYWMHRELHDIKPLYKHLHATHHIYNKENTLSPFAGLAFHPLDGILQAISHVIALFLLPMHFRTHIALLFIEAVWTANIHDCIHGKIWPVMGAGYHTIHHTTYRHNYGHYTVWMDWLFGTLREPEDLLKKD

SEQ ID NO: 7751 - protein, 277 aa, Glycine max
  peptide (1)..(277): Ceres Seq. ID no. 13595670
  misc_feature (8)..(181): NCBI GI NO: 34895618 NR Description: putative sterol-C5(6)-desaturase
  misc_feature (216)..(277): NCBI GI NO: 34895618 NR Description: putative sterol-C5(6)-desaturase
  misc_feature (8)..(276): NCBI GI NO: 4426627 NR Description: sterol-C5(6)-desaturase homolog
  misc_feature (7)..(276): NCBI GI NO: 33301670 NR Description: Delta-7-sterol-C5
  misc_feature (4)..(277): NCBI GI NO: 5031219 NR Description: delta7 sterol C-5 desaturase
  misc_feature (4)..(277): NCBI GI NO: 15232935 NR Description: delta 7-sterol-C5-desaturase (STE1)
  misc_feature (4)..(277): NCBI GI NO: 21594971 NR Description: sterol-C5-desaturase [Arabidopsis thaliana]
  misc_feature (4)..(277): NCBI GI NO: 2129741 NR Description: C-5 sterol desaturase (EC 1
  misc_feature (3)..(277): NCBI GI NO: 15232937 NR Description: delta 7-sterol-C5-desaturase, putative
  misc_feature (51)..(270): NCBI GI NO: 25742651 NR Description: sterol-C5-desaturase
MAAAAEQDYWGLFREETGWYNEIFLSAVVPGGGGWWRALPHPLRSWLRNCIGGYLLYFATGFLWCFVIYYWKRNAYIPKDAVPTVEAMKKQIIVASKAMPFYCALPSISEHMIESGWTRCFFHISEVGWPMYIVYVSLYLIFVEFGIYWMHRELHDIKPLYKHLHATHHIYNKENTLSPFAGLAFHPLDGILQAISHVIALFLLPMHFRTHIALLFIEAVWTANIHDCIHGKIWPVMGAGYHTIHHTTYRHNYGHYTVWMDWLFGTLREPEDLLKKD

SEQ ID NO: 7752 - protein, 190 aa, Glycine max
  peptide (1)..(190): Ceres Seq. ID no. 13595671
  misc_feature (1)..(94): NCBI GI NO: 34895618 NR Description: putative sterol-C5(6)-desaturase
  misc_feature (129)..(190): NCBI GI NO: 34895618 NR Description: putative sterol-C5(6)-desaturase
  misc_feature (1)..(189): NCBI GI NO: 4426627 NR Description: sterol-C5(6)-desaturase homolog
  misc_feature (1)..(189): NCBI GI NO: 33301670 NR Description: Delta-7-sterol-C5
  misc_feature (1)..(190): NCBI GI NO: 5031219 NR Description: delta7 sterol C-5 desaturase
  misc_feature (1)..(190): NCBI GI NO: 15232935 NR Description: delta 7-sterol-C5-desaturase (STE1)
  misc_feature (1)..(190): NCBI GI NO: 21594971 NR Description: sterol-C5-desaturase [Arabidopsis thaliana]
  misc_feature (1)..(190): NCBI GI NO: 2129741 NR Description: C-5 sterol desaturase (EC 1
  misc_feature (1)..(190): NCBI GI NO: 15232937 NR Description: delta 7-sterol-C5-desaturase, putative
  misc_feature (1)..(183): NCBI GI NO: 25742651 NR Description: sterol-C5-desaturase
MKKQIIVASKAMPFYCALPSISEHMIESGWTRCFFHISEVGWPMYIVYVSLYLIFVEFGIYWMHRELHDIKPLYKHLHATHHIYNKENTLSPFAGLAFHPLDGILQAISHVIALFLLPMHFRTHIALLFIEAVWTANIHDCIHGKIWPVMGAGYHTIHHTTYRHNYGHYTVWMDWLFGTLREPEDLLKKD

SEQ ID NO: 7753 - DNA, 1193 bp, Glycine max
  misc_feature (1)..(1193): Ceres Seq. ID no. 13582317
aactcttgccactgcttttatctatcttctccatcggcaacaccttgcggaagataaaaaggatcgattcttcaatcaagaccagaaaaaaaaaagagcacgtacgtcacgttagactctgtatatcctgtgctgtgtcccattcggtacgcaagcctcaaaatatacatactccttcattttttcttcttctctttatggcggaaatccccaagttggatttgtcatcttcttgttttgacaatggagagcctttggattcggaacagaagagccagaaaatttttgtttcggatcacataaacgcatttcaatacgcagacgagaaagccgatagctttgtgattgacatggatgccttctcttccggccacaacaaagatgccaccaatgctaattcgagaattacgttgcagaggagtctttccaggaagggatctcagcgtctgggtgactggaagctgaataacaatgctacactttatgataaggataccgttcccgccatatgctctccaaaaggtacacttgttgggcctttcacgcccgaaaagccagcggggatggcagtagggcccatgggtcattccatgaacccacacgtccataatctaacagccgacaacatccccacagagagcaaatgtagtataactcggagaaatagttttagacgaccttcttcatgggccattgatcctaaaagggttctccttttctttgccaccttgtcaagcatgggaacaatgttgctgatatacttcactctgacaatcagtaagcaaagtgcagaagaatatggagggtgattggaagcattgactgaaggttttggattatgataacaaaaaaagaaaagaaaaaggacatgcattaattctggagcaaaacttacaagttaattagaagaagacaaccctgcagcaggagtagcaaagcaaaagctaaccaaatttccgccagcctgatgtcaaaatcagttaaaatcatctctttggcaactgcaagaggtaaatacaaagacacaatgtagtactatgacagagatcaggaagaaatcttccattatgtttttttttttttcatgtaaatggaagaaaaacaaacgatcacatggaggacattgccctttagtttatatgttgcgtgatcgcagggtttagtggaggatggatcataaatcaccttttgcc

SEQ ID NO: 7754 - protein, 268 aa, Glycine max
  peptide (1)..(268): Ceres Seq. ID no. 13582318
  misc_feature (108)..(264): NCBI GI NO: 38345628 NR Description: OSJNBb0004A17.8
  misc_feature (224)..(268): NCBI GI NO: 27261034 NR Description: P0681F05.22
LLPLLLSIFSIGNTLRKIKRIDSSIKTRKKKEHVRHVRLCISCAVSHSVRKPQNIHTPSFFLLLFMAEIPKLDLSSSCFDNGEPLDSEQKSQKIFVSDHINAFQYADEKADSFVIDMDAFSSGHNKDATNANSRITLQRSLSRKGSQRLGDWKLNNNATLYDKDTVPAICSPKGTLVGPFTPEKPAGMAVGPMGHSMNPHVHNLTADNIPTESKCSITRRNSFRRPSSWAIDPKRVLLFFATLSSMGTMLLIYFTLTISKQSAEEYGG

SEQ ID NO: 7755 - protein, 203 aa, Glycine max
  peptide (1)..(203): Ceres Seq. ID no. 13582319
  misc_feature (43)..(199): NCBI GI NO: 38345628 NR Description: OSJNBb0004A17.8
  misc_feature (159)..(203): NCBI GI NO: 27261034 NR Description: P0681F05.22
MAEIPKLDLSSSCFDNGEPLDSEQKSQKIFVSDHINAFQYADEKADSFVIDMDAFSSGHNKDATNANSRITLQRSLSRKGSQRLGDWKLNNNATLYDKDTVPAICSPKGTLVGPFTPEKPAGMAVGPMGHSMNPHVHNLTADNIPTESKCSITRRNSFRRPSSWAIDPKRVLLFFATLSSMGTMLLIYFTLTISKQSAEEYGG

SEQ ID NO: 7756 - protein, 152 aa, Glycine max
  peptide (1)..(152): Ceres Seq. ID no. 13582320
  misc_feature (1)..(148): NCBI GI NO: 38345628 NR Description: OSJNBb0004A17.8
  misc_feature (108)..(152): NCBI GI NO: 27261034 NR Description: P0681F05.22
MDAFSSGHNKDATNANSRITLQRSLSRKGSQRLGDWKLNNNATLYDKDTVPAICSPKGTLVGPFTPEKPAGMAVGPMGHSMNPHVHNLTADNIPTESKCSITRRNSFRRPSSWAIDPKRVLLFFATLSSMGTMLLIYFTLTISKQSAEEYGG

SEQ ID NO: 7757 - DNA, 695 bp, Glycine max
  misc_feature (1)..(695): Ceres Seq. ID no. 12611808
gccacacacacgcacacacaccagattcatcaagaaaacctcgagaggatcatggccggcgtgaacaccagtgtggtcggcctcaagcccgccgcggcggtgccgcagtccgcctcgccggcggcggcaaagcgcgtgcaggtcgccccggccaaggaccggcggtcggcgcttctcggcctggcggccgtcttcgccgtcacggccgcctccgccgggtcggccagggcaagcgtcttcgacgagtacctcgagaagagcaagctcaacaaggagctgaacgacaagaagagggcggcgacgagcggcgccaacttcgcgcgcgcctacaccgtccagttcggcagctgcaagttcccctacaacttcaccggctgccaggacctcgccaagcagaagaaagtcccgttcatcaccgacgacctggagatcgagtgcgaggggaaggagaagttcaagtgcggatccaacgtcttctggaaatggtgaagctggtcgatctgccaggcaatatggcgagtgctgatgtatgtcagcgcaccgcgtgtacctagatgtccaaactgcgcaagtgtttcgactgtgaagttatcgtcgctgtaattttatcatcatcaagtggaattctgttttcacctggatatggatatatgcatgttagcatgtatcttgtcacatccagaacgcgaacattc

SEQ ID NO: 7758 - protein, 183 aa, Glycine max
  peptide (1)..(183): Ceres Seq. ID no. 12611809
HTHAHTPDSSRKPREDHGRREHQCGRPQARRGGAAVRLAGGGKARAGRPGQGPAVGASRPGGRLRRHGRLRRVGQGKRLRRVPREEQAQQGAERQEEGGDERRQLRARLHRPVRQLQVPLQLHRLPGPRQAEESPVHHRRPGDRVRGEGEVQVRIQRLLEMVKLVDLPGNMASADVCQRTACT

SEQ ID NO: 7759 - protein, 162 aa, Glycine max
  peptide (1)..(162): Ceres Seq. ID no. 12611810
  misc_feature (25)..(162): Pfam Name: PSAN or PSI-N Pfam Description: Photosystem I reaction centre subunit N
  misc_feature (18)..(162): NCBI GI NO: 400879 NR Description: Photosystem I reaction centre subunit N
  misc_feature (21)..(162): NCBI GI NO: 28629385 NR Description: photosystem I-N subunit [Phaseolus vulgaris]
  misc_feature (71)..(162): NCBI GI NO: 3914466 NR Description: Photosystem I reaction centre subunit N
  misc_feature (21)..(162): NCBI GI NO: 15237593 NR Description: photosystem I reaction center subunit PSI-Nprecursor
  misc_feature (26)..(156): NCBI GI NO: 11134150 NR Description: Photosystem I reaction centre subunit N
  misc_feature (36)..(156): NCBI GI NO: 12744797 NR Description: PsaN precursor [Chlamydomonas reinhardtii]
  misc_feature (79)..(127): NCBI GI NO: 485082 NR Description: photosystem I 9K protein - rice
ATHTHTHQIHQENLERIMAGVNTSVVGLKPAAAVPQSASPAAAKRVQVAPAKDRRSALLGLAAVFAVTAASAGSARASVFDEYLEKSKLNKELNDKKRAATSGANFARAYTVQFGSCKFPYNFTGCQDLAKQKKVPFITDDLEIECEGKEKFKCGSNVFWKW

SEQ ID NO: 7760 - protein, 145 aa, Glycine max
  peptide (1)..(145): Ceres Seq. ID no. 12611811
  misc_feature (8)..(145): Pfam Name: PSAN or PSI-N Pfam Description: Photosystem I reaction centre subunit N
  misc_feature (1)..(145): NCBI GI NO: 400879 NR Description: Photosystem I reaction centre subunit N
  misc_feature (4)..(145): NCBI GI NO: 28629385 NR Description: photosystem I-N subunit [Phaseolus vulgaris]
  misc_feature (54)..(145): NCBI GI NO: 3914466 NR Description: Photosystem I reaction centre subunit N
  misc_feature (4)..(145): NCBI GI NO: 15237593 NR Description: photosystem I reaction center subunit PSI-Nprecursor
  misc_feature (9)..(139): NCBI GI NO: 11134150 NR Description: Photosystem I reaction centre subunit N
  misc_feature (19)..(139): NCBI GI NO: 12744797 NR Description: PsaN precursor [Chlamydomonas reinhardtii]
  misc_feature (62)..(110): NCBI GI NO: 485082 NR Description: photosystem I 9K protein - rice
MAGVNTSVVGLKPAAAVPQSASPAAAKRVQVAPAKDRRSALLGLAAVFAVTAASAGSARASVFDEYLEKSKLNKELNDKKRAATSGANFARAYTVQFGSCKFPYNFTGCQDLAKQKKVPFITDDLEIECEGKEKFKCGSNVFWKW

SEQ ID NO: 7761 - DNA, 752 bp, Glycine max
  misc_feature (1)..(752): Ceres Seq. ID no. 12611671
aatccaccaactgcattggaacacccttttctccttcaatggaaggtgaggaggggaaacagtcttcccaaaaaaacccttacgttgaactagaagaagttgactttgattttattctagcaatgagcatgcaagaacaagagagagagttcacaatgctttcaactattgaaagtgaaagtgatgaatatctaagtgactcctctatagataatgatgatgatggtgatcctgactttatagcgagtcaagagtttgaaaccgaccttcggtttcttgaaggtgaaggaagcgacgatgatgatgaagacatggaaatggaagaagatgagattgatccagacgaattatcttatgaagaattgatggagttggaagagtttataggagaagaaacaagagggttatcagcaaatgaaatctctttgtgcttgtacccttatacctgccaatgtgctgaaagcaaaagtggcattgatcgttgtgtgatttgtcaggttgaatatgaagaaggtgaagcactagtggcacttcaatgtgagcacccttatcattcagattgcataagaaagtggcttcaaattaagaaggtttgtccaatttgtggaaatgaagtttcaactcccaacttggcttcgaacccttagttatttagtttggattgaaaaattaatgtgtgtacactaattattgtaatctggatttgcatgaaactgtagttgagaaaataaacaaagcatggaagcttaacc

SEQ ID NO: 7762 - protein, 214 aa, Glycine max
  peptide (1)..(214): Ceres Seq. ID no. 12611672
  misc_feature (161)..(201): Pfam Name: RING finger Pfam Description: Zinc finger, C3HC4 type
  misc_feature (16)..(206): NCBI GI NO: 15232746 NR Description: zinc-finger protein-like protein
  misc_feature (88)..(213): NCBI GI NO: 10334499 NR Description: hypothetical protein [Cicer arietinum]
  misc_feature (95)..(207): NCBI GI NO: 21536693 NR Description: unknown [Arabidopsis thaliana]
  misc_feature (95)..(207): NCBI GI NO: 18402411 NR Description: expressed protein; protein id: At3g19910
  misc_feature (99)..(205): NCBI GI NO: 22331928 NR Description: putative protein; protein id: At3g63530.1
  misc_feature (108)..(205): NCBI GI NO: 38567912 NR Description: OSJNBa0088I22.8
  misc_feature (45)..(209): NCBI GI NO: 34898016 NR Description: ESTs C26000
  misc_feature (96)..(201): NCBI GI NO: 40253261 NR Description: DNA binding zinc finger protein-like
  misc_feature (97)..(208): NCBI GI NO: 15226553 NR Description: putative RING zinc finger protein
  misc_feature (95)..(201): NCBI GI NO: 11358785 NR Description: RING-H2 finger protein RHG1a
STNCIGTPFSPSMEGEEGKQSSQKNPYVELEEVDFDFILAMSMQEQEREFTMLSTIESESDEYLSDSSIDNDDDGDPDFIASQEFETDLRFLEGEGSDDDDEDMEMEEDEIDPDELSYEELMELEEFIGEETRGLSANEISLCLYPYTCQCAESKSGIDRCVICQVEYEEGEALVALQCEHPYHSDCIRKWLQIKKVCPICGNEVSTPNLASNP

SEQ ID NO: 7763 - protein, 202 aa, Glycine max
  peptide (1)..(202): Ceres Seq. ID no. 12611673
  misc_feature (149)..(189): Pfam Name: RING finger Pfam Description: Zinc finger, C3HC4 type
  misc_feature (4)..(194): NCBI GI NO: 15232746 NR Description: zinc-finger protein-like protein
  misc_feature (76)..(201): NCBI GI NO: 10334499 NR Description: hypothetical protein [Cicer arietinum]
  misc_feature (83)..(195): NCBI GI NO: 21536693 NR Description: unknown [Arabidopsis thaliana]
  misc_feature (83)..(195): NCBI GI NO: 18402411 NR Description: expressed protein; protein id: At3g19910
  misc_feature (87)..(193): NCBI GI NO: 22331928 NR Description: putative protein; protein id: At3g63530.1
  misc_feature (96)..(193): NCBI GI NO: 38567912 NR Description: OSJNBa0088I22.8
  misc_feature (33)..(197): NCBI GI NO: 34898016 NR Description: ESTs C26000
  misc_feature (84)..(189): NCBI GI NO: 40253261 NR Description: DNA binding zinc finger protein-like
  misc_feature (85)..(196): NCBI GI NO: 15226553 NR Description: putative RING zinc finger protein
  misc_feature (83)..(189): NCBI GI NO: 11358785 NR Description: RING-H2 finger protein RHG1a
MEGEEGKQSSQKNPYVELEEVDFDFILAMSMQEQEREFTMLSTIESESDEYLSDSSIDNDDDGDPDFIASQEFETDLRFLEGEGSDDDDEDMEMEEDEIDPDELSYEELMELEEFIGEETRGLSANEISLCLYPYTCQCAESKSGIDRCVICQVEYEEGEALVALQCEHPYHSDCIRKWLQIKKVCPICGNEVSTPNLASNP

SEQ ID NO: 7764 - protein, 174 aa, Glycine max
  peptide (1)..(174): Ceres Seq. ID no. 12611674
  misc_feature (121)..(161): Pfam Name: RING finger Pfam Description: Zinc finger, C3HC4 type
  misc_feature (1)..(166): NCBI GI NO: 15232746 NR Description: zinc-finger protein-like protein
  misc_feature (48)..(173): NCBI GI NO: 10334499 NR Description: hypothetical protein [Cicer arietinum]
  misc_feature (55)..(167): NCBI GI NO: 21536693 NR Description: unknown [Arabidopsis thaliana]
  misc_feature (55)..(167): NCBI GI NO: 18402411 NR Description: expressed protein; protein id: At3g19910
  misc_feature (59)..(165): NCBI GI NO: 22331928 NR Description: putative protein; protein id: At3g63530.1
  misc_feature (68)..(165): NCBI GI NO: 38567912 NR Description: OSJNBa0088I22.8
  misc_feature (5)..(169): NCBI GI NO: 34898016 NR Description: ESTs C26000
  misc_feature (56)..(161): NCBI GI NO: 40253261 NR Description: DNA binding zinc finger protein-like
  misc_feature (57)..(168): NCBI GI NO: 15226553 NR Description: putative RING zinc finger protein
  misc_feature (55)..(161): NCBI GI NO: 11358785 NR Description: RING-H2 finger protein RHG1a
MSMQEQEREFTMLSTIESESDEYLSDSSIDNDDDGDPDFIASQEFETDLRFLEGEGSDDDDEDMEMEEDEIDPDELSYEELMELEEFIGEETRGLSANEISLCLYPYTCQCAESKSGIDRCVICQVEYEEGEALVALQCEHPYHSDCIRKWLQIKKVCPICGNEVSTPNLASNP

SEQ ID NO: 7765 - DNA, 1378 bp, Glycine max
  misc_feature (1)..(1378): Ceres Seq. ID no. 13595651
agaacatcctaatcgaaaaaaaaagatttgtgatatctctctctcagtgacacccaaactcaaaacacactcaaacaatctctgttcactttaacaatggcggttttgttgcctccaacattctccccacttctactaaacaccaagacagattttgggtcaccaccatttcctcttctcaccctctcctcctcctcacccacctcctcacccctcttcgtctcttacaccaaatccggaaatgggttggccagtgaggacaaaaaaatcttgcttgagaagtatggctacgatattgatgctgatgagtacttttcacagtcatcttctaagtccaagaggagaaaggagcaaccaaggagaagaggagggaagcaagtgcaggacccaccagaggaccctaagcctcctcgtgtaacccataaattgcttcaggttcttggaggaacagctcgaagagtgaagctactttcaccaaagggcatggatgtgcgccccatgatggaagtggtgaaaggtgcagcctttgatatattacaggcagctggtggctgtcctgcagcattgagacctggtcgctggttagacttgtatagcggtacaggttctgttggaattgaagcacttagccgaggatgttctcaggtgcattttgttgagatggatccgtgggttgtatcagatgttttacgtccaaacctggaggaaactggattcctagatgcttcagtcatacatactgtccgtgtagaaaaattctttgagcgtgcagagcaatttgtaggaaacagtggcccatttgattacattagtgtcacccctccatatacacaagttgactatggggtgctgatgaggcagatatcagaatcatccttgattggagagaacacgtttattgtagttgagtatcctttaaaaactgacatgctggattcttgtggaagtcttgtaaagataaccgacagacggtttggacggacactcttggcaatttatggaccaacatggtcccagaagaagaggagatgacacattcaaatgcctaagttgcagtaaaggctgaaaaacatgctggtgcaatatttatctgttacagtggtcaacaggaattagtttttggcacctacctcacttcttcaaaagctgttatacacagtctaatgttggtccctgcaacaggtcatgtcttgtaatgttaatcataaaatcttgcattctttgttataatgtgacccatcttcagctgaaaattgattattaaatctagattaaggtttcattaccaacagtgttgatcacagtagaagtggattgtgattgtaggtgaactttatctaccatattagtgaaatcatcactctaatcattctatttc

SEQ ID NO: 7766 - protein, 311 aa, Glycine max
  peptide (1)..(311): Ceres Seq. ID no. 15221630
  misc_feature (112)..(302): Pfam Name: Pfam Description:  Conserved hypothetical protein 95
  misc_feature (1)..(311): NCBI GI NO: 22331389 NR Description: expressed protein [Arabidopsis thaliana]
  misc_feature (22)..(311): NCBI GI NO: 29788862 NR Description: hypothetical protein
  misc_feature (112)..(301): NCBI GI NO: 39996346 NR Description: methyltransferase, putative
  misc_feature (110)..(301): NCBI GI NO: 20807931 NR Description: N6-adenine-specific methylase
  misc_feature (112)..(301): NCBI GI NO: 28210920 NR Description: methyltransferase [Clostridium tetani E88]
  misc_feature (112)..(301): NCBI GI NO: 15895014 NR Description: N6-adenine-specific methylase
  misc_feature (112)..(301): NCBI GI NO: 34763572 NR Description: METHYLTRANSFERASE
  misc_feature (112)..(301): NCBI GI NO: 19704664 NR Description: Methyltransferase
  misc_feature (135)..(301): NCBI GI NO: 22973536 NR Description: hypothetical protein [Chloroflexus aurantiacus]
  misc_feature (112)..(301): NCBI GI NO: 18310712 NR Description: conserved hypothetical protein
MAVLLPPTFSPLLLNTKTDFGSPPFPLLTLSSSSPTSSPLFVSYTKSGNGLASEDKKILLEKYGYDIDADEYFSQSSSKSKRRKEQPRRRGGKQVQDPPEDPKPPRVTHKLLQVLGGTARRVKLLSPKGMDVRPMMEVVKGAAFDILQAAGGCPAALRPGRWLDLYSGTGSVGIEALSRGCSQVHFVEMDPWVVSDVLRPNLEETGFLDASVIHTVRVEKFFERAEQFVGNSGPFDYISVTPPYTQVDYGVLMRQISESSLIGENTFIVVEYPLKTDMLDSCGSLVKITDRRFGRTLLAIYGPTWSQKKRR

SEQ ID NO: 7767 - protein, 182 aa, Glycine max
  peptide (1)..(182): Ceres Seq. ID no. 15221631
  misc_feature (1)..(173): Pfam Name: Pfam Description:  Conserved hypothetical protein 95
  misc_feature (1)..(182): NCBI GI NO: 22331389 NR Description: expressed protein [Arabidopsis thaliana]
  misc_feature (1)..(182): NCBI GI NO: 29788862 NR Description: hypothetical protein
  misc_feature (1)..(172): NCBI GI NO: 39996346 NR Description: methyltransferase, putative
  misc_feature (1)..(172): NCBI GI NO: 20807931 NR Description: N6-adenine-specific methylase
  misc_feature (1)..(172): NCBI GI NO: 28210920 NR Description: methyltransferase [Clostridium tetani E88]
  misc_feature (1)..(172): NCBI GI NO: 15895014 NR Description: N6-adenine-specific methylase
  misc_feature (1)..(172): NCBI GI NO: 34763572 NR Description: METHYLTRANSFERASE
  misc_feature (1)..(172): NCBI GI NO: 19704664 NR Description: Methyltransferase
  misc_feature (6)..(172): NCBI GI NO: 22973536 NR Description: hypothetical protein [Chloroflexus aurantiacus]
  misc_feature (1)..(172): NCBI GI NO: 18310712 NR Description: conserved hypothetical protein
MDVRPMMEVVKGAAFDILQAAGGCPAALRPGRWLDLYSGTGSVGIEALSRGCSQVHFVEMDPWVVSDVLRPNLEETGFLDASVIHTVRVEKFFERAEQFVGNSGPFDYISVTPPYTQVDYGVLMRQISESSLIGENTFIVVEYPLKTDMLDSCGSLVKITDRRFGRTLLAIYGPTWSQKKRR

SEQ ID NO: 7768 - protein, 177 aa, Glycine max
  peptide (1)..(177): Ceres Seq. ID no. 15221632
  misc_feature (1)..(168): Pfam Name: Pfam Description:  Conserved hypothetical protein 95
  misc_feature (1)..(177): NCBI GI NO: 22331389 NR Description: expressed protein [Arabidopsis thaliana]
  misc_feature (1)..(177): NCBI GI NO: 29788862 NR Description: hypothetical protein
  misc_feature (1)..(167): NCBI GI NO: 39996346 NR Description: methyltransferase, putative
  misc_feature (1)..(167): NCBI GI NO: 20807931 NR Description: N6-adenine-specific methylase
  misc_feature (1)..(167): NCBI GI NO: 28210920 NR Description: methyltransferase [Clostridium tetani E88]
  misc_feature (1)..(167): NCBI GI NO: 15895014 NR Description: N6-adenine-specific methylase
  misc_feature (1)..(167): NCBI GI NO: 34763572 NR Description: METHYLTRANSFERASE
  misc_feature (1)..(167): NCBI GI NO: 19704664 NR Description: Methyltransferase
  misc_feature (1)..(167): NCBI GI NO: 22973536 NR Description: hypothetical protein [Chloroflexus aurantiacus]
  misc_feature (1)..(167): NCBI GI NO: 18310712 NR Description: conserved hypothetical protein
MMEVVKGAAFDILQAAGGCPAALRPGRWLDLYSGTGSVGIEALSRGCSQVHFVEMDPWVVSDVLRPNLEETGFLDASVIHTVRVEKFFERAEQFVGNSGPFDYISVTPPYTQVDYGVLMRQISESSLIGENTFIVVEYPLKTDMLDSCGSLVKITDRRFGRTLLAIYGPTWSQKKRR

SEQ ID NO: 7769 - DNA, 803 bp, Glycine max
  misc_feature (1)..(803): Ceres Seq. ID no. 13595582
acatcctaatcgaaaaaaaacctatttagtgtaagaaatagctaggttccacacagctgggttttgtactaaggcaagccattcattcggtgtgacagtccctgagactcgagagactgttgccgccggtattaattctcctcctcctcctccttcttcttcttctccccaaaaccctaatttcttctattcaccaaatcatattcatggctgaacacaacgacccaccccaagaacccacattgccctccaagcgcatgtccgatcccgacctccaagacctcccttccaaaatccccaagctcgacctcaaagaaacactacccactgcaaacgacaacgacctccaaaacgacgatgaagatgacgacgacaacgacgacgacgaggaggagcaggaggataaccgaaagggaaaggggattatgcgtgacgacaagggcaaagggaaaatgattgtagaagaagaagacgacgacgacgatgattccgacgaggatagtgctagcgacgacgacggaagcgatttctctaacgactcgctcacggaggtcgatttgaataacattctgccgtccaggactcgggggcggacggtgagttccggagtgcacattgccggtgactcggggaatgctgctgctgccgtggccgcgggcattgacgacgaagatagcgacagcgacgatagcgatgcttgaattcctgccgaggttagtgagggtttgggaggaaacggaaatggattagttctgttgttgactatgagaaagaagtgtttctttagatttttctttgagccc

SEQ ID NO: 7770 - protein, 164 aa, Glycine max
  peptide (1)..(164): Ceres Seq. ID no. 13595583
  misc_feature (46)..(115): Pfam Name: Pfam Description:  Mpp10 protein
  misc_feature (48)..(164): NCBI GI NO: 15222082 NR Description: peroxisomal targeting signal type 2 receptor
  misc_feature (48)..(107): NCBI GI NO: 15215676 NR Description: At1g12830/F13K23_6 [Arabidopsis thaliana]
  misc_feature (43)..(163): NCBI GI NO: 35210494 NR Description: aspartic acid-rich protein aspolin2
  misc_feature (37)..(121): NCBI GI NO: 23509612 NR Description: hypothetical protein [Plasmodium falciparum 3D7]
  misc_feature (43)..(117): NCBI GI NO: 23481405 NR Description: hypothetical protein [Plasmodium yoelii yoelii]
  misc_feature (6)..(164): NCBI GI NO: 3393011 NR Description: Clumping factor B [Staphylococcus aureus]
  misc_feature (9)..(111): NCBI GI NO: 35210492 NR Description: aspartic acid-rich protein aspolin1
  misc_feature (43)..(117): NCBI GI NO: 23509612 NR Description: hypothetical protein [Plasmodium falciparum 3D7]
  misc_feature (43)..(117): NCBI GI NO: 23481405 NR Description: hypothetical protein [Plasmodium yoelii yoelii]
  misc_feature (6)..(164): NCBI GI NO: 15925620 NR Description: Clumping factor B
MAEHNDPPQEPTLPSKRMSDPDLQDLPSKIPKLDLKETLPTANDNDLQNDDEDDDDNDDDEEEQEDNRKGKGIMRDDKGKGKMIVEEEDDDDDDSDEDSASDDDGSDFSNDSLTEVDLNNILPSRTRGRTVSSGVHIAGDSGNAAAAVAAGIDDEDSDSDDSDA

SEQ ID NO: 7771 - protein, 147 aa, Glycine max
  peptide (1)..(147): Ceres Seq. ID no. 13595584
  misc_feature (29)..(98): Pfam Name: Pfam Description:  Mpp10 protein
  misc_feature (31)..(147): NCBI GI NO: 15222082 NR Description: peroxisomal targeting signal type 2 receptor
  misc_feature (31)..(90): NCBI GI NO: 15215676 NR Description: At1g12830/F13K23_6 [Arabidopsis thaliana]
  misc_feature (26)..(146): NCBI GI NO: 35210494 NR Description: aspartic acid-rich protein aspolin2
  misc_feature (20)..(104): NCBI GI NO: 23509612 NR Description: hypothetical protein [Plasmodium falciparum 3D7]
  misc_feature (26)..(100): NCBI GI NO: 23481405 NR Description: hypothetical protein [Plasmodium yoelii yoelii]
  misc_feature (1)..(147): NCBI GI NO: 3393011 NR Description: Clumping factor B [Staphylococcus aureus]
  misc_feature (1)..(94): NCBI GI NO: 35210492 NR Description: aspartic acid-rich protein aspolin1
  misc_feature (26)..(100): NCBI GI NO: 23509612 NR Description: hypothetical protein [Plasmodium falciparum 3D7]
  misc_feature (26)..(100): NCBI GI NO: 23481405 NR Description: hypothetical protein [Plasmodium yoelii yoelii]
  misc_feature (1)..(147): NCBI GI NO: 15925620 NR Description: Clumping factor B
MSDPDLQDLPSKIPKLDLKETLPTANDNDLQNDDEDDDDNDDDEEEQEDNRKGKGIMRDDKGKGKMIVEEEDDDDDDSDEDSASDDDGSDFSNDSLTEVDLNNILPSRTRGRTVSSGVHIAGDSGNAAAAVAAGIDDEDSDSDDSDA

SEQ ID NO: 7772 - protein, 91 aa, Glycine max
  peptide (1)..(91): Ceres Seq. ID no. 13595585
  misc_feature (1)..(69): Pfam Name: Pfam Description:  Aldose 1-epimerase
  misc_feature (1)..(91): NCBI GI NO: 15222082 NR Description: peroxisomal targeting signal type 2 receptor
  misc_feature (1)..(34): NCBI GI NO: 15215676 NR Description: At1g12830/F13K23_6 [Arabidopsis thaliana]
  misc_feature (1)..(90): NCBI GI NO: 35210494 NR Description: aspartic acid-rich protein aspolin2
  misc_feature (1)..(48): NCBI GI NO: 23509612 NR Description: hypothetical protein [Plasmodium falciparum 3D7]
  misc_feature (1)..(44): NCBI GI NO: 23481405 NR Description: hypothetical protein [Plasmodium yoelii yoelii]
  misc_feature (1)..(91): NCBI GI NO: 3393011 NR Description: Clumping factor B [Staphylococcus aureus]
  misc_feature (1)..(38): NCBI GI NO: 35210492 NR Description: aspartic acid-rich protein aspolin1
  misc_feature (1)..(44): NCBI GI NO: 23509612 NR Description: hypothetical protein [Plasmodium falciparum 3D7]
  misc_feature (1)..(44): NCBI GI NO: 23481405 NR Description: hypothetical protein [Plasmodium yoelii yoelii]
  misc_feature (1)..(91): NCBI GI NO: 15925620 NR Description: Clumping factor B
MRDDKGKGKMIVEEEDDDDDDSDEDSASDDDGSDFSNDSLTEVDLNNILPSRTRGRTVSSGVHIAGDSGNAAAAVAAGIDDEDSDSDDSDA

SEQ ID NO: 7773 - DNA, 1370 bp, Glycine max
  misc_feature (1)..(1370): Ceres Seq. ID no. 15226004
aattatgagactaatccacatgagggtgtttaatcttaaattgggttagctaggttaaagccaagggcccatgggctcatgctaatgatttgcaagtgttgctttcaagggaaaaacagagctttttggttggttggcccttttagcagattggtgttttgagaggctttgcaatttgcaacaaagtccactggtctgtttgatgtgattttctggattctagagattaattagtttggacattgagtattttgggaggttgaacaagttcaagtgttttcaatgtgatttgaggacaaagatgaaatccttgagtagtgtaggtcttggtctcagtattatttttggttgcctcttgttggctctggtagctgaggtatactatttgctatggtggaagaagaggataaccaacagagagattgagaataattatggcaaccctgtgaaggagttattctacatgttttgttggaaaaggccatcatcatcttctttgaggcaaacaagtttcactcctcctgagctttgctcttccatgagaattggtgacacccttgttcataacccagaacaagttcagtctcaaagtggcaaggactttgttttcaaaccctttggggaagatggcatggatgcagaatacatgagccagcaggacctcttaggtcctccaagattcttgttcaccatagtagaagaatcaaaggaagatttagaatctgatgatggcaaattcaaatgtgacaagagtggaaaaggttcaaggggtagaagcttgggtgatttgctagttgtggagacaccatatatgacacctactacttctccacctttctttactcctcctttcactactcctatcagtccctataaccagcgtggattcaatcctctatttgaaacagcaactgatgctgagttcaacagattaaagtcctcacctcctccaaaattcaagttcttacaggaagcagaagagaagcttagaagaaaactacaacaggatgaaaataagggaaatggagatgaggttgatggttctttcatcacaatagttgttgacaagaaaacagaaagagaggttaatcaccagcctcgtccaccacagtaccattcaggtacttcacaggtacttcccttagcatcttgacacaattcaccaaaatcagaagaaagaaaccagctaacaccaaagttctgtcaagtcaattaagagtttatttcttaattaatctttctaattacatgttgaagaattccactttttttttgtaatgatgggaatttgttcccccagacccccccccccccccgagttgttgtttaggggatgcagcactatggtttaatctaccaagccagttgtg

SEQ ID NO: 7774 - protein, 283 aa, Glycine max
  peptide (1)..(283): Ceres Seq. ID no. 15226005
  misc_feature (1)..(250): NCBI GI NO: 15238384 NR Description: expressed protein [Arabidopsis thaliana]
  misc_feature (1)..(250): NCBI GI NO: 21553514 NR Description: unknown [Arabidopsis thaliana]
  misc_feature (1)..(75): NCBI GI NO: 15225496 NR Description: expressed protein [Arabidopsis thaliana]
MKSLSSVGLGLSIIFGCLLLALVAEVYYLLWWKKRITNREIENNYGNPVKELFYMFCWKRPSSSSLRQTSFTPPELCSSMRIGDTLVHNPEQVQSQSGKDFVFKPFGEDGMDAEYMSQQDLLGPPRFLFTIVEESKEDLESDDGKFKCDKSGKGSRGRSLGDLLVVETPYMTPTTSPPFFTPPFTTPISPYNQRGFNPLFETATDAEFNRLKSSPPPKFKFLQEAEEKLRRKLQQDENKGNGDEVDGSFITIVVDKKTEREVNHQPRPPQYHSGTSQVLPLAS

SEQ ID NO: 7775 - protein, 229 aa, Glycine max
  peptide (1)..(229): Ceres Seq. ID no. 15226006
  misc_feature (1)..(196): NCBI GI NO: 15238384 NR Description: expressed protein [Arabidopsis thaliana]
  misc_feature (1)..(196): NCBI GI NO: 21553514 NR Description: unknown [Arabidopsis thaliana]
  misc_feature (1)..(21): NCBI GI NO: 15225496 NR Description: expressed protein [Arabidopsis thaliana]
MFCWKRPSSSSLRQTSFTPPELCSSMRIGDTLVHNPEQVQSQSGKDFVFKPFGEDGMDAEYMSQQDLLGPPRFLFTIVEESKEDLESDDGKFKCDKSGKGSRGRSLGDLLVVETPYMTPTTSPPFFTPPFTTPISPYNQRGFNPLFETATDAEFNRLKSSPPPKFKFLQEAEEKLRRKLQQDENKGNGDEVDGSFITIVVDKKTEREVNHQPRPPQYHSGTSQVLPLAS

SEQ ID NO: 7776 - protein, 204 aa, Glycine max
  peptide (1)..(204): Ceres Seq. ID no. 15226007
  misc_feature (1)..(171): NCBI GI NO: 15238384 NR Description: expressed protein [Arabidopsis thaliana]
  misc_feature (1)..(171): NCBI GI NO: 21553514 NR Description: unknown [Arabidopsis thaliana]
MRIGDTLVHNPEQVQSQSGKDFVFKPFGEDGMDAEYMSQQDLLGPPRFLFTIVEESKEDLESDDGKFKCDKSGKGSRGRSLGDLLVVETPYMTPTTSPPFFTPPFTTPISPYNQRGFNPLFETATDAEFNRLKSSPPPKFKFLQEAEEKLRRKLQQDENKGNGDEVDGSFITIVVDKKTEREVNHQPRPPQYHSGTSQVLPLAS

SEQ ID NO: 7777 - DNA, 1406 bp, Glycine max
  misc_feature (1)..(1406): Ceres Seq. ID no. 13582388
aagttcttcattttttctcattctgtctgtctgtctgtctctctctcactcactctttaagcactgagtaatttgtaatattattctgttcttgcttttgaggtcactgttctttctgcagttgctgcattagcattttgggaccattttgttctttaccactactttttctctgtgatgccattgttgtattgtactcttccttgtgctagatctgaagctgtgaggccagactctctcatttcatttccatcccgtgtttaaattggaagctggaacctagtttatgccctgcttgatttggttgctcttaacccttttcagaaatcaaaagcacttgtactatgctggtgttccctatagggaaagatgaaattgaagtctaagaaaggatggaaatctattgtaccacttcatttgaaaggaaaatcagcaagccgtttttctttatttcgcaaagtcaattctgctggctatggacctggcaaaacaccagtttatctgaatgtgtatgacttgacacccatgaatggttatgtgtattgggctggtcttggtatctatcactctggtgtagaagttcatggtgtagaatacgcgtttggagctcatgactacccaacaagtggtgttttcgaggttgaacctcgccaatgccctggcttcaagttcaggaagtcaatattcataggaatcacatctttggattctactcaggttagggagttcatggaacgccagtcagcaagatacaacggtgacacatatcacttaattgtcaagaactgcaaccacttctgcaaagacatctgttacaagctgacggggaaatcgattccaacatgggtaaatcgactggccagactaggttcaatttgcaattgcattcttcctgaagcactaaggatttctgctgtggcgcatgatcctaattatcagcctcatgatagtgaaaagagaaggcttcgaagtggcttcaattgcttgtcctcaatctcaatgcgtcaaaaacacctttccacatcttcactgtttctacagtcacccataagaggctgcttgtcgtcgtcatggccctcctcggaattgagaaaatccattaaccgttccttgaaagaaagataaccgaactttgagaaggtaggaaatgaatgattgtaagaatcttgtttatgtaagtaggatttggtttcatcacataacctcattttcttttatttttctttccttgtcttttgcagttaaacctgccctgttttattatttttttattgtggtgactaagaatgatcctttccaagcttagaagaaactttataaatgagcatcaccaccatctgctgtgtattattttaatttttgtacatacattagcatgtaaaatgatgcaccaacaacttcaatct

SEQ ID NO: 7778 - protein, 251 aa, Glycine max
  peptide (1)..(251): Ceres Seq. ID no. 13582389
  misc_feature (42)..(164): Pfam Name: DUF862 Pfam Description: Eukaryotic protein of unknown function
  misc_feature (1)..(251): NCBI GI NO: 18401869 NR Description: expressed protein [Arabidopsis thaliana]
  misc_feature (1)..(251): NCBI GI NO: 21593644 NR Description: unknown [Arabidopsis thaliana]
  misc_feature (1)..(251): NCBI GI NO: 9802596 NR Description: T2E6.19 [Arabidopsis thaliana]
  misc_feature (38)..(201): NCBI GI NO: 18420889 NR Description: expressed protein [Arabidopsis thaliana]
  misc_feature (21)..(228): NCBI GI NO: 30684058 NR Description: expressed protein [Arabidopsis thaliana]
  misc_feature (15)..(185): NCBI GI NO: 15238059 NR Description: expressed protein [Arabidopsis thaliana]
  misc_feature (39)..(251): NCBI GI NO: 18400749 NR Description: expressed protein [Arabidopsis thaliana]
  misc_feature (27)..(229): NCBI GI NO: 18412886 NR Description: expressed protein [Arabidopsis thaliana]
  misc_feature (27)..(229): NCBI GI NO: 25354458 NR Description: hypothetical protein F23A5.4
  misc_feature (35)..(225): NCBI GI NO: 38346173 NR Description: OSJNBa0079A21.20
MKLKSKKGWKSIVPLHLKGKSASRFSLFRKVNSAGYGPGKTPVYLNVYDLTPMNGYVYWAGLGIYHSGVEVHGVEYAFGAHDYPTSGVFEVEPRQCPGFKFRKSIFIGITSLDSTQVREFMERQSARYNGDTYHLIVKNCNHFCKDICYKLTGKSIPTWVNRLARLGSICNCILPEALRISAVAHDPNYQPHDSEKRRLRSGFNCLSSISMRQKHLSTSSLFLQSPIRGCLSSSWPSSELRKSINRSLKER

SEQ ID NO: 7779 - protein, 199 aa, Glycine max
  peptide (1)..(199): Ceres Seq. ID no. 13582390
  misc_feature (1)..(112): Pfam Name: DUF862 Pfam Description: Eukaryotic protein of unknown function
  misc_feature (1)..(199): NCBI GI NO: 18401869 NR Description: expressed protein [Arabidopsis thaliana]
  misc_feature (1)..(199): NCBI GI NO: 21593644 NR Description: unknown [Arabidopsis thaliana]
  misc_feature (1)..(199): NCBI GI NO: 9802596 NR Description: T2E6.19 [Arabidopsis thaliana]
  misc_feature (1)..(149): NCBI GI NO: 18420889 NR Description: expressed protein [Arabidopsis thaliana]
  misc_feature (1)..(176): NCBI GI NO: 30684058 NR Description: expressed protein [Arabidopsis thaliana]
  misc_feature (1)..(133): NCBI GI NO: 15238059 NR Description: expressed protein [Arabidopsis thaliana]
  misc_feature (1)..(199): NCBI GI NO: 18400749 NR Description: expressed protein [Arabidopsis thaliana]
  misc_feature (1)..(177): NCBI GI NO: 18412886 NR Description: expressed protein [Arabidopsis thaliana]
  misc_feature (1)..(177): NCBI GI NO: 25354458 NR Description: hypothetical protein F23A5.4
  misc_feature (1)..(173): NCBI GI NO: 38346173 NR Description: OSJNBa0079A21.20
MNGYVYWAGLGIYHSGVEVHGVEYAFGAHDYPTSGVFEVEPRQCPGFKFRKSIFIGITSLDSTQVREFMERQSARYNGDTYHLIVKNCNHFCKDICYKLTGKSIPTWVNRLARLGSICNCILPEALRISAVAHDPNYQPHDSEKRRLRSGFNCLSSISMRQKHLSTSSLFLQSPIRGCLSSSWPSSELRKSINRSLKER

SEQ ID NO: 7780 - protein, 131 aa, Glycine max
  peptide (1)..(131): Ceres Seq. ID no. 13582391
  misc_feature (1)..(131): NCBI GI NO: 18401869 NR Description: expressed protein [Arabidopsis thaliana]
  misc_feature (1)..(131): NCBI GI NO: 21593644 NR Description: unknown [Arabidopsis thaliana]
  misc_feature (1)..(131): NCBI GI NO: 9802596 NR Description: T2E6.19 [Arabidopsis thaliana]
  misc_feature (1)..(81): NCBI GI NO: 18420889 NR Description: expressed protein [Arabidopsis thaliana]
  misc_feature (1)..(108): NCBI GI NO: 30684058 NR Description: expressed protein [Arabidopsis thaliana]
  misc_feature (1)..(65): NCBI GI NO: 15238059 NR Description: expressed protein [Arabidopsis thaliana]
  misc_feature (1)..(131): NCBI GI NO: 18400749 NR Description: expressed protein [Arabidopsis thaliana]
  misc_feature (1)..(109): NCBI GI NO: 18412886 NR Description: expressed protein [Arabidopsis thaliana]
  misc_feature (1)..(109): NCBI GI NO: 25354458 NR Description: hypothetical protein F23A5.4
  misc_feature (1)..(105): NCBI GI NO: 38346173 NR Description: OSJNBa0079A21.20
MERQSARYNGDTYHLIVKNCNHFCKDICYKLTGKSIPTWVNRLARLGSICNCILPEALRISAVAHDPNYQPHDSEKRRLRSGFNCLSSISMRQKHLSTSSLFLQSPIRGCLSSSWPSSELRKSINRSLKER

SEQ ID NO: 7781 - DNA, 1137 bp, Glycine max
  misc_feature (1)..(1137): Ceres Seq. ID no. 12583413
acacaaacatctctctctctctctctctctctctctctctctaagacacacaaacacaacaaacacatcacaatctcacactgttctcaagtttcaacactttctagttctaccatggcggtaggactctccgccgccataaccatgaagtccctcctccgtttccaccaacctcacctgaacctccccaaatcaatcccaacaacactccctttctcccccatgagaattttccaccacacagcatcaccaagaacccaaaaagtttcaactttcaccgtttgtgtcctcatgcaggacccaaaacaaggcacccacatggaaattgagccacaagaacaatctcctcctcctcctcctcctcccgctcaacaagttctgtcaccaaagttggctgagaaattggccagaaaagagtctgagaggttcacttaccttgttgctgcggtcatgtctagcttcggcatcacatccatggcagtgttcgctgtttattgcagattctcgtggcaaatggagggtggagaagtgccttggtctgaaatgtttggcacatttgctctatcagtgggagctgctgtgggtatggaattttgggctagatgggctcatagggctctctggcatgcttcgctgtggcacatgcatgagtcccaccatcgaccaagagaaggacccttcgagcttaacgatgtatttgcaataatcaacgctgtccctgccatcgctctcctttcctatggtttctttaacaagggactggtccctggcctttgctttggtgcgggtcttggaattacggtctttgggatggcctacatgtttgtacacgatggattggttcataagagattcccggtgggccccattgcaaacgtgccctatctcagaagggtggcctctgctcaccaacttcaccattcggaaaaattcaatggagtgccatatgggctgtttttgggacccaaggaaattgaagaggtgggagggctagaagagctggagaaagagataagtaggagagcaagatcatacaaaatagctaatgagaacaactaatacaaatccagaatgtttcgaagaattatcagtgtaaatcagaaatatgaaataaaatgatccaaaaattttgcttgc

SEQ ID NO: 7782 - protein, 352 aa, Glycine max
  peptide (1)..(352): Ceres Seq. ID no. 12583414
  misc_feature (183)..(341): Pfam Name: Pfam Description:  Carotene hydroxylase
  misc_feature (39)..(345): NCBI GI NO: 9988836 NR Description: beta-carotene hydroxylase [Citrus unshiu]
  misc_feature (39)..(345): NCBI GI NO: 11245486 NR Description: beta-carotene hydroxylase [Citrus unshiu]
  misc_feature (43)..(346): NCBI GI NO: 2956717 NR Description: beta-carotene hydroxylase 2 [Capsicum annuum]
  misc_feature (40)..(346): NCBI GI NO: 5870598 NR Description: beta-carotene hydroxylase
  misc_feature (39)..(349): NCBI GI NO: 15235959 NR Description: beta-carotene hydroxylase; protein id: At4g25700
  misc_feature (43)..(346): NCBI GI NO: 5870600 NR Description: beta-carotene hydroxylase
  misc_feature (83)..(349): NCBI GI NO: 1575296 NR Description: beta-carotene hydroxylase [Arabidopsis thaliana]
  misc_feature (63)..(345): NCBI GI NO: 9971820 NR Description: beta hydroxylase [Tagetes erecta]
  misc_feature (39)..(345): NCBI GI NO: 15237204 NR Description: beta-carotene hydroxylase, putative
  misc_feature (39)..(344): NCBI GI NO: 21734857 NR Description: beta-carotene hydroxylase [Vitis vinifera]
TQTSLSLSLSLSLSKTHKHNKHITISHCSQVSTLSSSTMAVGLSAAITMKSLLRFHQPHLNLPKSIPTTLPFSPMRIFHHTASPRTQKVSTFTVCVLMQDPKQGTHMEIEPQEQSPPPPPPPAQQVLSPKLAEKLARKESERFTYLVAAVMSSFGITSMAVFAVYCRFSWQMEGGEVPWSEMFGTFALSVGAAVGMEFWARWAHRALWHASLWHMHESHHRPREGPFELNDVFAIINAVPAIALLSYGFFNKGLVPGLCFGAGLGITVFGMAYMFVHDGLVHKRFPVGPIANVPYLRRVASAHQLHHSEKFNGVPYGLFLGPKEIEEVGGLEELEKEISRRARSYKIANENN

SEQ ID NO: 7783 - protein, 314 aa, Glycine max
  peptide (1)..(314): Ceres Seq. ID no. 12583415
  misc_feature (145)..(303): Pfam Name: Pfam Description:  Carotene hydroxylase
  misc_feature (1)..(307): NCBI GI NO: 9988836 NR Description: beta-carotene hydroxylase [Citrus unshiu]
  misc_feature (1)..(307): NCBI GI NO: 11245486 NR Description: beta-carotene hydroxylase [Citrus unshiu]
  misc_feature (5)..(308): NCBI GI NO: 2956717 NR Description: beta-carotene hydroxylase 2 [Capsicum annuum]
  misc_feature (2)..(308): NCBI GI NO: 5870598 NR Description: beta-carotene hydroxylase
  misc_feature (1)..(311): NCBI GI NO: 15235959 NR Description: beta-carotene hydroxylase; protein id: At4g25700
  misc_feature (5)..(308): NCBI GI NO: 5870600 NR Description: beta-carotene hydroxylase
  misc_feature (45)..(311): NCBI GI NO: 1575296 NR Description: beta-carotene hydroxylase [Arabidopsis thaliana]
  misc_feature (25)..(307): NCBI GI NO: 9971820 NR Description: beta hydroxylase [Tagetes erecta]
  misc_feature (1)..(307): NCBI GI NO: 15237204 NR Description: beta-carotene hydroxylase, putative
  misc_feature (1)..(306): NCBI GI NO: 21734857 NR Description: beta-carotene hydroxylase [Vitis vinifera]
MAVGLSAAITMKSLLRFHQPHLNLPKSIPTTLPFSPMRIFHHTASPRTQKVSTFTVCVLMQDPKQGTHMEIEPQEQSPPPPPPPAQQVLSPKLAEKLARKESERFTYLVAAVMSSFGITSMAVFAVYCRFSWQMEGGEVPWSEMFGTFALSVGAAVGMEFWARWAHRALWHASLWHMHESHHRPREGPFELNDVFAIINAVPAIALLSYGFFNKGLVPGLCFGAGLGITVFGMAYMFVHDGLVHKRFPVGPIANVPYLRRVASAHQLHHSEKFNGVPYGLFLGPKEIEEVGGLEELEKEISRRARSYKIANENN

SEQ ID NO: 7784 - protein, 304 aa, Glycine max
  peptide (1)..(304): Ceres Seq. ID no. 12583416
  misc_feature (135)..(293): Pfam Name: Pfam Description:  Carotene hydroxylase
  misc_feature (1)..(297): NCBI GI NO: 9988836 NR Description: beta-carotene hydroxylase [Citrus unshiu]
  misc_feature (1)..(297): NCBI GI NO: 11245486 NR Description: beta-carotene hydroxylase [Citrus unshiu]
  misc_feature (1)..(298): NCBI GI NO: 2956717 NR Description: beta-carotene hydroxylase 2 [Capsicum annuum]
  misc_feature (1)..(298): NCBI GI NO: 5870598 NR Description: beta-carotene hydroxylase
  misc_feature (1)..(301): NCBI GI NO: 15235959 NR Description: beta-carotene hydroxylase; protein id: At4g25700
  misc_feature (1)..(298): NCBI GI NO: 5870600 NR Description: beta-carotene hydroxylase
  misc_feature (35)..(301): NCBI GI NO: 1575296 NR Description: beta-carotene hydroxylase [Arabidopsis thaliana]
  misc_feature (15)..(297): NCBI GI NO: 9971820 NR Description: beta hydroxylase [Tagetes erecta]
  misc_feature (1)..(297): NCBI GI NO: 15237204 NR Description: beta-carotene hydroxylase, putative
  misc_feature (1)..(296): NCBI GI NO: 21734857 NR Description: beta-carotene hydroxylase [Vitis vinifera]
MKSLLRFHQPHLNLPKSIPTTLPFSPMRIFHHTASPRTQKVSTFTVCVLMQDPKQGTHMEIEPQEQSPPPPPPPAQQVLSPKLAEKLARKESERFTYLVAAVMSSFGITSMAVFAVYCRFSWQMEGGEVPWSEMFGTFALSVGAAVGMEFWARWAHRALWHASLWHMHESHHRPREGPFELNDVFAIINAVPAIALLSYGFFNKGLVPGLCFGAGLGITVFGMAYMFVHDGLVHKRFPVGPIANVPYLRRVASAHQLHHSEKFNGVPYGLFLGPKEIEEVGGLEELEKEISRRARSYKIANENN

SEQ ID NO: 7785 - DNA, 1529 bp, Glycine max
  misc_feature (1)..(1529): Ceres Seq. ID no. 13595665
aataacttagatgggttgggaatgagggtagtggcgagacagtgagagggtggaaatggcggctgtggcagcgagaagcacaggcagcgttggtgttggtgctgtcatcttcatctcagtcgctctcaccacttatttcatctcgaaaaagaagaagaagaagaagaaggaatccaggaagaagaagaagggactggtggacgccataggcaacactcctttgattcggatcaacagcctctccgccgccactggttgccaaattctcggcaagtgcgagttcttaaaccccggaggcagcgtcaaagaccgcgttgctgttcaaattattcaagaggctctagaatctggccagctacgtccaggtggaatagtcactgaagggagtgctggaagcactgccattagcattgccactgttgctcctgcctacgggtgcaggacccatgtggttataccagatgatgctgccattgagaagtctcaaatacttgaagcccttggggcaactgttgaaagagtgagaccggtgtccatcacccacaaagaccattttgtcaatattgcaagaagacgggcatctgaagcaaatgagtttgcattgaagcgtagaaattcacaacaattgaatggcaaggaggacaccgagaaaataaatggttatgaatctaatggatgcaattacagctctctgtttcctgaagattgtcaaggtggcttttttgctgatcagtttgagaacctagcgaacttcagggcccattatgagggtacagggcctgagatttgggaacagaccaatggaaagttagatgcatttgttgcagcagcgggtaccggtggtactgtggctggtgtttctaagtttcttcaggaaaagaatccaaacatcaagtgcttcctcttagatcctcctggctctggtttgtttaataaggtaactaggggagtgatgtacaccaaagaggaggcagaaggaagaagactcaagaatccatttgacactataacagaaggaattggaattaacaggataacaaggaattttgcaatggcaaaacttgatggggcctttagaggcaccgatagggaagctgttgaaatgtctaggtttcttttgaagaacgatggtctcttccttgggagttcttctgcaatgaactgtgttggagcagttagagtagcgcaagcaattggcactggtcacacaattgtaaccattctctgcgacagtggaatgagacatttgagcaaattctatgatgctgaatacttgtctcagcttggtttgacaccgaaagcaattggtttggagttcttaggcgtcaagtgagaaggtttcttcagagtttaaaattttaatgccactgccttggatgagagtggccacctagaagttagaactgagggtgttgtagttattgatatagaagatattacacttattaatacaatgttttggggatattacatggctcattctttgttagtctttcatggtttattgatttattaactaggccaagatg

SEQ ID NO: 7786 - protein, 425 aa, Glycine max
  peptide (1)..(425): Ceres Seq. ID no. 13595666
  misc_feature (70)..(393): Pfam Name: Pfam Description:  Pyridoxal-phosphate dependent enzyme
  misc_feature (9)..(425): NCBI GI NO: 15222794 NR Description: pyridoxal-5'-phosphate-dependent enzyme
  misc_feature (9)..(425): NCBI GI NO: 8778327 NR Description: F14J16.13 [Arabidopsis thaliana]
  misc_feature (200)..(422): NCBI GI NO: 19114255 NR Description: putative cysteine synthase
  misc_feature (12)..(176): NCBI GI NO: 19114255 NR Description: putative cysteine synthase
  misc_feature (221)..(402): NCBI GI NO: 40744670 NR Description: hypothetical protein AN1513.2
  misc_feature (46)..(175): NCBI GI NO: 40744670 NR Description: hypothetical protein AN1513.2
  misc_feature (223)..(402): NCBI GI NO: 6321449 NR Description: Hypothetical ORF; Ygr012wp
  misc_feature (21)..(177): NCBI GI NO: 6321449 NR Description: Hypothetical ORF; Ygr012wp
  misc_feature (201)..(412): NCBI GI NO: 22964496 NR Description: hypothetical protein [Rhodopseudomonas palustris]
  misc_feature (44)..(180): NCBI GI NO: 22964496 NR Description: hypothetical protein [Rhodopseudomonas palustris]
MAAVAARSTGSVGVGAVIFISVALTTYFISKKKKKKKKESRKKKKGLVDAIGNTPLIRINSLSAATGCQILGKCEFLNPGGSVKDRVAVQIIQEALESGQLRPGGIVTEGSAGSTAISIATVAPAYGCRTHVVIPDDAAIEKSQILEALGATVERVRPVSITHKDHFVNIARRRASEANEFALKRRNSQQLNGKEDTEKINGYESNGCNYSSLFPEDCQGGFFADQFENLANFRAHYEGTGPEIWEQTNGKLDAFVAAAGTGGTVAGVSKFLQEKNPNIKCFLLDPPGSGLFNKVTRGVMYTKEEAEGRRLKNPFDTITEGIGINRITRNFAMAKLDGAFRGTDREAVEMSRFLLKNDGLFLGSSSAMNCVGAVRVAQAIGTGHTIVTILCDSGMRHLSKFYDAEYLSQLGLTPKAIGLEFLGVK

SEQ ID NO: 7787 - DNA, 1543 bp, Glycine max
  misc_feature (1)..(1543): Ceres Seq. ID no. 13639243
agaacaccctaatcgaaaaatttgctagggtcttcccactagcttactcactctcactcgattctcttgttccatctttgtcctcttgttgaactcgtctagtcaacaaggcttgaaaccgatcaagcaagcagtgttttcgtgtgactcggttttatattccggaaatggcgagtttgaacccgttcgatctcttaggagatgacgctgaggatccaagccagattgttttgagtttaccgaagaaggtcgagaaagcagctcctgttcagcctgctaaggccgctaagttcccaaccaagccgtctcctccttctcaagctgtgagggagtcaaggaatggtccttcaggaggtcatggtggtggtggtggacgtgggcctcctcgtggttcgtttaaccccggtggaaacagacctcatgatccaaaggatggagaaaggaacggtgggttccgcggataccgtgaaagtggtggtcgtggaggccacattggtggttttgctaatggtaaaactggtgatgttgaacgtccgaggagggtctatgaccgccgtagtggaactggtcgtagtaatgacgtgaaacgtgagggtggtggtcgtggaaactggggtactcctgaagatgatattcaaccagtaaccgaggaacctacaacggaggttgagaagagccctgttgctgagaaggaaggcggtgaggatgccaccactgatgcaaagaaagaagctcctgaagttgagcaagagcctgaggacaaggagatgacgctggaagagtatgagaagattctggaggagaagaagaaagctctgcaagccacaaaggtggaggaaaggaaagttgacaccaaagtgttcgagtctatgcaacagctctctaacaagaagaccaatgatgaggagatcttcatcaagctgggatccgacaaggacaaacgcaaagatgctgctgagaaagaagagaaggccaagaagtcgttgagcataaacgagtttttgaagccggctaatggagagacctacaacccaagaggtggataccgtggaagaggaggacgcagtggtggtcgtggacagagggatggaaaagtcaacggaggaggaaaccaaaggaatggaggagcctctgctcctgctccagctatcggagacagtgctcagttcccatcgttgggcaactaaagacaccctttctggtccttcaagcatctacctatctatctccactctcttttagtttaattttgttgtcttagttctccatcattttttgttacactttcactacaaaacatgtttggtagctgactttatgatggaaaaacaaaattataatatccttttgtctcmaaatwttwtattcttttbcttttcrarrgaaraaaaaaaaaaaaaaaaaaaaaaaaaaaaaaaaaaaaaaaaaaaaaaaaaaaaattaaaaaaaaaaaaaaaaaggtttatcsaaacccgccamccccgagggggggcccggamcccawtycccccaaaagggggccgaataacgcgggccccggggc

SEQ ID NO: 7788 - protein, 339 aa, Glycine max
  peptide (1)..(339): Ceres Seq. ID no. 15219423
  misc_feature (110)..(276): Pfam Name: Pfam Description:  Hyaluronan / mRNA binding family
  misc_feature (1)..(338): NCBI GI NO: 21593013 NR Description: nuclear RNA binding protein A-like protein
  misc_feature (1)..(338): NCBI GI NO: 15236552 NR Description: nuclear RNA binding protein, putative
  misc_feature (33)..(338): NCBI GI NO: 15238039 NR Description: nuclear RNA binding protein, putative
  misc_feature (33)..(338): NCBI GI NO: 21553991 NR Description: nuclear RNA binding protein A-like protein
  misc_feature (13)..(338): NCBI GI NO: 21537052 NR Description: nuclear antigen homolog [Arabidopsis thaliana]
  misc_feature (13)..(338): NCBI GI NO: 15235894 NR Description: nuclear RNA binding protein [Arabidopsis thaliana]
  misc_feature (5)..(338): NCBI GI NO: 39725276 NR Description: salt tolerance protein 1 [Beta vulgaris]
  misc_feature (59)..(338): NCBI GI NO: 39725278 NR Description: salt tolerance protein 2 [Beta vulgaris]
  misc_feature (26)..(338): NCBI GI NO: 6492266 NR Description: nuclear RNA binding protein A [Spinacia oleracea]
  misc_feature (33)..(338): NCBI GI NO: 7488863 NR Description: probable transcription factor - fava bean
MASLNPFDLLGDDAEDPSQIVLSLPKKVEKAAPVQPAKAAKFPTKPSPPSQAVRESRNGPSGGHGGGGGRGPPRGSFNPGGNRPHDPKDGERNGGFRGYRESGGRGGHIGGFANGKTGDVERPRRVYDRRSGTGRSNDVKREGGGRGNWGTPEDDIQPVTEEPTTEVEKSPVAEKEGGEDATTDAKKEAPEVEQEPEDKEMTLEEYEKILEEKKKALQATKVEERKVDTKVFESMQQLSNKKTNDEEIFIKLGSDKDKRKDAAEKEEKAKKSLSINEFLKPANGETYNPRGGYRGRGGRSGGRGQRDGKVNGGGNQRNGGASAPAPAIGDSAQFPSLGN

SEQ ID NO: 7789 - DNA, 953 bp, Glycine max
  misc_feature (1)..(953): Ceres Seq. ID no. 12611846
ttccaccgcacaaaccaaatcccactcccacaatttccggaatagcaagcgcgccgccgccgcagcggttggccagctctccggggcggggctcaccgccggttcggtgaggctgccgggggccctgccgtctgcggcagggtcggcggtctgctgcagggccgcggcgaaggggaaggaggtgctcagcggcgtgatgttccagccgttcgaggagctcaagggggagctgtccctcgtgccgcagggcaaggaccagtcgctcgccaggcacaagttcgtcgacgagtgcgaggccgccctcaacgagcagatcaatgtggagtacaatgcctcgtacgcgtatcactccctcttcgcctacttcgaccgcgacaacgttgctctcaagggatttgccaagttcttcaaggaatcaagcgatgaggagagggggcacgccgagaagctcatggagtaccagaacaaacgtggaggcagggtgaggctccagtcaattgtcacacccttaacggagttcgaccatcctgagaaaggcgatgccctgtatgcaatggagttggctctagctcttgaaaagctggtgaatgagaaactgcacaacctgcacagtgtagctacgaggtgcaatgatcctcagctgaccgactttgttgagagcgaattccttcaggagcaggttgacgccatcaagaagatctctgagtatgtgtcgcagctgagaagagtcggcaaaggccacggagtgtggcacttcgatcagatgctgcttgaggaggcagcttgaaggacacgatgactacgggcaatggaggatgtaggtgtgatatgtcaagtagtggacagataagccaaccactggatgtggttctgagggatttttgcagtggggtttgtagggtgctataatgctgaactgctctgtgtttgggattgaaataaaacgaagggag

SEQ ID NO: 7790 - protein, 261 aa, Glycine max
  peptide (1)..(261): Ceres Seq. ID no. 12611847
  misc_feature (13)..(261): NCBI GI NO: 21686526 NR Description: ferritin [Oryza sativa (japonica cultivar-group)]
  misc_feature (18)..(261): NCBI GI NO: 21686528 NR Description: ferritin [Oryza sativa (japonica cultivar-group)]
  misc_feature (13)..(261): NCBI GI NO: 1103628 NR Description: ferritin [Zea mays]
  misc_feature (18)..(261): NCBI GI NO: 14091661 NR Description: ferritin [Oryza sativa]
  misc_feature (3)..(261): NCBI GI NO: 82687 NR Description: ferritin 1 precursor
  misc_feature (13)..(261): NCBI GI NO: 29840836 NR Description: Ferritin 1, chloroplast precursor (ZmFer1)
  misc_feature (13)..(261): NCBI GI NO: 1103630 NR Description: ferritin [Zea mays]
  misc_feature (13)..(261): NCBI GI NO: 82688 NR Description: ferritin 2 precursor (clone FM2) - maize
  misc_feature (13)..(261): NCBI GI NO: 29840837 NR Description: Ferritin 2, chloroplast precursor (ZmFer2)
  misc_feature (44)..(259): NCBI GI NO: 29839387 NR Description: Ferritin 3, chloroplast precursor (SFerH-3)
STAQTKSHSHNFRNSKRAAAAAVGQLSGAGLTAGSVRLPGALPSAAGSAVCCRAAAKGKEVLSGVMFQPFEELKGELSLVPQGKDQSLARHKFVDECEAALNEQINVEYNASYAYHSLFAYFDRDNVALKGFAKFFKESSDEERGHAEKLMEYQNKRGGRVRLQSIVTPLTEFDHPEKGDALYAMELALALEKLVNEKLHNLHSVATRCNDPQLTDFVESEFLQEQVDAIKKISEYVSQLRRVGKGHGVWHFDQMLLEEAA

SEQ ID NO: 7791 - protein, 196 aa, Glycine max
  peptide (1)..(196): Ceres Seq. ID no. 12611848
  misc_feature (1)..(196): NCBI GI NO: 21686526 NR Description: ferritin [Oryza sativa (japonica cultivar-group)]
  misc_feature (1)..(196): NCBI GI NO: 21686528 NR Description: ferritin [Oryza sativa (japonica cultivar-group)]
  misc_feature (1)..(196): NCBI GI NO: 1103628 NR Description: ferritin [Zea mays]
  misc_feature (1)..(196): NCBI GI NO: 14091661 NR Description: ferritin [Oryza sativa]
  misc_feature (1)..(196): NCBI GI NO: 82687 NR Description: ferritin 1 precursor
  misc_feature (1)..(196): NCBI GI NO: 29840836 NR Description: Ferritin 1, chloroplast precursor (ZmFer1)
  misc_feature (1)..(196): NCBI GI NO: 1103630 NR Description: ferritin [Zea mays]
  misc_feature (1)..(196): NCBI GI NO: 82688 NR Description: ferritin 2 precursor (clone FM2) - maize
  misc_feature (1)..(196): NCBI GI NO: 29840837 NR Description: Ferritin 2, chloroplast precursor (ZmFer2)
  misc_feature (1)..(194): NCBI GI NO: 29839387 NR Description: Ferritin 3, chloroplast precursor (SFerH-3)
MFQPFEELKGELSLVPQGKDQSLARHKFVDECEAALNEQINVEYNASYAYHSLFAYFDRDNVALKGFAKFFKESSDEERGHAEKLMEYQNKRGGRVRLQSIVTPLTEFDHPEKGDALYAMELALALEKLVNEKLHNLHSVATRCNDPQLTDFVESEFLQEQVDAIKKISEYVSQLRRVGKGHGVWHFDQMLLEEAA

SEQ ID NO: 7792 - DNA, 1175 bp, Glycine max
  misc_feature (1)..(1175): Ceres Seq. ID no. 13595598
ataagtggtatagtctaggccaattcatttcactatcttctttttctccctcttctgtttccatttgagtctcctactagcacacagattattgagatccaaagatcttaactatatggtggcaagaagaatctaaagagaaacaaccaaagcttaagcaaacagtcttgtctactgttgaaaaacaggagaaaatgtcttgtaataatggaatgtcttttttcccttcaaatttcatgatccaaacctcttacgaagatctacctccttctctttcacctctccttccttcttgctctatacctcaagatcttcatgggtttgcttcgtttctaggtaagcgatctccagtagaagggttagaagctgggaacattatgaacggagaagaggattattcagatgatgggtctcaaatgggagagaagaagaggagattgaacatggagcaagtgaagacattagagaagaacttcgagcttggaaacaagcttgacccagagaggaaaatgcagttggctcgtgccttgggtttacagccaagacagatagcgatttggtttcagaacagaagagctcgctggaaaacaaagcagcttgagaaagattatgatacacttaaacgacagtttgattcccttaaagctgaaaacgatcatcttcaaactcacaaccagaaactccaagctgagataatgagttcaaggaacagagaacaaacagaatcaataaatctgaacaaagaaacagaaggatcttgcagtaacagaagcgacaacagttccgataatttcaggctggacatctcgacggctgtgccatcagtagacagcacaataacaggcggccatccaccagcgccacagactgttggtcgacacttctttccaccagcgaccgcgacgaccaccacaacgactatgcaattctttcaaaactcgtcttctggtcagagtatggttaaagaagaaaacagtatcagtaacatgttctgtgcaatggatgaccactcaggtttttggccatggcttgatcagcaacagtacaactgaaactggtcgacctgtttttatttctttcaaagtttttatatattttgttttgtttttttgttttgatatcagaaagaacatgcatgtttcaaaaacttggaatctatcattcacttttgagtt

SEQ ID NO: 7793 - protein, 285 aa, Glycine max
  peptide (1)..(285): Ceres Seq. ID no. 13595599
  misc_feature (78)..(132): Pfam Name: Pfam Description:  Homeobox domain
  misc_feature (1)..(285): NCBI GI NO: 15222452 NR Description: homeobox-leucine zipper protein ATHB-13
  misc_feature (7)..(285): NCBI GI NO: 21555784 NR Description: homeobox gene 13 protein [Arabidopsis thaliana]
  misc_feature (1)..(285): NCBI GI NO: 7446247 NR Description: homeotic protein - common sunflower
  misc_feature (1)..(231): NCBI GI NO: 18396130 NR Description: homeobox-leucine zipper protein. putative
  misc_feature (47)..(285): NCBI GI NO: 1435022 NR Description: DNA-binding protein [Daucus carota]
  misc_feature (43)..(231): NCBI GI NO: 25386233 NR Description: hypothetical protein T2P11
  misc_feature (24)..(219): NCBI GI NO: 19071644 NR Description: putative DNA-binding protein
  misc_feature (37)..(283): NCBI GI NO: 7446243 NR Description: homeotic protein - carrot
  misc_feature (78)..(273): NCBI GI NO: 6175248 NR Description: jasmonic acid 1 [Lycopersicon esculentum]
  misc_feature (7)..(280): NCBI GI NO: 15232066 NR Description: Homeobox-leucine zipper protein/HD-Ziptranscription factor
MSCNNGMSFFPSNFMIQTSYEDLPPSLSPLLPSCSIPQDLHGFASFLGKRSPVEGLEAGNIMNGEEDYSDDGSQMGEKKRRLNMEQVKTLEKNFELGNKLDPERKMQLARALGLQPRQIAIWFQNRRARWKTKQLEKDYDTLKRQFDSLKAENDHLQTHNQKLQAEIMSSRNREQTESINLNKETEGSCSNRSDNSSDNFRLDISTAVPSVDSTITGGHPPAPQTVGRHFFPPATATTTTTTMQFFQNSSSGQSMVKEENSISNMFCAMDDHSGFWPWLDQQQYN

SEQ ID NO: 7794 - protein, 279 aa, Glycine max
  peptide (1)..(279): Ceres Seq. ID no. 13595600
  misc_feature (72)..(126): Pfam Name: Pfam Description:  Homeobox domain
  misc_feature (1)..(279): NCBI GI NO: 15222452 NR Description: homeobox-leucine zipper protein ATHB-13
  misc_feature (1)..(279): NCBI GI NO: 21555784 NR Description: homeobox gene 13 protein [Arabidopsis thaliana]
  misc_feature (1)..(279): NCBI GI NO: 7446247 NR Description: homeotic protein - common sunflower
  misc_feature (1)..(225): NCBI GI NO: 18396130 NR Description: homeobox-leucine zipper protein. putative
  misc_feature (41)..(279): NCBI GI NO: 1435022 NR Description: DNA-binding protein [Daucus carota]
  misc_feature (37)..(225): NCBI GI NO: 25386233 NR Description: hypothetical protein T2P11
  misc_feature (18)..(213): NCBI GI NO: 19071644 NR Description: putative DNA-binding protein
  misc_feature (31)..(277): NCBI GI NO: 7446243 NR Description: homeotic protein - carrot
  misc_feature (72)..(267): NCBI GI NO: 6175248 NR Description: jasmonic acid 1 [Lycopersicon esculentum]
  misc_feature (1)..(274): NCBI GI NO: 15232066 NR Description: Homeobox-leucine zipper protein/HD-Ziptranscription factor
MSFFPSNFMIQTSYEDLPPSLSPLLPSCSIPQDLHGFASFLGKRSPVEGLEAGNIMNGEEDYSDDGSQMGEKKRRLNMEQVKTLEKNFELGNKLDPERKMQLARALGLQPRQIAIWFQNRRARWKTKQLEKDYDTLKRQFDSLKAENDHLQTHNQKLQAEIMSSRNREQTESINLNKETEGSCSNRSDNSSDNFRLDISTAVPSVDSTITGGHPPAPQTVGRHFFPPATATTTTTTMQFFQNSSSGQSMVKEENSISNMFCAMDDHSGFWPWLDQQQYN

SEQ ID NO: 7795 - protein, 271 aa, Glycine max
  peptide (1)..(271): Ceres Seq. ID no. 13595601
  misc_feature (64)..(118): Pfam Name: Pfam Description:  Homeobox domain
  misc_feature (1)..(271): NCBI GI NO: 15222452 NR Description: homeobox-leucine zipper protein ATHB-13
  misc_feature (1)..(271): NCBI GI NO: 21555784 NR Description: homeobox gene 13 protein [Arabidopsis thaliana]
  misc_feature (1)..(271): NCBI GI NO: 7446247 NR Description: homeotic protein - common sunflower
  misc_feature (1)..(217): NCBI GI NO: 18396130 NR Description: homeobox-leucine zipper protein. putative
  misc_feature (33)..(271): NCBI GI NO: 1435022 NR Description: DNA-binding protein [Daucus carota]
  misc_feature (29)..(217): NCBI GI NO: 25386233 NR Description: hypothetical protein T2P11
  misc_feature (10)..(205): NCBI GI NO: 19071644 NR Description: putative DNA-binding protein
  misc_feature (23)..(269): NCBI GI NO: 7446243 NR Description: homeotic protein - carrot
  misc_feature (64)..(259): NCBI GI NO: 6175248 NR Description: jasmonic acid 1 [Lycopersicon esculentum]
  misc_feature (1)..(266): NCBI GI NO: 15232066 NR Description: Homeobox-leucine zipper protein/HD-Ziptranscription factor
MIQTSYEDLPPSLSPLLPSCSIPQDLHGFASFLGKRSPVEGLEAGNIMNGEEDYSDDGSQMGEKKRRLNMEQVKTLEKNFELGNKLDPERKMQLARALGLQPRQIAIWFQNRRARWKTKQLEKDYDTLKRQFDSLKAENDHLQTHNQKLQAEIMSSRNREQTESINLNKETEGSCSNRSDNSSDNFRLDISTAVPSVDSTITGGHPPAPQTVGRHFFPPATATTTTTTMQFFQNSSSGQSMVKEENSISNMFCAMDDHSGFWPWLDQQQYN

SEQ ID NO: 7796 - DNA, 1454 bp, Glycine max
  misc_feature (1)..(1454): Ceres Seq. ID no. 12611392
atatactgttattagttacatacatagagatatagtcaatggcaattgcagcggcaaactcatcacccaccatgagcctcagccatagccagagccaagaggatgccaccaccaacgacaacaagcccgtcgtcgtcgacgatgatcacgagcacgacatggtcatgcccggctttcgcttccacccaactgaagaagagctcgtggagttctaccttcgccgtaaggtggagggaaagcgtttcaacgttgagcttattactttcctcgatctttatcgctatgacccttgggagcttcccgccttggcagctattggtgagaaggagtggtacttctatgtgcccagagataggaagtatcgcaacggtgatcgtcccaatcgcgttactacctctgggtattggaaggcaacaggagctgataggatgatccgaaccgagaattttcgctctatcggcctcaagaaaaccctagttttctattctgggaaagctcctaaaggcattcgaaccagttggattatgaacgagtatcgcttgccgcaacatgaaactgaacgatatcaaaaggctgagatatcgctttgccgtgtgtacaagagagctggagtcgaagaccatccttccctccctcgctgcctcccacgaggccatcctcatcatcaagggcttcttctgatcacatcaataataataagtcgacgaagcacaatgaaatggttcaacaccacaacatcaacatgggattcatgggacaatcaaagccgccaacaactgaacacatagttgacaaaattaatgaatcggaagcaagcagtgatgtcaacacaactcttggactttctaaatacaatgcttaccgtgctgccaccatggcgcttccagttgttccaatggatgaggaagccttgatgatgatgcagcaatctaagcaagctgctgctgcagcagcacatgttccaacaatcttctctgctgggccttctagttccaacaacagtggagtagtgaatatggatgatctgaataggctaatgagttatcaacatcagtactacaatgttcaaagccaaagccatcccaatcagttctctactttgctgatgcaaccttcaccaatagtgtctctcagctcgctaccaaatccacttccacccaccttctctgaccgactctgggactggaatccaatccctgagtcaccaagtcaagagtacagcaacatatccttcaagtaatatgactcatcaattatatctgtgaactgcacatacacacatatatatacatatatattatagatagagacatttatctgtgctaatttctactatcaattttatgtaggttgtacgttttcgttactctctaattaatctggtatcttattttatatttcaataagataattgtatgacttactttgatcaatgatcaatatgtatttgtcgg

SEQ ID NO: 7797 - protein, 249 aa, Glycine max
  peptide (1)..(249): Ceres Seq. ID no. 12611393
  misc_feature (42)..(169): Pfam Name: NAM Pfam Description: No apical meristem
  misc_feature (16)..(209): NCBI GI NO: 30678000 NR Description: No apical meristem (NAM) protein family
  misc_feature (16)..(209): NCBI GI NO: 30678002 NR Description: No apical meristem (NAM) protein family
  misc_feature (16)..(178): NCBI GI NO: 25410986 NR Description: NAM (no apical meristem)-like protein
  misc_feature (28)..(181): NCBI GI NO: 34907482 NR Description: OsNAC6-like protein
  misc_feature (79)..(209): NCBI GI NO: 21450867 NR Description: putative NAM protein [Arabidopsis thaliana]
  misc_feature (34)..(242): NCBI GI NO: 15224202 NR Description: NAM
  misc_feature (40)..(190): NCBI GI NO: 25411775 NR Description: NAM (no apical meristem)-like protein
  misc_feature (35)..(189): NCBI GI NO: 15223376 NR Description: putative NAM protein; protein id: At1g26870.1
  misc_feature (35)..(189): NCBI GI NO: 25518578 NR Description: hypothetical protein T2P11
  misc_feature (31)..(169): NCBI GI NO: 10177980 NR Description: NAM (no apical meristem)-like protein
MAIAAANSSPTMSLSHSQSQEDATTNDNKPVVVDDDHEHDMVMPGFRFHPTEEELVEFYLRRKVEGKRFNVELITFLDLYRYDPWELPALAAIGEKEWYFYVPRDRKYRNGDRPNRVTTSGYWKATGADRMIRTENFRSIGLKKTLVFYSGKAPKGIRTSWIMNEYRLPQHETERYQKAEISLCRVYKRAGVEDHPSLPRCLPRGHPHHQGLLLITSIIISRRSTMKWFNTTTSTWDSWDNQSRQQLNT

SEQ ID NO: 7798 - protein, 238 aa, Glycine max
  peptide (1)..(238): Ceres Seq. ID no. 12611394
  misc_feature (31)..(158): Pfam Name: NAM Pfam Description: No apical meristem
  misc_feature (5)..(198): NCBI GI NO: 30678000 NR Description: No apical meristem (NAM) protein family
  misc_feature (5)..(198): NCBI GI NO: 30678002 NR Description: No apical meristem (NAM) protein family
  misc_feature (5)..(167): NCBI GI NO: 25410986 NR Description: NAM (no apical meristem)-like protein
  misc_feature (17)..(170): NCBI GI NO: 34907482 NR Description: OsNAC6-like protein
  misc_feature (68)..(198): NCBI GI NO: 21450867 NR Description: putative NAM protein [Arabidopsis thaliana]
  misc_feature (23)..(231): NCBI GI NO: 15224202 NR Description: NAM
  misc_feature (29)..(179): NCBI GI NO: 25411775 NR Description: NAM (no apical meristem)-like protein
  misc_feature (24)..(178): NCBI GI NO: 15223376 NR Description: putative NAM protein; protein id: At1g26870.1
  misc_feature (24)..(178): NCBI GI NO: 25518578 NR Description: hypothetical protein T2P11
  misc_feature (20)..(158): NCBI GI NO: 10177980 NR Description: NAM (no apical meristem)-like protein
MSLSHSQSQEDATTNDNKPVVVDDDHEHDMVMPGFRFHPTEEELVEFYLRRKVEGKRFNVELITFLDLYRYDPWELPALAAIGEKEWYFYVPRDRKYRNGDRPNRVTTSGYWKATGADRMIRTENFRSIGLKKTLVFYSGKAPKGIRTSWIMNEYRLPQHETERYQKAEISLCRVYKRAGVEDHPSLPRCLPRGHPHHQGLLLITSIIISRRSTMKWFNTTTSTWDSWDNQSRQQLNT

SEQ ID NO: 7799 - protein, 209 aa, Glycine max
  peptide (1)..(209): Ceres Seq. ID no. 12611395
  misc_feature (2)..(129): Pfam Name: NAM Pfam Description: No apical meristem
  misc_feature (1)..(169): NCBI GI NO: 30678000 NR Description: No apical meristem (NAM) protein family
  misc_feature (1)..(169): NCBI GI NO: 30678002 NR Description: No apical meristem (NAM) protein family
  misc_feature (1)..(138): NCBI GI NO: 25410986 NR Description: NAM (no apical meristem)-like protein
  misc_feature (1)..(141): NCBI GI NO: 34907482 NR Description: OsNAC6-like protein
  misc_feature (39)..(169): NCBI GI NO: 21450867 NR Description: putative NAM protein [Arabidopsis thaliana]
  misc_feature (1)..(202): NCBI GI NO: 15224202 NR Description: NAM
  misc_feature (1)..(150): NCBI GI NO: 25411775 NR Description: NAM (no apical meristem)-like protein
  misc_feature (1)..(149): NCBI GI NO: 15223376 NR Description: putative NAM protein; protein id: At1g26870.1
  misc_feature (1)..(149): NCBI GI NO: 25518578 NR Description: hypothetical protein T2P11
  misc_feature (1)..(129): NCBI GI NO: 10177980 NR Description: NAM (no apical meristem)-like protein
MVMPGFRFHPTEEELVEFYLRRKVEGKRFNVELITFLDLYRYDPWELPALAAIGEKEWYFYVPRDRKYRNGDRPNRVTTSGYWKATGADRMIRTENFRSIGLKKTLVFYSGKAPKGIRTSWIMNEYRLPQHETERYQKAEISLCRVYKRAGVEDHPSLPRCLPRGHPHHQGLLLITSIIISRRSTMKWFNTTTSTWDSWDNQSRQQLNT

SEQ ID NO: 7800 - DNA, 1539 bp, Glycine max
  misc_feature (1)..(1539): Ceres Seq. ID no. 14314782
aacaacaaaggtgtttcagcaaaataattatttatgtcataaagttgttccaactgaagatgcgaaggctttttctctctctctaaaagcagtggccatcatgttctcttcctaaaccctttcaatcatcatttagctctgaaaaaaataatagaaattaaaacgaaaaatgtcctggctcttcaagtccaaccaccctgacccagaatcttctaatctccacaaccgcaccgttatccactcgtcttcgccgccgcatcccgccgccgatcgccacggcgtcaaggacgacatatcgcatattttccgcggcgtcgccaacttcctcgctccgccgccgccgtcttcctcttcctcttcttcttcttcttcttcttcctcctccgccggcgattcctcctcctcgcaagctctgtcaggaatccggaacgatctcgtggagatcggcggaagcttcaaaaactctctctcgcgcatttcctcgaacaaagccgtcaccggaatctccaagctcgcttcgcagttgttgcagttggagcctgatcaacaacggagcaacgatgacgacgcggtgcctggaacgacggaagatgttgttcgtttcgtgaaggagatttctgcgcggcctcagtgttggactgaattccccttgccactccataacgattttagcatgtccaattctcagagagaacatgcattggctatagagcaactggtacccgaattcattgcactaagactgaatctttgcagttacatgaatgtggaaaagttttggatgatctattttttgttaatacttccaagactaaatcagcatgattttgagcgcctatcaactcccaagaaactaggagagaggaaaaatttgcaagctggagaacctgaaaacccaaggactgtggatacatatcaagagggtagggaggaccgtggaacagaaagtatctcatttgagcaaaatcagatattgactgaggttacaaacgcagtagagggtttagaagttgatgacacggttagcactgaaaaatggttggaagatacagacattgatgctagttcattggcttcctgtacaaaacttcaacaggaagaggacgtctcattcagtgacctagaggatgataggagttatagctccgataaattatctggctacagggaggcgcatgacataaggggttcatcacctgaaggtgctactagtgactgggttcggctgcgtgaaagttctgagagagatggcaggaagaaggttatccgtttgaagggtaaggattcagaagatgagtcaaatgattggctcactgttgatgatttcaattagatagtcttttcttgattcaccaagttgtaaaggttcgatatttacccccttccccgtggttctgtatttagggagtacaaaattatataaatcaaagtatttcttttcttattcacacgtacatatttcttgtttgtacaaggcattgggtagacaacattcaatttttgaaagtgtacaacgcaaataaaatcaaggatttcaag

SEQ ID NO: 7801 - protein, 387 aa, Glycine max
  peptide (1)..(387): Ceres Seq. ID no. 14314783
  misc_feature (166)..(211): Pfam Name: Pfam Description:  BSD domain
  misc_feature (29)..(356): NCBI GI NO: 18396945 NR Description: expressed protein [Arabidopsis thaliana]
  misc_feature (29)..(356): NCBI GI NO: 21592796 NR Description: unknown [Arabidopsis thaliana]
  misc_feature (29)..(289): NCBI GI NO: 25411374 NR Description: hypothetical protein At2g10950
  misc_feature (1)..(381): NCBI GI NO: 34909848 NR Description: OSJNBb0053G03.5
  misc_feature (114)..(362): NCBI GI NO: 28273391 NR Description: putative BSD domain containing protein
  misc_feature (10)..(137): NCBI GI NO: 28273391 NR Description: putative BSD domain containing protein
  misc_feature (13)..(264): NCBI GI NO: 15229611 NR Description: expressed protein [Arabidopsis thaliana]
  misc_feature (37)..(387): NCBI GI NO: 18425006 NR Description: expressed protein [Arabidopsis thaliana]
  misc_feature (165)..(387): NCBI GI NO: 7486518 NR Description: hypothetical protein F6H11
  misc_feature (1)..(166): NCBI GI NO: 7486518 NR Description: hypothetical protein F6H11
MSWLFKSNHPDPESSNLHNRTVIHSSSPPHPAADRHGVKDDISHIFRGVANFLAPPPPSSSSSSSSSSSSSSAGDSSSSQALSGIRNDLVEIGGSFKNSLSRISSNKAVTGISKLASQLLQLEPDQQRSNDDDAVPGTTEDVVRFVKEISARPQCWTEFPLPLHNDFSMSNSQREHALAIEQLVPEFIALRLNLCSYMNVEKFWMIYFLLILPRLNQHDFERLSTPKKLGERKNLQAGEPENPRTVDTYQEGREDRGTESISFEQNQILTEVTNAVEGLEVDDTVSTEKWLEDTDIDASSLASCTKLQQEEDVSFSDLEDDRSYSSDKLSGYREAHDIRGSSPEGATSDWVRLRESSERDGRKKVIRLKGKDSEDESNDWLTVDDFN

SEQ ID NO: 7802 - protein, 219 aa, Glycine max
  peptide (1)..(219): Ceres Seq. ID no. 14314784
  misc_feature (1)..(43): Pfam Name: Pfam Description:  BSD domain
  misc_feature (1)..(188): NCBI GI NO: 18396945 NR Description: expressed protein [Arabidopsis thaliana]
  misc_feature (1)..(188): NCBI GI NO: 21592796 NR Description: unknown [Arabidopsis thaliana]
  misc_feature (1)..(121): NCBI GI NO: 25411374 NR Description: hypothetical protein At2g10950
  misc_feature (1)..(213): NCBI GI NO: 34909848 NR Description: OSJNBb0053G03.5
  misc_feature (1)..(194): NCBI GI NO: 28273391 NR Description: putative BSD domain containing protein
  misc_feature (1)..(96): NCBI GI NO: 15229611 NR Description: expressed protein [Arabidopsis thaliana]
  misc_feature (1)..(219): NCBI GI NO: 18425006 NR Description: expressed protein [Arabidopsis thaliana]
  misc_feature (1)..(219): NCBI GI NO: 7486518 NR Description: hypothetical protein F6H11
  misc_feature (1)..(74): NCBI GI NO: 21555533 NR Description: unknown [Arabidopsis thaliana]
  misc_feature (1)..(74): NCBI GI NO: 18391195 NR Description: expressed protein [Arabidopsis thaliana]
MSNSQREHALAIEQLVPEFIALRLNLCSYMNVEKFWMIYFLLILPRLNQHDFERLSTPKKLGERKNLQAGEPENPRTVDTYQEGREDRGTESISFEQNQILTEVTNAVEGLEVDDTVSTEKWLEDTDIDASSLASCTKLQQEEDVSFSDLEDDRSYSSDKLSGYREAHDIRGSSPEGATSDWVRLRESSERDGRKKVIRLKGKDSEDESNDWLTVDDFN

SEQ ID NO: 7803 - DNA, 1541 bp, Glycine max
  misc_feature (1)..(1541): Ceres Seq. ID no. 15178260
acttctggactctctagctagcacctctctctattctctccctaagtgactcctacttcataatcagagggcatgcctgaatgtccagagaaagggagagatttgatgagatagggaagaagatcaagagggaaggagatgtttcatctcaaatgggaagaagacacatgttaggccctccaggaaccctaaatactatcaccccttgtgcggcatgtaagttgttgagaagaagatgtgcccaagaatgtcccttttctccatatttctctccccatgagccccaaaaatttgcttctgtccacaaagtttttggtgccagcaacgtctcaaagatgctcatggaagtaccagagtgtcaaagagctgatgcagcaaatagtctagtatatgaggctaatgtgaggctaagagatcctgtgtatggatgcatgggtgcaatttctgctttgcaacagcaagttcaatctttacaagctgaacttaatgcagtgagaggtgaaatacttaaatacaaactcagggaagctaacatgataccctcctctcatgttgcaatgctcccttcatctggggctgtttcaattgctgctccaccgccgccaccaccaccaccaccacctcttcctcctccttctcttcctcttcctcttcctctaacttcttcccctccttccatgtacatccaacaaagggatcccaccacttataccacaatttcaagtgataatatctcctattttgtctaaatttgcagcctaaaaacaattattccatttatttctctcttaagatgcatcaaggtggaataaagtaaagaaaaggagagtattgatactgaatgttgttatgccccggctgtatgcttttattattattattattatcttaattcatatgattaatactcccaaaacttcccctggctatatggttggttaaacttttatttcttgtacaccttttcaagctaattaaagctagctactaccatattggaaattaatttctccttgatcctgtgattaactattgcatttcttccccagcctcaagtacaaccgatgtagacataatgccaacttgatatatatttatgccaattaattttcccttcattattttatgaagcaatggacaataaagggggaaaagaaacttggttttatattccattgatgatatttgatcaatttggtatgtgaaacatagcaaattaagggtgggaggagggaatcactggtattgttggtagaattaattctgcacgtacgtgatgactgtggttcgtgaccataacatttcttagacatgttaatctgtgccactgaagtatctgagtttgctgtctgaagttgcgggagacaaaaggtatgcttgtgaccttcaccatgttgagtcagacttaacttctgagaaatttcgtttatatatatggaaattgggaagcataattttacgtcaagttatctatcatttgtattatacagtcaaaactatgttatattgctaactagattgagaattgagtattctaatgt

SEQ ID NO: 7804 - protein, 222 aa, Glycine max
  peptide (1)..(222): Ceres Seq. ID no. 15178261
  misc_feature (42)..(142): Pfam Name: Pfam Description:  Protein of unknown function DUF260
  misc_feature (1)..(221): NCBI GI NO: 18405401 NR Description: lateral organ boundaries (LOB) domain family
  misc_feature (1)..(221): NCBI GI NO: 21618113 NR Description: LOB DOMAIN 13 [Arabidopsis thaliana]
  misc_feature (1)..(219): NCBI GI NO: 30684548 NR Description: lateral organ boundaries
  misc_feature (1)..(219): NCBI GI NO: 25408064 NR Description: hypothetical protein At2g30340
  misc_feature (29)..(176): NCBI GI NO: 34907878 NR Description: P0031D02.27
  misc_feature (41)..(168): NCBI GI NO: 15221679 NR Description: lateral organ boundaries (LOB) domain family
  misc_feature (31)..(157): NCBI GI NO: 18402268 NR Description: lateral organ boundaries (LOB) domain family
  misc_feature (31)..(157): NCBI GI NO: 21592574 NR Description: unknown [Arabidopsis thaliana]
  misc_feature (41)..(176): NCBI GI NO: 34896184 NR Description: contains ESTs C98868
  misc_feature (38)..(160): NCBI GI NO: 15218746 NR Description: lateral organ boundaries
MSRERERFDEIGKKIKREGDVSSQMGRRHMLGPPGTLNTITPCAACKLLRRRCAQECPFSPYFSPHEPQKFASVHKVFGASNVSKMLMEVPECQRADAANSLVYEANVRLRDPVYGCMGAISALQQQVQSLQAELNAVRGEILKYKLREANMIPSSHVAMLPSSGAVSIAAPPPPPPPPPPLPPPSLPLPLPLTSSPPSMYIQQRDPTTYTTISSDNISYFV

SEQ ID NO: 7805 - protein, 198 aa, Glycine max
  peptide (1)..(198): Ceres Seq. ID no. 15178262
  misc_feature (18)..(118): Pfam Name: Pfam Description:  Protein of unknown function DUF260
  misc_feature (1)..(197): NCBI GI NO: 18405401 NR Description: lateral organ boundaries (LOB) domain family
  misc_feature (1)..(197): NCBI GI NO: 21618113 NR Description: LOB DOMAIN 13 [Arabidopsis thaliana]
  misc_feature (1)..(195): NCBI GI NO: 30684548 NR Description: lateral organ boundaries
  misc_feature (1)..(195): NCBI GI NO: 25408064 NR Description: hypothetical protein At2g30340
  misc_feature (5)..(152): NCBI GI NO: 34907878 NR Description: P0031D02.27
  misc_feature (17)..(144): NCBI GI NO: 15221679 NR Description: lateral organ boundaries (LOB) domain family
  misc_feature (7)..(133): NCBI GI NO: 18402268 NR Description: lateral organ boundaries (LOB) domain family
  misc_feature (7)..(133): NCBI GI NO: 21592574 NR Description: unknown [Arabidopsis thaliana]
  misc_feature (17)..(152): NCBI GI NO: 34896184 NR Description: contains ESTs C98868
  misc_feature (14)..(136): NCBI GI NO: 15218746 NR Description: lateral organ boundaries
MGRRHMLGPPGTLNTITPCAACKLLRRRCAQECPFSPYFSPHEPQKFASVHKVFGASNVSKMLMEVPECQRADAANSLVYEANVRLRDPVYGCMGAISALQQQVQSLQAELNAVRGEILKYKLREANMIPSSHVAMLPSSGAVSIAAPPPPPPPPPPLPPPSLPLPLPLTSSPPSMYIQQRDPTTYTTISSDNISYFV

SEQ ID NO: 7806 - protein, 193 aa, Glycine max
  peptide (1)..(193): Ceres Seq. ID no. 15178263
  misc_feature (13)..(113): Pfam Name: Pfam Description:  Protein of unknown function DUF260
  misc_feature (1)..(192): NCBI GI NO: 18405401 NR Description: lateral organ boundaries (LOB) domain family
  misc_feature (1)..(192): NCBI GI NO: 21618113 NR Description: LOB DOMAIN 13 [Arabidopsis thaliana]
  misc_feature (1)..(190): NCBI GI NO: 30684548 NR Description: lateral organ boundaries
  misc_feature (1)..(190): NCBI GI NO: 25408064 NR Description: hypothetical protein At2g30340
  misc_feature (1)..(147): NCBI GI NO: 34907878 NR Description: P0031D02.27
  misc_feature (12)..(139): NCBI GI NO: 15221679 NR Description: lateral organ boundaries (LOB) domain family
  misc_feature (2)..(128): NCBI GI NO: 18402268 NR Description: lateral organ boundaries (LOB) domain family
  misc_feature (2)..(128): NCBI GI NO: 21592574 NR Description: unknown [Arabidopsis thaliana]
  misc_feature (12)..(147): NCBI GI NO: 34896184 NR Description: contains ESTs C98868
  misc_feature (9)..(131): NCBI GI NO: 15218746 NR Description: lateral organ boundaries
MLGPPGTLNTITPCAACKLLRRRCAQECPFSPYFSPHEPQKFASVHKVFGASNVSKMLMEVPECQRADAANSLVYEANVRLRDPVYGCMGAISALQQQVQSLQAELNAVRGEILKYKLREANMIPSSHVAMLPSSGAVSIAAPPPPPPPPPPLPPPSLPLPLPLTSSPPSMYIQQRDPTTYTTISSDNISYFV

SEQ ID NO: 7807 - DNA, 922 bp, Glycine max
  misc_feature (1)..(922): Ceres Seq. ID no. 14306325
aatcgtctccaccttgctttcttctccaatgtccgattctctcaccgatcttgcgccaaatacaaattcgttacatcctaacccagggttccgacgagcatggtggacggtccgacgagtccaggcaatggtagccatgagagtggcgagcatagccctcgctctaacgtgcgcgagtaggacaggtacctccccatcgctaacataagccccatcatgaagaaggcactacctacgaatggtaaaatcgccaaggacgccaaagagactgttcaggaatgcttatccgagtttttaagatcaacctttcagacacatgtattgagatggatggattacattcagcacaagcaagaatttgtaggtttatttgagaaaatattgttgcagaagcctggatttgagcccccggtaacacatcctgttggagttgtggaagctgatttaaaatcaaacaacactgagcaaagcgtaaagaatgtcagcaagtccgaagtagactcaagcaaggataaaaacaaagttgaggattgacggaaaagaaacagccggataagattacaccggtattttctttgcactcgttaactttgcatttttaaaattcataactcatgttttgtttaagggtgaagatttaacattcaacatgagtctaaaggtggggaacatgagtttagtggttgcattggagcagtatatcagcttctttcagagataaagttcctggatggatgaaagatactttttttgtgagtttgtattgttaaggcatagtattttgttatcttttgaagatcaattcttattatagtttaactagtaaatttttattcttttcttttagcctattcttatttttttctcttgttaaaaatcatagtaatgttatatggtgcaatttatggttttaggagtgcac

SEQ ID NO: 7808 - protein, 105 aa, Glycine max
  peptide (1)..(105): Ceres Seq. ID no. 14306326
  misc_feature (1)..(27): NCBI GI NO: 22380 NR Description: CAAT-box DNA binding protein subunit B (NF-YB)
  misc_feature (1)..(27): NCBI GI NO: 115840 NR Description: CCAAT-BINDING TRANSCRIPTION FACTOR SUBUNIT A
  misc_feature (1)..(27): NCBI GI NO: 15231796 NR Description: transcription factor NF-Y
  misc_feature (1)..(27): NCBI GI NO: 17979253 NR Description: At2g37060/T2N18.18 [Arabidopsis thaliana]
  misc_feature (1)..(27): NCBI GI NO: 30687025 NR Description: CCAAT-box binding trancription factor -related
  misc_feature (1)..(27): NCBI GI NO: 25408527 NR Description: probable CCAAT-box binding trancription factor
  misc_feature (1)..(27): NCBI GI NO: 18404885 NR Description: CCAAT-binding transcription factor subunit -related
  misc_feature (1)..(27): NCBI GI NO: 25299604 NR Description: hypothetical protein At2g38880
  misc_feature (1)..(27): NCBI GI NO: 30687688 NR Description: CCAAT-binding transcription factor subunit -related
  misc_feature (1)..(27): NCBI GI NO: 30409459 NR Description: NF-YB [Oryza sativa (japonica cultivar-group)]
MKKALPTNGKIAKDAKETVQECLSEFLRSTFQTHVLRWMDYIQHKQEFVGLFEKILLQKPGFEPPVTHPVGVVEADLKSNNTEQSVKNVSKSEVDSSKDKNKVED

SEQ ID NO: 7809 - protein, 68 aa, Glycine max
  peptide (1)..(68): Ceres Seq. ID no. 14306327
IVSTLLSSPMSDSLTDLAPNTNSLHPNPGFRRAWWTVRRVQAMVAMRVASIALALTCASRTGTSPSLT

SEQ ID NO: 7810 - protein, 67 aa, Glycine max
  peptide (1)..(67): Ceres Seq. ID no. 14306328
  misc_feature (1)..(60): NCBI GI NO: 6319450 NR Description: Regulates respiratory functions
  misc_feature (1)..(34): NCBI GI NO: 30349365 NR Description: leafy cotyledon 1
  misc_feature (1)..(45): NCBI GI NO: 22536010 NR Description: LEC1-like protein [Phaseolus coccineus]
  misc_feature (1)..(25): NCBI GI NO: 3282674 NR Description: CCAAT-box binding factor HAP3 homolog
  misc_feature (1)..(25): NCBI GI NO: 15219151 NR Description: CCAAT-box binding factor HAP3 homolog
  misc_feature (1)..(62): NCBI GI NO: 19114551 NR Description: php3 transcriptional activator
MDYIQHKQEFVGLFEKILLQKPGFEPPVTHPVGVVEADLKSNNTEQSVKNVSKSEVDSSKDKNKVED

SEQ ID NO: 7811 - DNA, 1583 bp, Glycine max
  misc_feature (1)..(1583): Ceres Seq. ID no. 14314792
cctttattctccgtttctggtccgccccttcccttctcttcccatctcatctaaatctcaatctctgtctctgtctctgtccgcctcagctttcactccaaaccctaaccaaccgatctctttcgccgatcccggaaaccttccgaatcgtttaattgacgctacgccgtggaatctgggcggaacaaatccacgatggcggcctccaccaccagccaggtctacatccaggtaatcgacgatgtcatgaacaaggtccgcgacgagttcgtcaacaacggtggtcccggcgacgaagttctcaaggagcttcaatctatatgggaatcgaagatgatgcaagctggtgccattgttggtcccatagaaaggtccggggcgcctaagccaacgcccggtggtccaattactccggttcatgatcttaacatgccttatgaggggactgaggagtatgaaactcccacagcggaaatgcttttcccccctacgccattgcaaactcctcttcaaacccctttaccaggaactgtggataactcaatgtataacattcccactggacctagtgactacccgtctgctggaaatgagcctggtgcaaataacgagataaaaggtggaaggcctggtccatacatgcaacctcctccttcaacgtggacgaaccagaaccagaaccaaagggctccacttgacgtcaatgttgcttacgtggaagggcgggatgaggcggaaagaggagcttcaaatcaacctctgacacaggacttcttcatgtcctcggggaagcggaaacgtgatgaaattgcttctcaatataatgctggtggatatatacctcagcaagatggagctggagatgctgcttctcaaatttttgaaattgaagtgtatggagggggcatgtccattgatgcaggtcactctacttctaaaggaaaaatgccagcacaatcagacaggccagcttctcagattcctcaacttgatggaccaattccctacgatgatgatgtgctttctactccaaatatatacaattatggagtgttcaatgaagactacaacattgcaaatacaccagctccttccgaagtaccagcaagtacccctgctcccattgctcaaaatgaggttgatgaagaagatgatgatgatgagccccccctaaatgaaaatgatgatgatgatttggatgatttggatcagggagaggatcaaaatacacatcatcttgttttggcccagtttgacaaggtgacacgtaccaagagtagatggaagtgcaccctaaaggatggtatcatgcatataaataataaggacattctcttcaataaggcaactggagaatttgacttctgattttgtcagggattggtcttgccatttttgtggcagtgctttggtgaattacaggtactctgaggcatttcctgaagtttgccatttgtcaagtgggatatgtatgtctattagctctgcatacttggacagtttaaactgcagtgactctcgtggttagttttttagccgtcataaagaacaacgataatgtcaagtttgcttttcttggttcc

SEQ ID NO: 7812 - protein, 390 aa, Glycine max
  peptide (1)..(390): Ceres Seq. ID no. 14314793
  misc_feature (4)..(390): Pfam Name: Pfam Description:  Transcription factor IIA, alpha/beta subunit
  misc_feature (4)..(390): NCBI GI NO: 30680148 NR Description: transcription factor IIA large subunit
  misc_feature (4)..(390): NCBI GI NO: 18390773 NR Description: transcription factor IIA large subunit
  misc_feature (4)..(383): NCBI GI NO: 25406978 NR Description: protein F22G5.14 [imported] - Arabidopsis thaliana
  misc_feature (4)..(389): NCBI GI NO: 25406976 NR Description: protein F22G5.18 [imported] - Arabidopsis thaliana
  misc_feature (4)..(182): NCBI GI NO: 1429226 NR Description: TFIIA [Arabidopsis thaliana]
  misc_feature (241)..(390): NCBI GI NO: 1429226 NR Description: TFIIA [Arabidopsis thaliana]
  misc_feature (171)..(390): NCBI GI NO: 17065294 NR Description: similar to TFIIA [Arabidopsis thaliana]
  misc_feature (311)..(390): NCBI GI NO: 15237841 NR Description: hypothetical protein [Arabidopsis thaliana]
  misc_feature (1)..(66): NCBI GI NO: 15237841 NR Description: hypothetical protein [Arabidopsis thaliana]
  misc_feature (312)..(390): NCBI GI NO: 34099900 NR Description: transcription factor IIA large subunit-1
MAASTTSQVYIQVIDDVMNKVRDEFVNNGGPGDEVLKELQSIWESKMMQAGAIVGPIERSGAPKPTPGGPITPVHDLNMPYEGTEEYETPTAEMLFPPTPLQTPLQTPLPGTVDNSMYNIPTGPSDYPSAGNEPGANNEIKGGRPGPYMQPPPSTWTNQNQNQRAPLDVNVAYVEGRDEAERGASNQPLTQDFFMSSGKRKRDEIASQYNAGGYIPQQDGAGDAASQIFEIEVYGGGMSIDAGHSTSKGKMPAQSDRPASQIPQLDGPIPYDDDVLSTPNIYNYGVFNEDYNIANTPAPSEVPASTPAPIAQNEVDEEDDDDEPPLNENDDDDLDDLDQGEDQNTHHLVLAQFDKVTRTKSRWKCTLKDGIMHINNKDILFNKATGEFDF

SEQ ID NO: 7813 - protein, 373 aa, Glycine max
  peptide (1)..(373): Ceres Seq. ID no. 14314794
  misc_feature (1)..(373): Pfam Name: Pfam Description:  Transcription factor IIA, alpha/beta subunit
  misc_feature (1)..(373): NCBI GI NO: 30680148 NR Description: transcription factor IIA large subunit
  misc_feature (1)..(373): NCBI GI NO: 18390773 NR Description: transcription factor IIA large subunit
  misc_feature (1)..(366): NCBI GI NO: 25406978 NR Description: protein F22G5.14 [imported] - Arabidopsis thaliana
  misc_feature (1)..(372): NCBI GI NO: 25406976 NR Description: protein F22G5.18 [imported] - Arabidopsis thaliana
  misc_feature (1)..(165): NCBI GI NO: 1429226 NR Description: TFIIA [Arabidopsis thaliana]
  misc_feature (224)..(373): NCBI GI NO: 1429226 NR Description: TFIIA [Arabidopsis thaliana]
  misc_feature (154)..(373): NCBI GI NO: 17065294 NR Description: similar to TFIIA [Arabidopsis thaliana]
  misc_feature (294)..(373): NCBI GI NO: 15237841 NR Description: hypothetical protein [Arabidopsis thaliana]
  misc_feature (1)..(49): NCBI GI NO: 15237841 NR Description: hypothetical protein [Arabidopsis thaliana]
  misc_feature (295)..(373): NCBI GI NO: 34099900 NR Description: transcription factor IIA large subunit-1
MNKVRDEFVNNGGPGDEVLKELQSIWESKMMQAGAIVGPIERSGAPKPTPGGPITPVHDLNMPYEGTEEYETPTAEMLFPPTPLQTPLQTPLPGTVDNSMYNIPTGPSDYPSAGNEPGANNEIKGGRPGPYMQPPPSTWTNQNQNQRAPLDVNVAYVEGRDEAERGASNQPLTQDFFMSSGKRKRDEIASQYNAGGYIPQQDGAGDAASQIFEIEVYGGGMSIDAGHSTSKGKMPAQSDRPASQIPQLDGPIPYDDDVLSTPNIYNYGVFNEDYNIANTPAPSEVPASTPAPIAQNEVDEEDDDDEPPLNENDDDDLDDLDQGEDQNTHHLVLAQFDKVTRTKSRWKCTLKDGIMHINNKDILFNKATGEFDF

SEQ ID NO: 7814 - protein, 344 aa, Glycine max
  peptide (1)..(344): Ceres Seq. ID no. 14314795
  misc_feature (1)..(344): Pfam Name: Pfam Description:  Transcription factor IIA, alpha/beta subunit
  misc_feature (1)..(344): NCBI GI NO: 30680148 NR Description: transcription factor IIA large subunit
  misc_feature (1)..(344): NCBI GI NO: 18390773 NR Description: transcription factor IIA large subunit
  misc_feature (1)..(337): NCBI GI NO: 25406978 NR Description: protein F22G5.14 [imported] - Arabidopsis thaliana
  misc_feature (1)..(343): NCBI GI NO: 25406976 NR Description: protein F22G5.18 [imported] - Arabidopsis thaliana
  misc_feature (1)..(136): NCBI GI NO: 1429226 NR Description: TFIIA [Arabidopsis thaliana]
  misc_feature (195)..(344): NCBI GI NO: 1429226 NR Description: TFIIA [Arabidopsis thaliana]
  misc_feature (125)..(344): NCBI GI NO: 17065294 NR Description: similar to TFIIA [Arabidopsis thaliana]
  misc_feature (265)..(344): NCBI GI NO: 15237841 NR Description: hypothetical protein [Arabidopsis thaliana]
  misc_feature (1)..(20): NCBI GI NO: 15237841 NR Description: hypothetical protein [Arabidopsis thaliana]
  misc_feature (266)..(344): NCBI GI NO: 34099900 NR Description: transcription factor IIA large subunit-1
MMQAGAIVGPIERSGAPKPTPGGPITPVHDLNMPYEGTEEYETPTAEMLFPPTPLQTPLQTPLPGTVDNSMYNIPTGPSDYPSAGNEPGANNEIKGGRPGPYMQPPPSTWTNQNQNQRAPLDVNVAYVEGRDEAERGASNQPLTQDFFMSSGKRKRDEIASQYNAGGYIPQQDGAGDAASQIFEIEVYGGGMSIDAGHSTSKGKMPAQSDRPASQIPQLDGPIPYDDDVLSTPNIYNYGVFNEDYNIANTPAPSEVPASTPAPIAQNEVDEEDDDDEPPLNENDDDDLDDLDQGEDQNTHHLVLAQFDKVTRTKSRWKCTLKDGIMHINNKDILFNKATGEFDF

SEQ ID NO: 7815 - DNA, 1024 bp, Glycine max
  misc_feature (1)..(1024): Ceres Seq. ID no. 14314739
tcggatgtaatgaaaggagtgatatattgtctttggaatttgactgtgttgtcttcttctttgtgactcactctctcttcagctcttgaatttgatccacctgtgttgcttttcccaccaaaccaaacaaaataacctgatattaacgtaatagtagttcttttatcgaacattgtgccatgacattcgacgaggtttccatggaacacggcaagagcttcatcttcgccttgcaggaacttaagaacctgaggcctcaactctattctgctgcagactactgtgagaaatcttatctcaatagtgataaaaaaccaatggtacttgacaacatgaaagattatgtagtaagggcccttgttaatgctgttgatcatctaggaactgtggcttacaagttaagcgacattcttgagaagcaaacatttgatgtctcgaccatggatttgaaggtctctactttgaatcagagacttcttacatggcatatgtacactgataaagaaggtcttcggcaacagcagttgttggctttcattcccagacatcataagcactacattttgccaaatcccgtcaataaaaaggtacatttcatcccacacagaaaaattggtgcaagacaaaattcatttcaaaccagaactcgtcttcattcttcaggtacccctatttcaaaaactctttcatggcatttagcatcagaaactaagtctaccttaaaaaaacagacttcacgcacttcaaaaaacaccaaggactcaaaattttataagaagatctctggagttttccaccttttagatagtgaagggagtacgcggatgaaaacctcagcagcacaacctcacttgacaaatggagttcctacttctggtgctgccacccaaactatgggtgccacaggcagggtaatgccactttcatcaggttcaaatgcctggtggtgccatgtttgatagaatagtgaaattgtgattattgttgaccaatatgttgctatttattttcgtgtgtttgcaaa

SEQ ID NO: 7816 - protein, 259 aa, Glycine max
  peptide (1)..(259): Ceres Seq. ID no. 14314740
  misc_feature (1)..(235): NCBI GI NO: 18407012 NR Description: expressed protein [Arabidopsis thaliana]
  misc_feature (1)..(235): NCBI GI NO: 26452761 NR Description: unknown protein [Arabidopsis thaliana]
  misc_feature (2)..(196): NCBI GI NO: 34912804 NR Description: P0501G01.11
  misc_feature (19)..(223): NCBI GI NO: 25408977 NR Description: hypothetical protein At2g46220
  misc_feature (1)..(223): NCBI GI NO: 15229112 NR Description: expressed protein [Arabidopsis thaliana]
  misc_feature (1)..(131): NCBI GI NO: 10177091 NR Description: emb|CAB66408
  misc_feature (1)..(131): NCBI GI NO: 30689382 NR Description: expressed protein [Arabidopsis thaliana]
  misc_feature (2)..(130): NCBI GI NO: 34913914 NR Description: OSJNBa0066C06.8
  misc_feature (1)..(232): NCBI GI NO: 15238265 NR Description: expressed protein [Arabidopsis thaliana]
  misc_feature (1)..(130): NCBI GI NO: 21618229 NR Description: unknown [Arabidopsis thaliana]
MTFDEVSMEHGKSFIFALQELKNLRPQLYSAADYCEKSYLNSDKKPMVLDNMKDYVVRALVNAVDHLGTVAYKLSDILEKQTFDVSTMDLKVSTLNQRLLTWHMYTDKEGLRQQQLLAFIPRHHKHYILPNPVNKKVHFIPHRKIGARQNSFQTRTRLHSSGTPISKTLSWHLASETKSTLKKQTSRTSKNTKDSKFYKKISGVFHLLDSEGSTRMKTSAAQPHLTNGVPTSGAATQTMGATGRVMPLSSGSNAWWCHV

SEQ ID NO: 7817 - protein, 252 aa, Glycine max
  peptide (1)..(252): Ceres Seq. ID no. 14314741
  misc_feature (1)..(228): NCBI GI NO: 18407012 NR Description: expressed protein [Arabidopsis thaliana]
  misc_feature (1)..(228): NCBI GI NO: 26452761 NR Description: unknown protein [Arabidopsis thaliana]
  misc_feature (1)..(189): NCBI GI NO: 34912804 NR Description: P0501G01.11
  misc_feature (12)..(216): NCBI GI NO: 25408977 NR Description: hypothetical protein At2g46220
  misc_feature (1)..(216): NCBI GI NO: 15229112 NR Description: expressed protein [Arabidopsis thaliana]
  misc_feature (1)..(124): NCBI GI NO: 10177091 NR Description: emb|CAB66408
  misc_feature (1)..(124): NCBI GI NO: 30689382 NR Description: expressed protein [Arabidopsis thaliana]
  misc_feature (1)..(123): NCBI GI NO: 34913914 NR Description: OSJNBa0066C06.8
  misc_feature (1)..(225): NCBI GI NO: 15238265 NR Description: expressed protein [Arabidopsis thaliana]
  misc_feature (1)..(123): NCBI GI NO: 21618229 NR Description: unknown [Arabidopsis thaliana]
MEHGKSFIFALQELKNLRPQLYSAADYCEKSYLNSDKKPMVLDNMKDYVVRALVNAVDHLGTVAYKLSDILEKQTFDVSTMDLKVSTLNQRLLTWHMYTDKEGLRQQQLLAFIPRHHKHYILPNPVNKKVHFIPHRKIGARQNSFQTRTRLHSSGTPISKTLSWHLASETKSTLKKQTSRTSKNTKDSKFYKKISGVFHLLDSEGSTRMKTSAAQPHLTNGVPTSGAATQTMGATGRVMPLSSGSNAWWCHV

SEQ ID NO: 7818 - protein, 213 aa, Glycine max
  peptide (1)..(213): Ceres Seq. ID no. 14314742
  misc_feature (1)..(189): NCBI GI NO: 18407012 NR Description: expressed protein [Arabidopsis thaliana]
  misc_feature (1)..(189): NCBI GI NO: 26452761 NR Description: unknown protein [Arabidopsis thaliana]
  misc_feature (1)..(150): NCBI GI NO: 34912804 NR Description: P0501G01.11
  misc_feature (1)..(177): NCBI GI NO: 25408977 NR Description: hypothetical protein At2g46220
  misc_feature (1)..(177): NCBI GI NO: 15229112 NR Description: expressed protein [Arabidopsis thaliana]
  misc_feature (1)..(85): NCBI GI NO: 10177091 NR Description: emb|CAB66408
  misc_feature (1)..(85): NCBI GI NO: 30689382 NR Description: expressed protein [Arabidopsis thaliana]
  misc_feature (1)..(84): NCBI GI NO: 34913914 NR Description: OSJNBa0066C06.8
  misc_feature (1)..(186): NCBI GI NO: 15238265 NR Description: expressed protein [Arabidopsis thaliana]
  misc_feature (1)..(84): NCBI GI NO: 21618229 NR Description: unknown [Arabidopsis thaliana]
MVLDNMKDYVVRALVNAVDHLGTVAYKLSDILEKQTFDVSTMDLKVSTLNQRLLTWHMYTDKEGLRQQQLLAFIPRHHKHYILPNPVNKKVHFIPHRKIGARQNSFQTRTRLHSSGTPISKTLSWHLASETKSTLKKQTSRTSKNTKDSKFYKKISGVFHLLDSEGSTRMKTSAAQPHLTNGVPTSGAATQTMGATGRVMPLSSGSNAWWCHV

SEQ ID NO: 7819 - DNA, 952 bp, Glycine max
  misc_feature (1)..(952): Ceres Seq. ID no. 14306198
attgctcctcgcgcttaaacactttcgggcgagtgtgtgtgtagcagtttctggttctgtttttggtttcgtttcagcaaaacctctcttcttcttctgattgattccacctcgcgatttttcgattttcgtttgttttcttctttttcggtttctgatctgaactcgattcgattcgctattgccggaaaatgagtcctccggcaagtgtccggtgatgatcgctccctcgagaggttgttgaggttatcgttgttgttcttcgaagtcatggtttcgatctgaggttttggcgctctcgagttcgttttgtactgttttacgtgtgacatgtgaattggaatgcttattccagcttatacaaaacagagacggatctcttcctattgttctcgctttgtttcttttgcagtagcatcatcatcatcaccataccttgttcagattctgctcactttcaccacaacggctttactatttaccgcgtttcgttttcgtgtcaccgcaaataatgaaaggaggtgttccctgtatccactcctcgtcagggaagatctgaagcagtgctagctgctcacgtcctgtaatggacgcatactcctccggcgaagaagtggttgttaagactagaaaaccatatacaatcactaagcaaagggaacgatggacagaggaggagcataataggtttctagaagctttgaaactacacgggcgagcatggcagcgcatagaagagcatataggaacaaagactgccgtgcaaataaggagtcatgcacagaagttctttacaaaggtcaatgggtaccttctcaccttggtttatatgtttaaaatttccttccttttgtttttaacttatgctttaaaagacttgctgtcgatttatgtatcagttccgtatctcttttgattcactttgatgaataaaaatcccttctaactgccc

SEQ ID NO: 7820 - protein, 109 aa, Glycine max
  peptide (1)..(109): Ceres Seq. ID no. 14306199
  misc_feature (24)..(69): Pfam Name: Pfam Description:  Myb-like DNA-binding domain
  misc_feature (1)..(72): NCBI GI NO: 21213868 NR Description: LHY protein [Phaseolus vulgaris]
  misc_feature (1)..(72): NCBI GI NO: 34499877 NR Description: circadian clock associated1
  misc_feature (1)..(72): NCBI GI NO: 37805865 NR Description: putative LHY protein
  misc_feature (1)..(72): NCBI GI NO: 38455772 NR Description: circadian oscillator component
  misc_feature (1)..(72): NCBI GI NO: 30690518 NR Description: MYB-related transcription factor (CCA1)
  misc_feature (1)..(72): NCBI GI NO: 3281846 NR Description: late elongated hypocotyl [Arabidopsis thaliana]
  misc_feature (1)..(72): NCBI GI NO: 15223290 NR Description: myb family transcription factor
  misc_feature (1)..(71): NCBI GI NO: 6715647 NR Description: T25K16.6 [Arabidopsis thaliana]
  misc_feature (5)..(72): NCBI GI NO: 15240172 NR Description: myb family transcription factor
  misc_feature (2)..(72): NCBI GI NO: 10177075 NR Description: gene_id:MKP11.15~unknown protein
MDAYSSGEEVVVKTRKPYTITKQRERWTEEEHNRFLEALKLHGRAWQRIEEHIGTKTAVQIRSHAQKFFTKVNGYLLTLVYMFKISFLLFLTYALKDLLSIYVSVPYLF

SEQ ID NO: 7821 - protein, 75 aa, Glycine max
  peptide (1)..(75): Ceres Seq. ID no. 14306200
MLIPAYTKQRRISSYCSRFVSFAVASSSSPYLVQILLTFTTTALLFTAFRFRVTANNERRCSLYPLLVREDLKQC

SEQ ID NO: 7822 - DNA, 1640 bp, Glycine max
  misc_feature (1)..(1640): Ceres Seq. ID no. 14314775
actgaacccaaaacaatcgctagagagagaaaccaagagagagaaagatacaactctcgctttcgctattactattatttcctccctcaaaaaaccgccatggacagtgcagacgcgtggcgcgtggccgcgtgtggcaactccaacgtcaacaaaataatgctccgcttccgcccgatcgcgccgaagccggtcaccggaatttccgccgccgaagctggctccgccgtcggagaagttactcagaacaaccacgtgtcagtcctggggaagagaccgaagaggaagtacgttaggattcggaggaacagtggatacgtgagaaagaataacggagacagtaacggaaaaagtaacggtaacggtaacgatgagtcttccgacgtggcggttgtgacgttgcagttgatgcctgagaaggacgcgccgggaggagacgtcacgctcgccggagattcgtggtgtaagaacgttgatcttgacctaaccgtggagaagattcagatcgtggagaatcggagtgctccaccgccgcgcgcggcggcggagaaaggcgagggaggtaagcgttcagatcttgttgcggcggcgaaggtggcggagtcttgggtgacagtggagagcgtgacaggcacgtgcatgggggagggagacggagagggagggcgagggttattagattgtacggacgcggagaaggtgaagagcctagaagctgacacgtgtcctgcttttgtctgtgacggaagccttagggtgcggtgggtgaatgacgcgtacaagaggatgatgctggaggggcgtgagggtgagggtgagaatatcgtggtgtggttgaaagtgaaggatagtgccatcgcttcgtggtggtgctactctcacccggcgttcacctgcggtgtgaggctgcagtacacgtggcggaacgagaagtgcacgaagatggtgccgtgtgatgtttggagattggactgtggcgggtttgcatggaggctagacgtgaaagctgcgctcagtttgggtctctgaaaaaaaaaaaagaaaaaaaaatcagagacacaaacgcgaccttaaacaaatagatcttttatatatatctatatctctctctctatatatatactcacacctttacataaattgctagctctagttccgtggattgaggtcaagctccctctctgcacaaggacgtgtttggttaggtattatattccagtcagagtttttactactgctactgtttaaagaaaatttaaaaattaggcaaaaaaagaaaagtttatctgatatgcaactacattacatactcagatatgagaaagtaagtgagtaatagaggatagaaaaaaatgatgcttgggaatgagattgggatggtgcttcttattactctatggttagtcttcccttgggagttgggagggaagagaaaaaagtagaaacgtgtgggagttaaacatgcaaagtgctactgaaaaaagtgctttgctttgtggtgctatctatggtcttgtagaactaaagctatattaggtgaagtgtgtgtgtaagtgtgtaactatattattgtcgctccaagactttgcgacaatgaaaaaccgtggtaaatatttgcatatatatatatatagtttagc

SEQ ID NO: 7823 - protein, 342 aa, Glycine max
  peptide (1)..(342): Ceres Seq. ID no. 14314776
  misc_feature (49)..(215): NCBI GI NO: 15232126 NR Description: expressed protein [Arabidopsis thaliana]
  misc_feature (201)..(342): NCBI GI NO: 15232126 NR Description: expressed protein [Arabidopsis thaliana]
  misc_feature (50)..(342): NCBI GI NO: 15237494 NR Description: hypothetical protein [Arabidopsis thaliana]
  misc_feature (46)..(340): NCBI GI NO: 15242729 NR Description: expressed protein [Arabidopsis thaliana]
  misc_feature (184)..(342): NCBI GI NO: 15237495 NR Description: hypothetical protein [Arabidopsis thaliana]
  misc_feature (72)..(341): NCBI GI NO: 15240662 NR Description: expressed protein [Arabidopsis thaliana]
  misc_feature (156)..(340): NCBI GI NO: 18408645 NR Description: expressed protein [Arabidopsis thaliana]
  misc_feature (156)..(340): NCBI GI NO: 21537225 NR Description: unknown [Arabidopsis thaliana]
  misc_feature (231)..(331): NCBI GI NO: 34901112 NR Description: hypothetical protein~predicted by FGENESH etc.
  misc_feature (51)..(101): NCBI GI NO: 34901112 NR Description: hypothetical protein~predicted by FGENESH etc.
TEPKTIARERNQERERYNSRFRYYYYFLPQKTAMDSADAWRVAACGNSNVNKIMLRFRPIAPKPVTGISAAEAGSAVGEVTQNNHVSVLGKRPKRKYVRIRRNSGYVRKNNGDSNGKSNGNGNDESSDVAVVTLQLMPEKDAPGGDVTLAGDSWCKNVDLDLTVEKIQIVENRSAPPPRAAAEKGEGGKRSDLVAAAKVAESWVTVESVTGTCMGEGDGEGGRGLLDCTDAEKVKSLEADTCPAFVCDGSLRVRWVNDAYKRMMLEGREGEGENIVVWLKVKDSAIASWWCYSHPAFTCGVRLQYTWRNEKCTKMVPCDVWRLDCGGFAWRLDVKAALSLGL

SEQ ID NO: 7824 - protein, 309 aa, Glycine max
  peptide (1)..(309): Ceres Seq. ID no. 14314777
  misc_feature (16)..(182): NCBI GI NO: 15232126 NR Description: expressed protein [Arabidopsis thaliana]
  misc_feature (168)..(309): NCBI GI NO: 15232126 NR Description: expressed protein [Arabidopsis thaliana]
  misc_feature (17)..(309): NCBI GI NO: 15237494 NR Description: hypothetical protein [Arabidopsis thaliana]
  misc_feature (13)..(307): NCBI GI NO: 15242729 NR Description: expressed protein [Arabidopsis thaliana]
  misc_feature (151)..(309): NCBI GI NO: 15237495 NR Description: hypothetical protein [Arabidopsis thaliana]
  misc_feature (39)..(308): NCBI GI NO: 15240662 NR Description: expressed protein [Arabidopsis thaliana]
  misc_feature (123)..(307): NCBI GI NO: 18408645 NR Description: expressed protein [Arabidopsis thaliana]
  misc_feature (123)..(307): NCBI GI NO: 21537225 NR Description: unknown [Arabidopsis thaliana]
  misc_feature (198)..(298): NCBI GI NO: 34901112 NR Description: hypothetical protein~predicted by FGENESH etc.
  misc_feature (18)..(68): NCBI GI NO: 34901112 NR Description: hypothetical protein~predicted by FGENESH etc.
MDSADAWRVAACGNSNVNKIMLRFRPIAPKPVTGISAAEAGSAVGEVTQNNHVSVLGKRPKRKYVRIRRNSGYVRKNNGDSNGKSNGNGNDESSDVAVVTLQLMPEKDAPGGDVTLAGDSWCKNVDLDLTVEKIQIVENRSAPPPRAAAEKGEGGKRSDLVAAAKVAESWVTVESVTGTCMGEGDGEGGRGLLDCTDAEKVKSLEADTCPAFVCDGSLRVRWVNDAYKRMMLEGREGEGENIVVWLKVKDSAIASWWCYSHPAFTCGVRLQYTWRNEKCTKMVPCDVWRLDCGGFAWRLDVKAALSLGL

SEQ ID NO: 7825 - protein, 289 aa, Glycine max
  peptide (1)..(289): Ceres Seq. ID no. 14314778
  misc_feature (1)..(162): NCBI GI NO: 15232126 NR Description: expressed protein [Arabidopsis thaliana]
  misc_feature (148)..(289): NCBI GI NO: 15232126 NR Description: expressed protein [Arabidopsis thaliana]
  misc_feature (1)..(289): NCBI GI NO: 15237494 NR Description: hypothetical protein [Arabidopsis thaliana]
  misc_feature (1)..(287): NCBI GI NO: 15242729 NR Description: expressed protein [Arabidopsis thaliana]
  misc_feature (131)..(289): NCBI GI NO: 15237495 NR Description: hypothetical protein [Arabidopsis thaliana]
  misc_feature (19)..(288): NCBI GI NO: 15240662 NR Description: expressed protein [Arabidopsis thaliana]
  misc_feature (103)..(287): NCBI GI NO: 18408645 NR Description: expressed protein [Arabidopsis thaliana]
  misc_feature (103)..(287): NCBI GI NO: 21537225 NR Description: unknown [Arabidopsis thaliana]
  misc_feature (178)..(278): NCBI GI NO: 34901112 NR Description: hypothetical protein~predicted by FGENESH etc.
  misc_feature (1)..(48): NCBI GI NO: 34901112 NR Description: hypothetical protein~predicted by FGENESH etc.
MLRFRPIAPKPVTGISAAEAGSAVGEVTQNNHVSVLGKRPKRKYVRIRRNSGYVRKNNGDSNGKSNGNGNDESSDVAVVTLQLMPEKDAPGGDVTLAGDSWCKNVDLDLTVEKIQIVENRSAPPPRAAAEKGEGGKRSDLVAAAKVAESWVTVESVTGTCMGEGDGEGGRGLLDCTDAEKVKSLEADTCPAFVCDGSLRVRWVNDAYKRMMLEGREGEGENIVVWLKVKDSAIASWWCYSHPAFTCGVRLQYTWRNEKCTKMVPCDVWRLDCGGFAWRLDVKAALSLGL

SEQ ID NO: 7826 - DNA, 944 bp, Glycine max
  misc_feature (1)..(944): Ceres Seq. ID no. 14314759
gaccccgggaaaaagaaaagaaaagaaactcacagctattgaatttcacttcacttcacttgcatgccaaatgaaaacaacctcttcccagaatcttgtcggtatttaactccctcgatttcacaacaccaataacaatgagagtttcaacagagacagagccggagactaaaaagataaaacgcattcgcggcggcggggactcgagcaagcaccctttgtaccgcggcgtgcggatgcggaactgggggaagtgggtgtcggaaatccgcgagccgaggaagaaatcgcggatatggctaggcacattccccacgccggaaatggcggcgagagcgcacgacgtcgccgctctcagcatcaaaggccccgccgccattctcaacttccctcacttggccaactcgctcccccgcccggcttcgctggcgccgcgcgacgttcaagctgcggcggcgaaggcggcgcacatggacccttcctccctctcctccttggtctccgcaatggacttgtcctctgcctctgacgagttgagccaaatcatagagcttccttctttggaaagcaccgatgatggctctgttgacttaaagaaggagtttgtttttgttgattcccttgatgcttggatgtatcagccaccctttggttttgacaccgaacaagacactggtttcgagggtttgatgtggaattactaggttcgatccaagtttctattctatgtcttgtgtttgtataaatttatatcgatctcttttatgttttggtttgtgtgtgtctataagcagtaagcagccacttgtggtttttctttcgggggctgccagtgctactgatcactctcgtattcatcatcatgtctctgtgtccttttcttaattcctctgattttaattgtaaatggctagatgaataaagtaagaggagaaattttctgt

SEQ ID NO: 7827 - protein, 188 aa, Glycine max
  peptide (1)..(188): Ceres Seq. ID no. 14314760
  misc_feature (26)..(90): Pfam Name: Pfam Description:  AP2 domain
  misc_feature (8)..(169): NCBI GI NO: 15239501 NR Description: AP2 domain transcription factor TINY
  misc_feature (5)..(150): NCBI GI NO: 15239113 NR Description: AP2 domain transcription factor TINY, putative
  misc_feature (1)..(188): NCBI GI NO: 9279711 NR Description: transcription factor TINY-like protein
  misc_feature (1)..(188): NCBI GI NO: 15228171 NR Description: AP2 domain transcription factor TINY, putative
  misc_feature (22)..(181): NCBI GI NO: 15233928 NR Description: AP2 domain transcription factor TINY, putative
  misc_feature (12)..(122): NCBI GI NO: 34903650 NR Description: B1015E06.8
  misc_feature (4)..(152): NCBI GI NO: 14140163 NR Description: putative AP2 domain containing protein
  misc_feature (9)..(147): NCBI GI NO: 25992102 NR Description: dehydration responsive element binding protein
  misc_feature (18)..(131): NCBI GI NO: 14140155 NR Description: putative AP2 domain transcription factor
  misc_feature (27)..(122): NCBI GI NO: 15223860 NR Description: AP2 domain transcription factor TINY, putative
MRVSTETEPETKKIKRIRGGGDSSKHPLYRGVRMRNWGKWVSEIREPRKKSRIWLGTFPTPEMAARAHDVAALSIKGPAAILNFPHLANSLPRPASLAPRDVQAAAAKAAHMDPSSLSSLVSAMDLSSASDELSQIIELPSLESTDDGSVDLKKEFVFVDSLDAWMYQPPFGFDTEQDTGFEGLMWNY

SEQ ID NO: 7828 - protein, 155 aa, Glycine max
  peptide (1)..(155): Ceres Seq. ID no. 14314761
  misc_feature (1)..(57): Pfam Name: Pfam Description:  AP2 domain
  misc_feature (1)..(136): NCBI GI NO: 15239501 NR Description: AP2 domain transcription factor TINY
  misc_feature (1)..(117): NCBI GI NO: 15239113 NR Description: AP2 domain transcription factor TINY, putative
  misc_feature (1)..(155): NCBI GI NO: 9279711 NR Description: transcription factor TINY-like protein
  misc_feature (1)..(155): NCBI GI NO: 15228171 NR Description: AP2 domain transcription factor TINY, putative
  misc_feature (1)..(148): NCBI GI NO: 15233928 NR Description: AP2 domain transcription factor TINY, putative
  misc_feature (1)..(89): NCBI GI NO: 34903650 NR Description: B1015E06.8
  misc_feature (1)..(119): NCBI GI NO: 14140163 NR Description: putative AP2 domain containing protein
  misc_feature (1)..(114): NCBI GI NO: 25992102 NR Description: dehydration responsive element binding protein
  misc_feature (1)..(98): NCBI GI NO: 14140155 NR Description: putative AP2 domain transcription factor
  misc_feature (1)..(89): NCBI GI NO: 15223860 NR Description: AP2 domain transcription factor TINY, putative
MRNWGKWVSEIREPRKKSRIWLGTFPTPEMAARAHDVAALSIKGPAAILNFPHLANSLPRPASLAPRDVQAAAAKAAHMDPSSLSSLVSAMDLSSASDELSQIIELPSLESTDDGSVDLKKEFVFVDSLDAWMYQPPFGFDTEQDTGFEGLMWNY

SEQ ID NO: 7829 - protein, 126 aa, Glycine max
  peptide (1)..(126): Ceres Seq. ID no. 14314762
  misc_feature (1)..(107): NCBI GI NO: 15239501 NR Description: AP2 domain transcription factor TINY
  misc_feature (1)..(88): NCBI GI NO: 15239113 NR Description: AP2 domain transcription factor TINY, putative
  misc_feature (1)..(126): NCBI GI NO: 9279711 NR Description: transcription factor TINY-like protein
  misc_feature (1)..(126): NCBI GI NO: 15228171 NR Description: AP2 domain transcription factor TINY, putative
  misc_feature (1)..(119): NCBI GI NO: 15233928 NR Description: AP2 domain transcription factor TINY, putative
  misc_feature (1)..(60): NCBI GI NO: 34903650 NR Description: B1015E06.8
  misc_feature (1)..(90): NCBI GI NO: 14140163 NR Description: putative AP2 domain containing protein
  misc_feature (1)..(85): NCBI GI NO: 25992102 NR Description: dehydration responsive element binding protein
  misc_feature (1)..(69): NCBI GI NO: 14140155 NR Description: putative AP2 domain transcription factor
  misc_feature (1)..(60): NCBI GI NO: 15223860 NR Description: AP2 domain transcription factor TINY, putative
MAARAHDVAALSIKGPAAILNFPHLANSLPRPASLAPRDVQAAAAKAAHMDPSSLSSLVSAMDLSSASDELSQIIELPSLESTDDGSVDLKKEFVFVDSLDAWMYQPPFGFDTEQDTGFEGLMWNY

SEQ ID NO: 7830 - DNA, 1605 bp, Glycine max
  misc_feature (1)..(1605): Ceres Seq. ID no. 15171181
attttcatatctcccaacccccaaatggcttcttcttctcgccactcccctcaattcacccccattctagaggagcgtgaatttgacgacttgagtggccatgacattataagccactccagaagctcccaccctccaacccccattgtccacaagcacactaaatccaatcacaacaaccacaagaaaaagagatcagattccgaggaagatggctccgtctcttgcaacaagtgcagacctcactcccgcgacaaaatcttcatccttcccttggatcactcctccaccaacaactctcacaaaccctcttccttactcgccagccccaacgatattttcaggtcccttgtttccaagctcacccgcaagagtcccatgtcttcttcttcatcccaagaccctctcccaccctccagagaggaacaatggaaaatggcagtcgccgaactctctcacaagctgctccacgccaccagaaaaagagacgaggctcttctagaagcttctagactcatgcactccatgagcgagttggagaagaagctcaacaagctcgaactctattgccacaccttgaaatctggcctcgaacaatgcaccaacaacaacattactacttcccctacttcccttttcaaatctcaaaccctcgaacaggacaccgtgattcaacacttcttggtctcggtgtcggaagcaagatcaagtgtgaggcttttgtctcgttccttaaccatgcaactgaggcacatgggaagcaaggtgtacgagaaagtctccttccttctccaaccatacgacataaaaatatccttctccaagagtccaacaagaagcttacttttctacctagaagcactcttgaacagaaccttctacgaggacttcgaaacaatagggttccagaagaacgcgtgcaacatgatactgaacccaaaggagcgatgcgaggcgagttacgagtcattcaacatggttcacgggctgacgtgggaggaggtgctgagcaaaggaacgaggcacttcagcgaggagttcagcaggttttgcgacaggaagatgagcgagatagtggcgatgttgggctggaaccgggcctggcccgaggcactcttgcaggccttctttggggcctcaaagagcgtgtggaaggtgcacttgttggccaactcgctgcacccgagtctgccgatatttagagtggagaaaggagtaaggtttgattcggtttacatggaggatatgggtggtggtggtggtgacaaggccacttccaacttggtccctgctctggtcagaataatgcttgcgccaggcttttatgtctatggcagtgcagtcaagtgtaaggtcctttgcaggtacttgagtactagtagtaacaaggaagacaaacccttaaccccaaccccttcttgactttggatgaatcactttctttctggttttgtttttttatgtcagctaatattgttcatgatgttgtatattattattatttagtattaagcaatgttggtgctgctgcatgcttgggttgggatggttccatggtggtggtactactatatcgagattttgggtcaaagtaaacaatttggc

SEQ ID NO: 7831 - protein, 473 aa, Glycine max
  peptide (1)..(473): Ceres Seq. ID no. 15171182
  misc_feature (51)..(465): NCBI GI NO: 22329507 NR Description: expressed protein [Arabidopsis thaliana]
  misc_feature (117)..(458): NCBI GI NO: 15239939 NR Description: expressed protein [Arabidopsis thaliana]
IFISPNPQMASSSRHSPQFTPILEEREFDDLSGHDIISHSRSSHPPTPIVHKHTKSNHNNHKKKRSDSEEDGSVSCNKCRPHSRDKIFILPLDHSSTNNSHKPSSLLASPNDIFRSLVSKLTRKSPMSSSSSQDPLPPSREEQWKMAVAELSHKLLHATRKRDEALLEASRLMHSMSELEKKLNKLELYCHTLKSGLEQCTNNNITTSPTSLFKSQTLEQDTVIQHFLVSVSEARSSVRLLSRSLTMQLRHMGSKVYEKVSFLLQPYDIKISFSKSPTRSLLFYLEALLNRTFYEDFETIGFQKNACNMILNPKERCEASYESFNMVHGLTWEEVLSKGTRHFSEEFSRFCDRKMSEIVAMLGWNRAWPEALLQAFFGASKSVWKVHLLANSLHPSLPIFRVEKGVRFDSVYMEDMGGGGGDKATSNLVPALVRIMLAPGFYVYGSAVKCKVLCRYLSTSSNKEDKPLTPTPS

SEQ ID NO: 7832 - protein, 465 aa, Glycine max
  peptide (1)..(465): Ceres Seq. ID no. 15171183
  misc_feature (43)..(457): NCBI GI NO: 22329507 NR Description: expressed protein [Arabidopsis thaliana]
  misc_feature (109)..(450): NCBI GI NO: 15239939 NR Description: expressed protein [Arabidopsis thaliana]
MASSSRHSPQFTPILEEREFDDLSGHDIISHSRSSHPPTPIVHKHTKSNHNNHKKKRSDSEEDGSVSCNKCRPHSRDKIFILPLDHSSTNNSHKPSSLLASPNDIFRSLVSKLTRKSPMSSSSSQDPLPPSREEQWKMAVAELSHKLLHATRKRDEALLEASRLMHSMSELEKKLNKLELYCHTLKSGLEQCTNNNITTSPTSLFKSQTLEQDTVIQHFLVSVSEARSSVRLLSRSLTMQLRHMGSKVYEKVSFLLQPYDIKISFSKSPTRSLLFYLEALLNRTFYEDFETIGFQKNACNMILNPKERCEASYESFNMVHGLTWEEVLSKGTRHFSEEFSRFCDRKMSEIVAMLGWNRAWPEALLQAFFGASKSVWKVHLLANSLHPSLPIFRVEKGVRFDSVYMEDMGGGGGDKATSNLVPALVRIMLAPGFYVYGSAVKCKVLCRYLSTSSNKEDKPLTPTPS

SEQ ID NO: 7833 - protein, 347 aa, Glycine max
  peptide (1)..(347): Ceres Seq. ID no. 15171184
  misc_feature (1)..(339): NCBI GI NO: 22329507 NR Description: expressed protein [Arabidopsis thaliana]
  misc_feature (1)..(332): NCBI GI NO: 15239939 NR Description: expressed protein [Arabidopsis thaliana]
MSSSSSQDPLPPSREEQWKMAVAELSHKLLHATRKRDEALLEASRLMHSMSELEKKLNKLELYCHTLKSGLEQCTNNNITTSPTSLFKSQTLEQDTVIQHFLVSVSEARSSVRLLSRSLTMQLRHMGSKVYEKVSFLLQPYDIKISFSKSPTRSLLFYLEALLNRTFYEDFETIGFQKNACNMILNPKERCEASYESFNMVHGLTWEEVLSKGTRHFSEEFSRFCDRKMSEIVAMLGWNRAWPEALLQAFFGASKSVWKVHLLANSLHPSLPIFRVEKGVRFDSVYMEDMGGGGGDKATSNLVPALVRIMLAPGFYVYGSAVKCKVLCRYLSTSSNKEDKPLTPTPS

SEQ ID NO: 7834 - DNA, 1415 bp, Glycine max
  misc_feature (1)..(1415): Ceres Seq. ID no. 14314737
attgagttgtggtcaacagagagaaagtaggagagaaaaaaaaaaagcctcaccgacttcggcgaaatggatctgccgccggcaccgatccggtggcgcgcaaccgcaatcccattctttgtggcggttctctttgtatccaccatctccccttcgcgcgcaatctactgcgacgaagatgattgctacgatctacttggggtttctcaaagtgccaatgcttccgaaattaaaaaagcttactacaagctctccttgaagtatcacccagataaaaaccctgatccggaatcgcgaaagctgtttgtaaaagtcgccaatgcttatgagattttgaaggatgaggccacgcgagaacaatatgattatgcaattgcacatccggaggaggtgttttataatactgcacgctactatcgggcttactatggtcacaagacggatccccgtgctgtgttggttggccttcttcttattctttcaggttttcaatatctaaatcaatcaacaaggtataatcaggctgtagctatggtcaagaagacacctgcatataaaaataaactaagggcattggaacttgaacgcagtggaggggttacaaacaagaagaagagtcagaagaatatggacaagaaaacagaggaagaccttagtaaagaactcgatctgcagataaccggagctgaaatggcctctgtatggaaacttcttggcgtccgctttgttctattaccatataccttaggcaagctgctgttgtggactgcctgttggttttggagatacaaagtgaaaaagtacccttattcttgggaagatgcttcttatctgacacaaagatccctcagtattcctctcgataggtggagaaatatagatgaagcaacaaaggaagatcttgtgctcagacgcttgtgggagaaatcgaatctggagagctatgtagcagagatgcggaaagaatcgaagcgcagaagatagttgcattagtcgcctctgctgcttttaaagtactaaattttgttgcaaattgattttcggggtggccgtgatagaagcagaatcattcgtgtcaaccacaaaatcgtagaatcatatacaaagtttatttagtttacacatgctattgttgctctctaacagcctgtaaacaatgaacaccaaagaatactgctttagatattgcttttattctttcaatgaatcgggtacctgagcctcaatcttgctacaatcgcatgtttggtagtaattttgagtgcctctctagttcaataattttaaggataaagatgtatggataccctaatgttatttgacaccttgagagagatagaagagaaatataggtatgataagtgatgacttgaatgcagatgtacttgaaatatatatccttcgacttttcgtgt

SEQ ID NO: 7835 - protein, 305 aa, Glycine max
  peptide (1)..(305): Ceres Seq. ID no. 14314738
  misc_feature (39)..(103): Pfam Name: Pfam Description:  DnaJ domain
  misc_feature (4)..(305): NCBI GI NO: 30696610 NR Description: DnaJ protein family [Arabidopsis thaliana]
  misc_feature (4)..(271): NCBI GI NO: 25404348 NR Description: hypothetical protein T13M11.13
  misc_feature (107)..(305): NCBI GI NO: 19347731 NR Description: unknown protein [Arabidopsis thaliana]
  misc_feature (19)..(304): NCBI GI NO: 18859921 NR Description: CG7872-PA [Drosophila melanogaster]
  misc_feature (34)..(304): NCBI GI NO: 31219417 NR Description: ENSANGP00000010358 [Anopheles gambiae]
  misc_feature (9)..(304): NCBI GI NO: 12313893 NR Description: bA16L21
  misc_feature (33)..(304): NCBI GI NO: 38078426 NR Description: RIKEN cDNA 2010203O07 [Mus musculus]
  misc_feature (10)..(304): NCBI GI NO: 34868434 NR Description: similar to bA16L21
  misc_feature (12)..(296): NCBI GI NO: 39593758 NR Description: Hypothetical protein CBG06069
  misc_feature (12)..(296): NCBI GI NO: 17538212 NR Description: DNaJ domain (prokaryotic heat shock protein) (40
MDLPPAPIRWRATAIPFFVAVLFVSTISPSRAIYCDEDDCYDLLGVSQSANASEIKKAYYKLSLKYHPDKNPDPESRKLFVKVANAYEILKDEATREQYDYAIAHPEEVFYNTARYYRAYYGHKTDPRAVLVGLLLILSGFQYLNQSTRYNQAVAMVKKTPAYKNKLRALELERSGGVTNKKKSQKNMDKKTEEDLSKELDLQITGAEMASVWKLLGVRFVLLPYTLGKLLLWTACWFWRYKVKKYPYSWEDASYLTQRSLSIPLDRWRNIDEATKEDLVLRRLWEKSNLESYVAEMRKESKRRR

SEQ ID NO: 7836 - DNA, 1073 bp, Glycine max
  misc_feature (1)..(1073): Ceres Seq. ID no. 14314743
gaactctgtctaaaagacactttcttttctgataacatctctactaaaaagttactaaaaatggaaggaagatctatcaccacctccgccgcggagtcatcggagatccaataccatccaccgaaccccccgaaccagatcttcatcctctccggacaaagcaacatggccggacgcggcggcgtcgtcaaggaccaccaccaaaaccgttgggtatgggacaaaatcgttccgtcggaatgctcgccggactcgtcgatcctccgcctgagagcagatctccgatgggaggaagcgcgtgagccgctccacgccgacatcgacaccggcaaagtgtgcggcgtaggtccggggatggcgttcgcgaacgcggtgaggaaacgatccgactcggattccgacgtgatcgggctggttccgtgcgccgtcggtgggacggcgataaaagagtgggagcgtgggagccgtttgtacgagacgatggttaagagagcggaggagagtaggaggtacggtggagagatcaaggcgatgctttggtaccaaggagagagtgacgtgtcggacatccacgacgccgagagttacgggaggaatatgactcgtttggttaagaaccttcgtcatgatcttaaccttccttctcttcccattattcaggtggcgataacatcgggaggagggtatatagataaggtgagggaagcacagttgggtttgaaactttctaatgtggtctgtgtagatgctaaaggattgcagctaaagccggataatcttcacttgaccactgaggctcaagttcagcttggtctctcattagcacaagcttacctttccaacctctgctagactatcaagttattccttgttgagaaatgtgatcgatggtattttaaactctgcgaatgtttgtctacatttctcagaatgagatatgcagtttgagcgatggtactgttgtagagactatgtaatcttttcacctttagagcacacattattattccacgttgttacgttgcaacaatttgctgctctttgtagaatattttgaataaaatgggtttcat

SEQ ID NO: 7837 - protein, 283 aa, Glycine max
  peptide (1)..(283): Ceres Seq. ID no. 14314744
  misc_feature (21)..(283): NCBI GI NO: 21594009 NR Description: unknown [Arabidopsis thaliana]
  misc_feature (21)..(283): NCBI GI NO: 18418402 NR Description: expressed protein [Arabidopsis thaliana]
  misc_feature (9)..(224): NCBI GI NO: 7488258 NR Description: protein kinase homolog F28A23
  misc_feature (46)..(281): NCBI GI NO: 38347110 NR Description: OSJNBa0009K15.7
  misc_feature (43)..(280): NCBI GI NO: 30102980 NR Description: unknown protein
  misc_feature (44)..(282): NCBI GI NO: 30102977 NR Description: hypothetical protein
  misc_feature (44)..(279): NCBI GI NO: 38345580 NR Description: OSJNBa0027H06.16
  misc_feature (47)..(221): NCBI GI NO: 30693749 NR Description: expressed protein [Arabidopsis thaliana]
  misc_feature (56)..(221): NCBI GI NO: 11357879 NR Description: hypothetical protein F8J2
  misc_feature (34)..(276): NCBI GI NO: 29349588 NR Description: acetyl xylan esterase A
ELCLKDTFFSDNISTKKLLKMEGRSITTSAAESSEIQYHPPNPPNQIFILSGQSNMAGRGGVVKDHHQNRWVWDKIVPSECSPDSSILRLRADLRWEEAREPLHADIDTGKVCGVGPGMAFANAVRKRSDSDSDVIGLVPCAVGGTAIKEWERGSRLYETMVKRAEESRRYGGEIKAMLWYQGESDVSDIHDAESYGRNMTRLVKNLRHDLNLPSLPIIQVAITSGGGYIDKVREAQLGLKLSNVVCVDAKGLQLKPDNLHLTTEAQVQLGLSLAQAYLSNLC

SEQ ID NO: 7838 - protein, 263 aa, Glycine max
  peptide (1)..(263): Ceres Seq. ID no. 14314745
  misc_feature (1)..(263): NCBI GI NO: 21594009 NR Description: unknown [Arabidopsis thaliana]
  misc_feature (1)..(263): NCBI GI NO: 18418402 NR Description: expressed protein [Arabidopsis thaliana]
  misc_feature (1)..(204): NCBI GI NO: 7488258 NR Description: protein kinase homolog F28A23
  misc_feature (26)..(261): NCBI GI NO: 38347110 NR Description: OSJNBa0009K15.7
  misc_feature (23)..(260): NCBI GI NO: 30102980 NR Description: unknown protein
  misc_feature (24)..(262): NCBI GI NO: 30102977 NR Description: hypothetical protein
  misc_feature (24)..(259): NCBI GI NO: 38345580 NR Description: OSJNBa0027H06.16
  misc_feature (27)..(201): NCBI GI NO: 30693749 NR Description: expressed protein [Arabidopsis thaliana]
  misc_feature (36)..(201): NCBI GI NO: 11357879 NR Description: hypothetical protein F8J2
  misc_feature (14)..(256): NCBI GI NO: 29349588 NR Description: acetyl xylan esterase A
MEGRSITTSAAESSEIQYHPPNPPNQIFILSGQSNMAGRGGVVKDHHQNRWVWDKIVPSECSPDSSILRLRADLRWEEAREPLHADIDTGKVCGVGPGMAFANAVRKRSDSDSDVIGLVPCAVGGTAIKEWERGSRLYETMVKRAEESRRYGGEIKAMLWYQGESDVSDIHDAESYGRNMTRLVKNLRHDLNLPSLPIIQVAITSGGGYIDKVREAQLGLKLSNVVCVDAKGLQLKPDNLHLTTEAQVQLGLSLAQAYLSNLC

SEQ ID NO: 7839 - protein, 228 aa, Glycine max
  peptide (1)..(228): Ceres Seq. ID no. 14314746
  misc_feature (1)..(228): NCBI GI NO: 21594009 NR Description: unknown [Arabidopsis thaliana]
  misc_feature (1)..(228): NCBI GI NO: 18418402 NR Description: expressed protein [Arabidopsis thaliana]
  misc_feature (1)..(169): NCBI GI NO: 7488258 NR Description: protein kinase homolog F28A23
  misc_feature (1)..(226): NCBI GI NO: 38347110 NR Description: OSJNBa0009K15.7
  misc_feature (1)..(225): NCBI GI NO: 30102980 NR Description: unknown protein
  misc_feature (1)..(227): NCBI GI NO: 30102977 NR Description: hypothetical protein
  misc_feature (1)..(224): NCBI GI NO: 38345580 NR Description: OSJNBa0027H06.16
  misc_feature (1)..(166): NCBI GI NO: 30693749 NR Description: expressed protein [Arabidopsis thaliana]
  misc_feature (1)..(166): NCBI GI NO: 11357879 NR Description: hypothetical protein F8J2
  misc_feature (1)..(221): NCBI GI NO: 29349588 NR Description: acetyl xylan esterase A
MAGRGGVVKDHHQNRWVWDKIVPSECSPDSSILRLRADLRWEEAREPLHADIDTGKVCGVGPGMAFANAVRKRSDSDSDVIGLVPCAVGGTAIKEWERGSRLYETMVKRAEESRRYGGEIKAMLWYQGESDVSDIHDAESYGRNMTRLVKNLRHDLNLPSLPIIQVAITSGGGYIDKVREAQLGLKLSNVVCVDAKGLQLKPDNLHLTTEAQVQLGLSLAQAYLSNLC

SEQ ID NO: 7840 - DNA, 1889 bp, Glycine max
  misc_feature (1)..(1889): Ceres Seq. ID no. 14314755
ctagtttttctaacgtttatgacttttctttcccttcttgggtagtcaggtcccgcagcatcgaaaacctggtctggttcaacatgcataggtagttgagtgcagtgattcagattgtttttttttttttttttggctctttttgctttatttgcactcttcttatcagaaaccaagacaacaagagtttaacgttacttcatcatctctgtctctttgctatttcttttgttagcagaaaccaagacaacaagagttgagtatagtgttcttgtaccacagacagcgcagggtgtagcacatcattcctcgatcgagctcgctccaatggcagagacaccaaacaaaggccacatcgtgatggtacctctcatggcacaaggtcacctcatcccatttctcgcactagcaagacaaatccaacaaaacacaagcttcaccatcaccatagccaacacaccccaaaacattcaacaccttcgatctgcactttcttcttctacttctcctaatcatcaaatccatcttgctgagttagtacccttcaactctacccaacactccaacaaagacaacaacacacaaaaggctcctctcactgacctattgaaacttggctatgcatcactcacccttgagcctccttttcgctccttgatatcacagatcacagaagaagacggtcaccctccactttgcataatatctgacatgttccttggttgggttaacaatgttgcaaagagcttaggcactaggaacctaaccttcaccacttgtggtgcttatggtatcttggcctatatctctatctggtccaacctccctcataggaaaactgattctgatgagttccatgttccgggattccctcaaaactaccgtttccacaaaacacaactgcataggtttcttcaagcggctgatggcaccgatgactggtcaagattcctcgttccacagattcaactttctatgaagtctgatgggtggatttgcaatacgattgaaaagatagagcctttggggttaaagcttctcaggaactatcttcaacttcccgtttgggccgtggggcctctccttccacctgcttcactcatgggttcaaaacatcgttcaggaaaggaaactggcatagctcttgatgcatgcatggagtggctggattcaaaggatgaaaattctgttctctatatttcatttgggtcactgcacactatcaatgcatctcaaatgatggctttggctgagggtttggaagagagtggcaaatcgtttatttgggttataaggccaccagttggttttgacatcaatggagagttcagtccagaatggttgccaaaagggtttgaagagagaatgagagacaccaaacgtggccttttggtgcacaaatggggaccccagttggagattctgtcacacacatccacaggagcttttctaagccattgtggatggaactctgtgttggagagtctcagctatggggtgcctatgattgggtggccaattgttgcagatcaaccttataatgtgaagatgttggtggaagaaatgggtgtggctgtggaacttactcgttctacggaaactgttgtttctagggagaaggttaagaagaccatagaaatagtcatggattatgaagggaagggaaaggtgatgaaggagaaggcaaatgagattgcagcttacattagagaggccaaaacagagaaaggtaaagaaaaagggtcttctgtgagagcaatggatgatcttgttacaaccattttatcacccaaggttctgtgatttgttgcatttagaatttagaatttgaatgatataataaagttgcttgtgtgagcatacttgtcataaactgctcaccaatcttt

SEQ ID NO: 7841 - protein, 491 aa, Glycine max
  peptide (1)..(491): Ceres Seq. ID no. 14314756
  misc_feature (1)..(490): NCBI GI NO: 15239937 NR Description: UDP-glycosyltransferase family
  misc_feature (1)..(490): NCBI GI NO: 18086351 NR Description: AT5g12890/T24H18_60 [Arabidopsis thaliana]
  misc_feature (7)..(476): NCBI GI NO: 34015076 NR Description: glucosyltransferase-like protein [Crocus sativus]
  misc_feature (7)..(491): NCBI GI NO: 38347037 NR Description: OSJNBb0067G11.12
  misc_feature (5)..(482): NCBI GI NO: 38344083 NR Description: OSJNBb0056F09.6
  misc_feature (1)..(479): NCBI GI NO: 21743074 NR Description: OSJNBb0002J11.3
  misc_feature (1)..(485): NCBI GI NO: 38344094 NR Description: OSJNBb0056F09.17
  misc_feature (9)..(489): NCBI GI NO: 15228031 NR Description: UDP-glycosyltransferase family
  misc_feature (9)..(475): NCBI GI NO: 15228034 NR Description: UDP-glycosyltransferase family
  misc_feature (9)..(487): NCBI GI NO: 15228033 NR Description: glycosyltransferase family [Arabidopsis thaliana]
MAETPNKGHIVMVPLMAQGHLIPFLALARQIQQNTSFTITIANTPQNIQHLRSALSSSTSPNHQIHLAELVPFNSTQHSNKDNNTQKAPLTDLLKLGYASLTLEPPFRSLISQITEEDGHPPLCIISDMFLGWVNNVAKSLGTRNLTFTTCGAYGILAYISIWSNLPHRKTDSDEFHVPGFPQNYRFHKTQLHRFLQAADGTDDWSRFLVPQIQLSMKSDGWICNTIEKIEPLGLKLLRNYLQLPVWAVGPLLPPASLMGSKHRSGKETGIALDACMEWLDSKDENSVLYISFGSLHTINASQMMALAEGLEESGKSFIWVIRPPVGFDINGEFSPEWLPKGFEERMRDTKRGLLVHKWGPQLEILSHTSTGAFLSHCGWNSVLESLSYGVPMIGWPIVADQPYNVKMLVEEMGVAVELTRSTETVVSREKVKKTIEIVMDYEGKGKVMKEKANEIAAYIREAKTEKGKEKGSSVRAMDDLVTTILSPKVL

SEQ ID NO: 7842 - protein, 480 aa, Glycine max
  peptide (1)..(480): Ceres Seq. ID no. 14314757
  misc_feature (1)..(479): NCBI GI NO: 15239937 NR Description: UDP-glycosyltransferase family
  misc_feature (1)..(479): NCBI GI NO: 18086351 NR Description: AT5g12890/T24H18_60 [Arabidopsis thaliana]
  misc_feature (1)..(465): NCBI GI NO: 34015076 NR Description: glucosyltransferase-like protein [Crocus sativus]
  misc_feature (1)..(480): NCBI GI NO: 38347037 NR Description: OSJNBb0067G11.12
  misc_feature (1)..(471): NCBI GI NO: 38344083 NR Description: OSJNBb0056F09.6
  misc_feature (1)..(468): NCBI GI NO: 21743074 NR Description: OSJNBb0002J11.3
  misc_feature (1)..(474): NCBI GI NO: 38344094 NR Description: OSJNBb0056F09.17
  misc_feature (1)..(478): NCBI GI NO: 15228031 NR Description: UDP-glycosyltransferase family
  misc_feature (1)..(464): NCBI GI NO: 15228034 NR Description: UDP-glycosyltransferase family
  misc_feature (1)..(476): NCBI GI NO: 15228033 NR Description: glycosyltransferase family [Arabidopsis thaliana]
MVPLMAQGHLIPFLALARQIQQNTSFTITIANTPQNIQHLRSALSSSTSPNHQIHLAELVPFNSTQHSNKDNNTQKAPLTDLLKLGYASLTLEPPFRSLISQITEEDGHPPLCIISDMFLGWVNNVAKSLGTRNLTFTTCGAYGILAYISIWSNLPHRKTDSDEFHVPGFPQNYRFHKTQLHRFLQAADGTDDWSRFLVPQIQLSMKSDGWICNTIEKIEPLGLKLLRNYLQLPVWAVGPLLPPASLMGSKHRSGKETGIALDACMEWLDSKDENSVLYISFGSLHTINASQMMALAEGLEESGKSFIWVIRPPVGFDINGEFSPEWLPKGFEERMRDTKRGLLVHKWGPQLEILSHTSTGAFLSHCGWNSVLESLSYGVPMIGWPIVADQPYNVKMLVEEMGVAVELTRSTETVVSREKVKKTIEIVMDYEGKGKVMKEKANEIAAYIREAKTEKGKEKGSSVRAMDDLVTTILSPKVL

SEQ ID NO: 7843 - protein, 476 aa, Glycine max
  peptide (1)..(476): Ceres Seq. ID no. 14314758
  misc_feature (1)..(475): NCBI GI NO: 15239937 NR Description: UDP-glycosyltransferase family
  misc_feature (1)..(475): NCBI GI NO: 18086351 NR Description: AT5g12890/T24H18_60 [Arabidopsis thaliana]
  misc_feature (1)..(461): NCBI GI NO: 34015076 NR Description: glucosyltransferase-like protein [Crocus sativus]
  misc_feature (1)..(476): NCBI GI NO: 38347037 NR Description: OSJNBb0067G11.12
  misc_feature (1)..(467): NCBI GI NO: 38344083 NR Description: OSJNBb0056F09.6
  misc_feature (1)..(464): NCBI GI NO: 21743074 NR Description: OSJNBb0002J11.3
  misc_feature (1)..(470): NCBI GI NO: 38344094 NR Description: OSJNBb0056F09.17
  misc_feature (1)..(474): NCBI GI NO: 15228031 NR Description: UDP-glycosyltransferase family
  misc_feature (1)..(460): NCBI GI NO: 15228034 NR Description: UDP-glycosyltransferase family
  misc_feature (1)..(472): NCBI GI NO: 15228033 NR Description: glycosyltransferase family [Arabidopsis thaliana]
MAQGHLIPFLALARQIQQNTSFTITIANTPQNIQHLRSALSSSTSPNHQIHLAELVPFNSTQHSNKDNNTQKAPLTDLLKLGYASLTLEPPFRSLISQITEEDGHPPLCIISDMFLGWVNNVAKSLGTRNLTFTTCGAYGILAYISIWSNLPHRKTDSDEFHVPGFPQNYRFHKTQLHRFLQAADGTDDWSRFLVPQIQLSMKSDGWICNTIEKIEPLGLKLLRNYLQLPVWAVGPLLPPASLMGSKHRSGKETGIALDACMEWLDSKDENSVLYISFGSLHTINASQMMALAEGLEESGKSFIWVIRPPVGFDINGEFSPEWLPKGFEERMRDTKRGLLVHKWGPQLEILSHTSTGAFLSHCGWNSVLESLSYGVPMIGWPIVADQPYNVKMLVEEMGVAVELTRSTETVVSREKVKKTIEIVMDYEGKGKVMKEKANEIAAYIREAKTEKGKEKGSSVRAMDDLVTTILSPKVL

SEQ ID NO: 7844 - DNA, 1508 bp, Glycine max
  misc_feature (1)..(1508): Ceres Seq. ID no. 15177652
attcgcactcacactagcacgcaacctgtttgttcgtaaattcggccactccaaagtatatgcaccacaaacaacaacaccatcttaatcttctccacccaaagcgcaacttgcaaaaattacataaattcctagcccaaaaacttgatcagtaaacaaacatgggaagttccgtgcgtgtaaaagaagcatctgtggttacaccttctgagcccactccatcgagtgtgttggctctatcagctcttgattcgcaactcttccttcgtttcaccatagagtatctcttggtctacaacccttgccctggcctggaccaggctgccaccacggcccgtttaaaagcagcattagcccaagcactggttccctactaccccttcgcgggccgggtcaggaccagacccgatggaccgggcctggaggtggtttgcggagcccaaggcgcggtgttcatagaagcctccgctgaccgttacaatgttaacgacttcgagaaagcgcctaaagcagttgcgcactggaggtcgctcttgtcgctccacgtggcagacgttctcaaaggatcgccgccgctggtcgttcagctgacgtggctcggcgacggcgccgccgcaatcggcgtggggatcaaccactgcatctgcgacgggattgggagcgcggagtttctaaaccacttcgccgagttagccaacgagaaacgcgagttgttattattagctcagaggcccaaacataaacctatttgggagcgtcaccttctgaagccaacgcgtgggaagcagacgcgggtagactcggagagtcaccccgagttcaaccgagtcccggatttatgcaacttcatgaacaaagtctcgacggggcttaaaccgacctcggtgaccttcgacaagaggagactaaacgagatgaagagactcgcgagtagcacgagtgaaccaggcgagacggtgtgttacacgtcgttcgaggtgctggcggcgcacgtgtggagaagctgggcgagagcaataaggtttccgccgaatcagaagttgaagctggtgttcagtataaacgtgaggaacagggttaaaccgggtttaccagaggggtattatgggaatgcgtttgttttggggtgtgcggagacgagagcgaaggagctggaggaaagagggatagggttcgggtcgggtttggtgaagcgggcgaaggagagggttgggaatgagcacgtgaggggcgtgatggggatggtgtgggagagaaaagcgtgccctgacccggttggggtgctcatagtgtcgcagtggtccaggctgggtttggagaacattgacctgggtatgggcaagcttcttcacgtcggacccgtgtgctgcgataggtactgcttgtttttgccggtcagagatcagtgtctcagtgtcaaggtcatgctggctgttcccactcacgcccttcacaattaccagctttttatgcgtaataattgatatataaattatcttactcatttt

SEQ ID NO: 7845 - protein, 440 aa, Glycine max
  peptide (1)..(440): Ceres Seq. ID no. 15177653
  misc_feature (3)..(434): Pfam Name: Pfam Description:  Transferase family
  misc_feature (1)..(434): NCBI GI NO: 15225663 NR Description: transferase family [Arabidopsis thaliana]
  misc_feature (9)..(437): NCBI GI NO: 15217644 NR Description: transferase family [Arabidopsis thaliana]
  misc_feature (9)..(434): NCBI GI NO: 34894074 NR Description: putative benzoyltransferase
  misc_feature (12)..(434): NCBI GI NO: 34914932 NR Description: B1096D03.33
  misc_feature (1)..(434): NCBI GI NO: 30693723 NR Description: transferase family [Arabidopsis thaliana]
  misc_feature (1)..(434): NCBI GI NO: 30693725 NR Description: transferase family [Arabidopsis thaliana]
  misc_feature (1)..(440): NCBI GI NO: 15218793 NR Description: transferase family [Arabidopsis thaliana]
  misc_feature (8)..(438): NCBI GI NO: 15229017 NR Description: transferase family [Arabidopsis thaliana]
  misc_feature (4)..(400): NCBI GI NO: 34900746 NR Description: putative benzoyl coenzyme A: benzyl alcohol benzoyltransferase
  misc_feature (4)..(400): NCBI GI NO: 37535814 NR Description: putative hypersensitivity-related (hsr)protein
MGSSVRVKEASVVTPSEPTPSSVLALSALDSQLFLRFTIEYLLVYNPCPGLDQAATTARLKAALAQALVPYYPFAGRVRTRPDGPGLEVVCGAQGAVFIEASADRYNVNDFEKAPKAVAHWRSLLSLHVADVLKGSPPLVVQLTWLGDGAAAIGVGINHCICDGIGSAEFLNHFAELANEKRELLLLAQRPKHKPIWERHLLKPTRGKQTRVDSESHPEFNRVPDLCNFMNKVSTGLKPTSVTFDKRRLNEMKRLASSTSEPGETVCYTSFEVLAAHVWRSWARAIRFPPNQKLKLVFSINVRNRVKPGLPEGYYGNAFVLGCAETRAKELEERGIGFGSGLVKRAKERVGNEHVRGVMGMVWERKACPDPVGVLIVSQWSRLGLENIDLGMGKLLHVGPVCCDRYCLFLPVRDQCLSVKVMLAVPTHALHNYQLFMRNN

SEQ ID NO: 7846 - DNA, 941 bp, Glycine max
  misc_feature (1)..(941): Ceres Seq. ID no. 14306279
atccttttctctgggaattatagtttgtagagaacacatacatacattttcattttcagaggaatgatcatggaagaatcctcggtacacgagatcaaaacccctctcctgtcatctaacaatgaggaagatgaagttggaagcagtactagccataggcagcaaaatgaagagaactcgcccataaaacaagtggccctaacggtgccaaccaccgatgacccatctcttccagttctgacgttccgaatgtgggtgttgggaactctatcatgcgtgctgctgtcgttcctgaaccagttcttctggtaccgcatccagcctctcaccatcaccgcgatctccgcccagatcgcggtggtgccgctcggccaactcatggccgcaacgatcactaagcgcgtgttcttcagaggaacacgctgggaattcactctcaatccgggacccttcaacgtcaaggagcacgttctcatcaccatcttcgccaactccggcgccggcaccgtctacgccatccacgttgttaccgctgtcaaaatcttttaccacaaacacatctccttctttgtctccttgcttgtggtcatcaccacacaggtattgggtttcggatgggctggcatatttagaagatacctggtagagccagcggcaatgtggtggccagcaaatttagttcaagtttcactcttcaggtaataattataatactacagcattaacattttattattctaatttatatggtcaatatgaagagtaaatgtattgaatactatgctctagctagtaacttgacacactacgtaagaattagttagttcgccgacaatatcgtaataagatacaaaagtatccatacctaccaataacatcaatgtaatatatttacgattttttagtttacctatatgtcatcactcactcttgcgtggtgt

SEQ ID NO: 7847 - protein, 212 aa, Glycine max
  peptide (1)..(212): Ceres Seq. ID no. 14306280
  misc_feature (58)..(212): Pfam Name: Pfam Description:  OPT oligopeptide transporter protein
  misc_feature (28)..(212): NCBI GI NO: 15236912 NR Description: oligopeptide transporter -related
  misc_feature (27)..(212): NCBI GI NO: 34898010 NR Description: EST D25093
  misc_feature (4)..(212): NCBI GI NO: 25553564 NR Description: putative isp4 protein
  misc_feature (36)..(212): NCBI GI NO: 34898034 NR Description: Similar to Arabidopsis thaliana BAC T12H20
  misc_feature (4)..(211): NCBI GI NO: 34898012 NR Description: ESTs D25093
  misc_feature (30)..(212): NCBI GI NO: 15238763 NR Description: isp4 protein [Arabidopsis thaliana]
  misc_feature (34)..(211): NCBI GI NO: 15238761 NR Description: isp4 protein [Arabidopsis thaliana]
  misc_feature (35)..(211): NCBI GI NO: 15234254 NR Description: expressed protein [Arabidopsis thaliana]
  misc_feature (33)..(212): NCBI GI NO: 15236800 NR Description: isp4 like protein [Arabidopsis thaliana]
  misc_feature (21)..(212): NCBI GI NO: 38347072 NR Description: OSJNBa0006A01.13
MIMEESSVHEIKTPLLSSNNEEDEVGSSTSHRQQNEENSPIKQVALTVPTTDDPSLPVLTFRMWVLGTLSCVLLSFLNQFFWYRIQPLTITAISAQIAVVPLGQLMAATITKRVFFRGTRWEFTLNPGPFNVKEHVLITIFANSGAGTVYAIHVVTAVKIFYHKHISFFVSLLVVITTQVLGFGWAGIFRRYLVEPAAMWWPANLVQVSLFR

SEQ ID NO: 7848 - protein, 210 aa, Glycine max
  peptide (1)..(210): Ceres Seq. ID no. 14306281
  misc_feature (56)..(210): Pfam Name: Pfam Description:  OPT oligopeptide transporter protein
  misc_feature (26)..(210): NCBI GI NO: 15236912 NR Description: oligopeptide transporter -related
  misc_feature (25)..(210): NCBI GI NO: 34898010 NR Description: EST D25093
  misc_feature (2)..(210): NCBI GI NO: 25553564 NR Description: putative isp4 protein
  misc_feature (34)..(210): NCBI GI NO: 34898034 NR Description: Similar to Arabidopsis thaliana BAC T12H20
  misc_feature (2)..(209): NCBI GI NO: 34898012 NR Description: ESTs D25093
  misc_feature (28)..(210): NCBI GI NO: 15238763 NR Description: isp4 protein [Arabidopsis thaliana]
  misc_feature (32)..(209): NCBI GI NO: 15238761 NR Description: isp4 protein [Arabidopsis thaliana]
  misc_feature (33)..(209): NCBI GI NO: 15234254 NR Description: expressed protein [Arabidopsis thaliana]
  misc_feature (31)..(210): NCBI GI NO: 15236800 NR Description: isp4 like protein [Arabidopsis thaliana]
  misc_feature (19)..(210): NCBI GI NO: 38347072 NR Description: OSJNBa0006A01.13
MEESSVHEIKTPLLSSNNEEDEVGSSTSHRQQNEENSPIKQVALTVPTTDDPSLPVLTFRMWVLGTLSCVLLSFLNQFFWYRIQPLTITAISAQIAVVPLGQLMAATITKRVFFRGTRWEFTLNPGPFNVKEHVLITIFANSGAGTVYAIHVVTAVKIFYHKHISFFVSLLVVITTQVLGFGWAGIFRRYLVEPAAMWWPANLVQVSLFR

SEQ ID NO: 7849 - protein, 150 aa, Glycine max
  peptide (1)..(150): Ceres Seq. ID no. 14306282
  misc_feature (1)..(150): Pfam Name: Pfam Description:  OPT oligopeptide transporter protein
  misc_feature (1)..(150): NCBI GI NO: 15236912 NR Description: oligopeptide transporter -related
  misc_feature (1)..(150): NCBI GI NO: 34898010 NR Description: EST D25093
  misc_feature (1)..(150): NCBI GI NO: 25553564 NR Description: putative isp4 protein
  misc_feature (1)..(150): NCBI GI NO: 34898034 NR Description: Similar to Arabidopsis thaliana BAC T12H20
  misc_feature (1)..(149): NCBI GI NO: 34898012 NR Description: ESTs D25093
  misc_feature (1)..(150): NCBI GI NO: 15238763 NR Description: isp4 protein [Arabidopsis thaliana]
  misc_feature (1)..(149): NCBI GI NO: 15238761 NR Description: isp4 protein [Arabidopsis thaliana]
  misc_feature (1)..(149): NCBI GI NO: 15234254 NR Description: expressed protein [Arabidopsis thaliana]
  misc_feature (1)..(150): NCBI GI NO: 15236800 NR Description: isp4 like protein [Arabidopsis thaliana]
  misc_feature (1)..(150): NCBI GI NO: 38347072 NR Description: OSJNBa0006A01.13
MWVLGTLSCVLLSFLNQFFWYRIQPLTITAISAQIAVVPLGQLMAATITKRVFFRGTRWEFTLNPGPFNVKEHVLITIFANSGAGTVYAIHVVTAVKIFYHKHISFFVSLLVVITTQVLGFGWAGIFRRYLVEPAAMWWPANLVQVSLFR

SEQ ID NO: 7850 - DNA, 1357 bp, Glycine max
  misc_feature (1)..(1357): Ceres Seq. ID no. 14314632
aacatcctcacacacccctttctttctttcttcacttcattccccttatcctctcttcagttacacacattctcagcaaaactttgtgagcattgtctattgctacatgcttatctaatcttgttacagggcttaaaagtgtgtgatgcaagcaatggagaacattcatcagagggaaatattggaagagcaaaggtttgaattgccaccaggattcaggtttcatccaacagatgaagaactcatcactcactacctctcacagaaggttcttgatagctgcttctgtgccagagccattggagaggctgatttgaacaagtgtgaaccatgggatttgccttggatggccaaaatgggtgaaaaggagtggtattttttctgtgtgagggacagaaaatacccaactggtcaaaggactaatagggccactggtgttggctactggaaggcaacaggcaaggacagagagatatataaggcaaaggcactgattggaatgaagaaaactcttgttttctacaaaggaagagctccaagtggtgaaaaaactagctgggtcatgcatgaatacagattagaagatgaacattctgtgcacaatccacccaaaaaggccatgatgatttgggccatctgcaggatttttcagaagagtaatggtgggaagaaaatgccaatttctggttggtgagattcagcaattttgcaaaggacatgccttcatgatggattcttctccatacaacgacagtgaatcaaaacctgttttgggggagtcatcacagccaacatgcttctctgatccaaaccaaagtgaggaccagaggacacaagatgaaaacatagcggatagctatgaaactctcatgttggcatcttcatattcttcaaacccctctgatatttcccctgcctcatggactttttctaaatctgcccctaccgtgtcccaccaatcactccaagttgggaattcacacagctcagattacttcatgcttcatcaggaacagtccatgttggggatgttgattgaaaaccatggagcaagtgctggccaaagaactcagaaagctcaggatagtaaaggctctgatgctgacatgtcctctgtgatgtacaacaactatgaaatgttccaaagatcatttgggaaccaggaatattcatcaccttccgtaggacatgtgtattctagtggcctatggggattttaaagaaggttgaaggatacactatatgcagattaaaattagagaaactttagggattaaatgctattatacatgtaaataaattgctcttaagctaatgttatcctacaaagtacaggaaatggatgttacggttttcc

SEQ ID NO: 7851 - protein, 186 aa, Glycine max
  peptide (1)..(186): Ceres Seq. ID no. 14314633
MVGRKCQFLVGEIQQFCKGHAFMMDSSPYNDSESKPVLGESSQPTCFSDPNQSEDQRTQDENIADSYETLMLASSYSSNPSDISPASWTFSKSAPTVSHQSLQVGNSHSSDYFMLHQEQSMLGMLIENHGASAGQRTQKAQDSKGSDADMSSVMYNNYEMFQRSFGNQEYSSPSVGHVYSSGLWGF

SEQ ID NO: 7852 - protein, 182 aa, Glycine max
  peptide (1)..(182): Ceres Seq. ID no. 14314634
  misc_feature (20)..(146): Pfam Name: NAM Pfam Description: No apical meristem
  misc_feature (14)..(180): NCBI GI NO: 15240252 NR Description: NAM, no apical meristem, - like protein
  misc_feature (19)..(180): NCBI GI NO: 21537315 NR Description: NAM, no apical meristem,-like protein
  misc_feature (14)..(181): NCBI GI NO: 22597158 NR Description: no apical meristem-like protein [Glycine max]
  misc_feature (14)..(180): NCBI GI NO: 30682048 NR Description: NAM (no apical meristem)-related protein
  misc_feature (11)..(180): NCBI GI NO: 15241819 NR Description: NAM / CUC2 - like protein [Arabidopsis thaliana]
  misc_feature (19)..(180): NCBI GI NO: 30682054 NR Description: NAM (no apical meristem)-related protein
  misc_feature (14)..(180): NCBI GI NO: 21536866 NR Description: NAM / CUC2-like protein [Arabidopsis thaliana]
  misc_feature (29)..(181): NCBI GI NO: 21105757 NR Description: nam-like protein 14 [Petunia x hybrida]
  misc_feature (15)..(172): NCBI GI NO: 9758909 NR Description: NAM (no apical meristem)-like protein
  misc_feature (15)..(172): NCBI GI NO: 30686737 NR Description: NAM (no apical meristem)-related protein
MQAMENIHQREILEEQRFELPPGFRFHPTDEELITHYLSQKVLDSCFCARAIGEADLNKCEPWDLPWMAKMGEKEWYFFCVRDRKYPTGQRTNRATGVGYWKATGKDREIYKAKALIGMKKTLVFYKGRAPSGEKTSWVMHEYRLEDEHSVHNPPKKAMMIWAICRIFQKSNGGKKMPISGW

SEQ ID NO: 7853 - protein, 179 aa, Glycine max
  peptide (1)..(179): Ceres Seq. ID no. 14314635
  misc_feature (17)..(143): Pfam Name: NAM Pfam Description: No apical meristem
  misc_feature (11)..(177): NCBI GI NO: 15240252 NR Description: NAM, no apical meristem, - like protein
  misc_feature (16)..(177): NCBI GI NO: 21537315 NR Description: NAM, no apical meristem,-like protein
  misc_feature (11)..(178): NCBI GI NO: 22597158 NR Description: no apical meristem-like protein [Glycine max]
  misc_feature (11)..(177): NCBI GI NO: 30682048 NR Description: NAM (no apical meristem)-related protein
  misc_feature (8)..(177): NCBI GI NO: 15241819 NR Description: NAM / CUC2 - like protein [Arabidopsis thaliana]
  misc_feature (16)..(177): NCBI GI NO: 30682054 NR Description: NAM (no apical meristem)-related protein
  misc_feature (11)..(177): NCBI GI NO: 21536866 NR Description: NAM / CUC2-like protein [Arabidopsis thaliana]
  misc_feature (26)..(178): NCBI GI NO: 21105757 NR Description: nam-like protein 14 [Petunia x hybrida]
  misc_feature (12)..(169): NCBI GI NO: 9758909 NR Description: NAM (no apical meristem)-like protein
  misc_feature (12)..(169): NCBI GI NO: 30686737 NR Description: NAM (no apical meristem)-related protein
MENIHQREILEEQRFELPPGFRFHPTDEELITHYLSQKVLDSCFCARAIGEADLNKCEPWDLPWMAKMGEKEWYFFCVRDRKYPTGQRTNRATGVGYWKATGKDREIYKAKALIGMKKTLVFYKGRAPSGEKTSWVMHEYRLEDEHSVHNPPKKAMMIWAICRIFQKSNGGKKMPISGW

SEQ ID NO: 7854 - DNA, 1484 bp, Glycine max
  misc_feature (1)..(1484): Ceres Seq. ID no. 14314655
aatcatataaataaataaacatagtataattaattgatcgtcgatggtagtagtatgttgagggggctgtttgtgtttggtggcacgtgctgcaggagattgacgttggcacgacagtccacgcagaaacagaaacagtggtgggatcatcttcatcatcatcttcgctccaaaaaccttcattgggcaggtctcatggagagtaatgggaactcggtgaaggatgctgagaaacaaatcacccgtgttttgttttgtggaccccgtttccctgcttctcatgaatatacaattgagtatttgcaaaatcattcacatatcaaggttgatgttctccctttagaagatgtgccaaaggatattgccaactatcatgtctgcatagtaaaaaacatgaggctagattcagaaataatttctcgtgcagttcagatgcagcttataatgcagtatggtgttgggctggaaggtgttgatattgatgctgcaacaaagcatggaatcaaagttgctaggataccaggtgatgtttcgggaaattcagcttcatgtgctgaaatggccatatatctaatgctgggtctcctccgtaagcaaaatgaactgcaagtttccatacaacaaaagaagcttggagagccaattaccgaaactttacttgggaaaactatattcattttgggctttgggaacattggaatggatttagcaaagcgattgcaaccctttggtgtaaaagttattgctataaagcggagctgggcttcatatgcacaacatgctagcaaattaagcagaaatgatgctgaagatcttgttgatgtgaagggtagtcatgaagatatatatgagtttgcaaggaaggctgacattgttgtttgctgcctaacattaaacagagaaacggttggtataataaacaataagtttatatcttctatgaaaaagggtggccttctggtgaatgttgctagaggtggtcttgtagactatgaggctgtgatcaaccaccttgaatcaggtcatttaggagggttaggcactgatgttgcttggactgagccatttaaccctgatgatcagatatttaaatttaagaatgttatcatgactcctcatgttgcaggcgttacagagcattcttatagatccatggctaaggctgttggtgatgtcgttcttcaacttcatgccgggcttcctttgacagggatagagttagttaactgaattagtgccaacaattcattccagtatcttcaactaaatgacttttataattcaagatgaattttctgaggtgcaaaaacacttaatattttgtaaagaaaatttagatgaggcaatgcttatgtgttgcccatttgttattctatggttgtggtgaaccaattgttctttagtagcgggttgtgttacagtatgcgattttatgaattttctagttctattttgccactatttatatacacggacaaatatat

SEQ ID NO: 7855 - protein, 391 aa, Glycine max
  peptide (1)..(391): Ceres Seq. ID no. 14314656
  misc_feature (166)..(355): Pfam Name: Pfam Description:  D-isomer specific 2-hydroxyacid dehydrogenase
  misc_feature (55)..(391): NCBI GI NO: 25406154 NR Description: hypothetical protein T9N14.9
  misc_feature (55)..(391): NCBI GI NO: 30698851 NR Description: oxidoreductase family [Arabidopsis thaliana]
  misc_feature (65)..(391): NCBI GI NO: 34901058 NR Description: putative phosphoglycerate dehydrogenase
  misc_feature (89)..(290): NCBI GI NO: 34901040 NR Description: putative phosphoglycerate dehydrogenase
  misc_feature (73)..(384): NCBI GI NO: 11498419 NR Description: phosphoglycerate dehydrogenase (serA)
  misc_feature (102)..(385): NCBI GI NO: 15614165 NR Description: D-3-phosphoglycerate dehydrogenase
  misc_feature (77)..(391): NCBI GI NO: 14521645 NR Description: GLYCERATE DEHYDROGENASE [Pyrococcus abyssi]
  misc_feature (250)..(371): NCBI GI NO: 34901040 NR Description: putative phosphoglycerate dehydrogenase
  misc_feature (115)..(381): NCBI GI NO: 13516509 NR Description: glyoxylate reductase [Thermococcus litoralis]
  misc_feature (116)..(381): NCBI GI NO: 19552504 NR Description: phosphoglycerate dehydrogenase
MLRGLFVFGGTCCRRLTLARQSTQKQKQWWDHLHHHLRSKNLHWAGLMESNGNSVKDAEKQITRVLFCGPRFPASHEYTIEYLQNHSHIKVDVLPLEDVPKDIANYHVCIVKNMRLDSEIISRAVQMQLIMQYGVGLEGVDIDAATKHGIKVARIPGDVSGNSASCAEMAIYLMLGLLRKQNELQVSIQQKKLGEPITETLLGKTIFILGFGNIGMDLAKRLQPFGVKVIAIKRSWASYAQHASKLSRNDAEDLVDVKGSHEDIYEFARKADIVVCCLTLNRETVGIINNKFISSMKKGGLLVNVARGGLVDYEAVINHLESGHLGGLGTDVAWTEPFNPDDQIFKFKNVIMTPHVAGVTEHSYRSMAKAVGDVVLQLHAGLPLTGIELVN

SEQ ID NO: 7856 - protein, 344 aa, Glycine max
  peptide (1)..(344): Ceres Seq. ID no. 14314657
  misc_feature (119)..(308): Pfam Name: Pfam Description:  D-isomer specific 2-hydroxyacid dehydrogenase
  misc_feature (8)..(344): NCBI GI NO: 25406154 NR Description: hypothetical protein T9N14.9
  misc_feature (8)..(344): NCBI GI NO: 30698851 NR Description: oxidoreductase family [Arabidopsis thaliana]
  misc_feature (18)..(344): NCBI GI NO: 34901058 NR Description: putative phosphoglycerate dehydrogenase
  misc_feature (42)..(243): NCBI GI NO: 34901040 NR Description: putative phosphoglycerate dehydrogenase
  misc_feature (26)..(337): NCBI GI NO: 11498419 NR Description: phosphoglycerate dehydrogenase (serA)
  misc_feature (55)..(338): NCBI GI NO: 15614165 NR Description: D-3-phosphoglycerate dehydrogenase
  misc_feature (30)..(344): NCBI GI NO: 14521645 NR Description: GLYCERATE DEHYDROGENASE [Pyrococcus abyssi]
  misc_feature (203)..(324): NCBI GI NO: 34901040 NR Description: putative phosphoglycerate dehydrogenase
  misc_feature (68)..(334): NCBI GI NO: 13516509 NR Description: glyoxylate reductase [Thermococcus litoralis]
  misc_feature (69)..(334): NCBI GI NO: 19552504 NR Description: phosphoglycerate dehydrogenase
MESNGNSVKDAEKQITRVLFCGPRFPASHEYTIEYLQNHSHIKVDVLPLEDVPKDIANYHVCIVKNMRLDSEIISRAVQMQLIMQYGVGLEGVDIDAATKHGIKVARIPGDVSGNSASCAEMAIYLMLGLLRKQNELQVSIQQKKLGEPITETLLGKTIFILGFGNIGMDLAKRLQPFGVKVIAIKRSWASYAQHASKLSRNDAEDLVDVKGSHEDIYEFARKADIVVCCLTLNRETVGIINNKFISSMKKGGLLVNVARGGLVDYEAVINHLESGHLGGLGTDVAWTEPFNPDDQIFKFKNVIMTPHVAGVTEHSYRSMAKAVGDVVLQLHAGLPLTGIELVN

SEQ ID NO: 7857 - protein, 278 aa, Glycine max
  peptide (1)..(278): Ceres Seq. ID no. 14314658
  misc_feature (53)..(242): Pfam Name: Pfam Description:  D-isomer specific 2-hydroxyacid dehydrogenase
  misc_feature (1)..(278): NCBI GI NO: 25406154 NR Description: hypothetical protein T9N14.9
  misc_feature (1)..(278): NCBI GI NO: 30698851 NR Description: oxidoreductase family [Arabidopsis thaliana]
  misc_feature (1)..(278): NCBI GI NO: 34901058 NR Description: putative phosphoglycerate dehydrogenase
  misc_feature (1)..(177): NCBI GI NO: 34901040 NR Description: putative phosphoglycerate dehydrogenase
  misc_feature (1)..(271): NCBI GI NO: 11498419 NR Description: phosphoglycerate dehydrogenase (serA)
  misc_feature (1)..(272): NCBI GI NO: 15614165 NR Description: D-3-phosphoglycerate dehydrogenase
  misc_feature (1)..(278): NCBI GI NO: 14521645 NR Description: GLYCERATE DEHYDROGENASE [Pyrococcus abyssi]
  misc_feature (137)..(258): NCBI GI NO: 34901040 NR Description: putative phosphoglycerate dehydrogenase
  misc_feature (2)..(268): NCBI GI NO: 13516509 NR Description: glyoxylate reductase [Thermococcus litoralis]
  misc_feature (3)..(268): NCBI GI NO: 19552504 NR Description: phosphoglycerate dehydrogenase
MRLDSEIISRAVQMQLIMQYGVGLEGVDIDAATKHGIKVARIPGDVSGNSASCAEMAIYLMLGLLRKQNELQVSIQQKKLGEPITETLLGKTIFILGFGNIGMDLAKRLQPFGVKVIAIKRSWASYAQHASKLSRNDAEDLVDVKGSHEDIYEFARKADIVVCCLTLNRETVGIINNKFISSMKKGGLLVNVARGGLVDYEAVINHLESGHLGGLGTDVAWTEPFNPDDQIFKFKNVIMTPHVAGVTEHSYRSMAKAVGDVVLQLHAGLPLTGIELVN

SEQ ID NO: 7858 - DNA, 1983 bp, Glycine max
  misc_feature (1)..(1983): Ceres Seq. ID no. 14314659
aagcgcccgccattgccaaagagaagagtgcgaaacaagaagaagaaaatttctcatttctcgttctgaaaatcggagttcaacgctattattatatttgtgatatcttctatctgattcagcatcatggttcagctaatgaggtctgatacggataatcactgtctgaaaaaggtgaagttggaggttcaagatgaaatcccccctcttcacactcacaagcgacccaaattggaatctccccctaagtgtggtgcaagcgatgaatccatttcaatcccaccagcttcatacaatcccttggatgagccaagccctttgggtttgcgtctcaggaagagtccctcccttttggatttgattcagatgaggctctcgcaacaagaggaatccaaaaagaaagatcaaaaggcttcttcttcttcttctgctgctgctgctgctgctgctgctgattctaaacttaaggcctccaattttcctggaaccattttgaaaattgggaattgggagtataagtctagatatgaaggagacttggtggcgaagtgttactttgcgaagcataagctggtatgggaagtccttgatggttgtcttaagaataagattgaaatcccatggtctgatatcatggctatcaaggctaactaccctgatgatggaccaggtacgctcgaagtagtgcttgcaagaagacccttgttttttagggagatcaatccacagccaaggaagcataccttatggcaggcaacatcggactttactggtggacaagccggcataaacaggcgacattttctgcagtgtccacaaggattgctaggcaagcattttgagaagctcattcagtgtgatccccgtctcaactatctaagccagcaggcggatttggtgttggattctccgtattttgaacctggaacaacttcaattcacgaccacattgaatctagtgatggctttgatagaaaaagcgaagagcgatctggtatttttggattgcaggatgtggagtcaggatctgcagttcaatcatcttcctcaaaaagtgaacataaccttggtaaagctgttgaaaatgtttcccaagaaattacctcacctagctcagtgatgaacatccatgcaatgaaagatttcaggagtagaggagctgaaacattgaagtttcttagtaatttggaccagatcaaattgcctggacttcacccttctatgtcaatggacgatttggttagccacattggacattgcatttcagaacagatgggatctgacaatccaaatttcgctggtgacaaccagtatagcagatctattctggaagaatttactcagtacttgttcaatgactctcaacatgcaactacctccgatgaacagcgtgtcatgtcaaaggtaaactcactctactgccttctgcagaaggatccttctacagcagaagacatgaccaaaaatggcaatagtctgggagatgcaaatgccttgtcaagggtgaactcactatactcccttctgcagaatgcagaagacgcaatggccagaaatggcaatggtctgagagatgcagatgtgatgtcaagggtgaactcgctgtactgtcttctgcagaaggatccttatacagcagaagacacaaacacaatgacaagaaatggcaatggtcttgatgcagatgagggtggaaaagttggtgtgagtaactccactgaattgtcacaaccatgcaaaactaaagtgtctgatttggaagttcaagcggatgatgcttctggctgcaagcagggggggactggtatgtccaggaaggaatcagctggcgatttgcttcttaatcttccaagggtggcatctctgcttcagtttttgtttaacatgtccgaggattctgttaataaagttagatagatagtaaccatctttcaaaacttgcaagaaacacaaaagctatattatcaacaatgtgaatattgt

SEQ ID NO: 7859 - protein, 596 aa, Glycine max
  peptide (1)..(596): Ceres Seq. ID no. 14314660
  misc_feature (17)..(423): NCBI GI NO: 15234853 NR Description: expressed protein [Arabidopsis thaliana]
  misc_feature (483)..(590): NCBI GI NO: 15234853 NR Description: expressed protein [Arabidopsis thaliana]
  misc_feature (1)..(340): NCBI GI NO: 25371341 NR Description: hypothetical protein At2g24100
  misc_feature (519)..(590): NCBI GI NO: 25371341 NR Description: hypothetical protein At2g24100
  misc_feature (17)..(340): NCBI GI NO: 18400458 NR Description: expressed protein [Arabidopsis thaliana]
  misc_feature (519)..(590): NCBI GI NO: 18400458 NR Description: expressed protein [Arabidopsis thaliana]
  misc_feature (103)..(278): NCBI GI NO: 20218825 NR Description: hypothetical protein [Pinus pinaster]
  misc_feature (59)..(267): NCBI GI NO: 15230043 NR Description: hypothetical protein [Arabidopsis thaliana]
  misc_feature (65)..(267): NCBI GI NO: 25405713 NR Description: hypothetical protein F20D21.12
  misc_feature (111)..(279): NCBI GI NO: 28828403 NR Description: similar to Dictyostelium discoideum (Slime mold)
MVQLMRSDTDNHCLKKVKLEVQDEIPPLHTHKRPKLESPPKCGASDESISIPPASYNPLDEPSPLGLRLRKSPSLLDLIQMRLSQQEESKKKDQKASSSSSAAAAAAAADSKLKASNFPGTILKIGNWEYKSRYEGDLVAKCYFAKHKLVWEVLDGCLKNKIEIPWSDIMAIKANYPDDGPGTLEVVLARRPLFFREINPQPRKHTLWQATSDFTGGQAGINRRHFLQCPQGLLGKHFEKLIQCDPRLNYLSQQADLVLDSPYFEPGTTSIHDHIESSDGFDRKSEERSGIFGLQDVESGSAVQSSSSKSEHNLGKAVENVSQEITSPSSVMNIHAMKDFRSRGAETLKFLSNLDQIKLPGLHPSMSMDDLVSHIGHCISEQMGSDNPNFAGDNQYSRSILEEFTQYLFNDSQHATTSDEQRVMSKVNSLYCLLQKDPSTAEDMTKNGNSLGDANALSRVNSLYSLLQNAEDAMARNGNGLRDADVMSRVNSLYCLLQKDPYTAEDTNTMTRNGNGLDADEGGKVGVSNSTELSQPCKTKVSDLEVQADDASGCKQGGTGMSRKESAGDLLLNLPRVASLLQFLFNMSEDSVNKVR

SEQ ID NO: 7860 - protein, 592 aa, Glycine max
  peptide (1)..(592): Ceres Seq. ID no. 14314661
  misc_feature (13)..(419): NCBI GI NO: 15234853 NR Description: expressed protein [Arabidopsis thaliana]
  misc_feature (479)..(586): NCBI GI NO: 15234853 NR Description: expressed protein [Arabidopsis thaliana]
  misc_feature (1)..(336): NCBI GI NO: 25371341 NR Description: hypothetical protein At2g24100
  misc_feature (515)..(586): NCBI GI NO: 25371341 NR Description: hypothetical protein At2g24100
  misc_feature (13)..(336): NCBI GI NO: 18400458 NR Description: expressed protein [Arabidopsis thaliana]
  misc_feature (515)..(586): NCBI GI NO: 18400458 NR Description: expressed protein [Arabidopsis thaliana]
  misc_feature (99)..(274): NCBI GI NO: 20218825 NR Description: hypothetical protein [Pinus pinaster]
  misc_feature (55)..(263): NCBI GI NO: 15230043 NR Description: hypothetical protein [Arabidopsis thaliana]
  misc_feature (61)..(263): NCBI GI NO: 25405713 NR Description: hypothetical protein F20D21.12
  misc_feature (107)..(275): NCBI GI NO: 28828403 NR Description: similar to Dictyostelium discoideum (Slime mold)
MRSDTDNHCLKKVKLEVQDEIPPLHTHKRPKLESPPKCGASDESISIPPASYNPLDEPSPLGLRLRKSPSLLDLIQMRLSQQEESKKKDQKASSSSSAAAAAAAADSKLKASNFPGTILKIGNWEYKSRYEGDLVAKCYFAKHKLVWEVLDGCLKNKIEIPWSDIMAIKANYPDDGPGTLEVVLARRPLFFREINPQPRKHTLWQATSDFTGGQAGINRRHFLQCPQGLLGKHFEKLIQCDPRLNYLSQQADLVLDSPYFEPGTTSIHDHIESSDGFDRKSEERSGIFGLQDVESGSAVQSSSSKSEHNLGKAVENVSQEITSPSSVMNIHAMKDFRSRGAETLKFLSNLDQIKLPGLHPSMSMDDLVSHIGHCISEQMGSDNPNFAGDNQYSRSILEEFTQYLFNDSQHATTSDEQRVMSKVNSLYCLLQKDPSTAEDMTKNGNSLGDANALSRVNSLYSLLQNAEDAMARNGNGLRDADVMSRVNSLYCLLQKDPYTAEDTNTMTRNGNGLDADEGGKVGVSNSTELSQPCKTKVSDLEVQADDASGCKQGGTGMSRKESAGDLLLNLPRVASLLQFLFNMSEDSVNKVR

SEQ ID NO: 7861 - protein, 516 aa, Glycine max
  peptide (1)..(516): Ceres Seq. ID no. 14314662
  misc_feature (1)..(343): NCBI GI NO: 15234853 NR Description: expressed protein [Arabidopsis thaliana]
  misc_feature (403)..(510): NCBI GI NO: 15234853 NR Description: expressed protein [Arabidopsis thaliana]
  misc_feature (1)..(260): NCBI GI NO: 25371341 NR Description: hypothetical protein At2g24100
  misc_feature (439)..(510): NCBI GI NO: 25371341 NR Description: hypothetical protein At2g24100
  misc_feature (1)..(260): NCBI GI NO: 18400458 NR Description: expressed protein [Arabidopsis thaliana]
  misc_feature (439)..(510): NCBI GI NO: 18400458 NR Description: expressed protein [Arabidopsis thaliana]
  misc_feature (23)..(198): NCBI GI NO: 20218825 NR Description: hypothetical protein [Pinus pinaster]
  misc_feature (1)..(187): NCBI GI NO: 15230043 NR Description: hypothetical protein [Arabidopsis thaliana]
  misc_feature (1)..(187): NCBI GI NO: 25405713 NR Description: hypothetical protein F20D21.12
  misc_feature (31)..(199): NCBI GI NO: 28828403 NR Description: similar to Dictyostelium discoideum (Slime mold)
MRLSQQEESKKKDQKASSSSSAAAAAAAADSKLKASNFPGTILKIGNWEYKSRYEGDLVAKCYFAKHKLVWEVLDGCLKNKIEIPWSDIMAIKANYPDDGPGTLEVVLARRPLFFREINPQPRKHTLWQATSDFTGGQAGINRRHFLQCPQGLLGKHFEKLIQCDPRLNYLSQQADLVLDSPYFEPGTTSIHDHIESSDGFDRKSEERSGIFGLQDVESGSAVQSSSSKSEHNLGKAVENVSQEITSPSSVMNIHAMKDFRSRGAETLKFLSNLDQIKLPGLHPSMSMDDLVSHIGHCISEQMGSDNPNFAGDNQYSRSILEEFTQYLFNDSQHATTSDEQRVMSKVNSLYCLLQKDPSTAEDMTKNGNSLGDANALSRVNSLYSLLQNAEDAMARNGNGLRDADVMSRVNSLYCLLQKDPYTAEDTNTMTRNGNGLDADEGGKVGVSNSTELSQPCKTKVSDLEVQADDASGCKQGGTGMSRKESAGDLLLNLPRVASLLQFLFNMSEDSVNKVR

SEQ ID NO: 7862 - DNA, 1186 bp, Glycine max
  misc_feature (1)..(1186): Ceres Seq. ID no. 14306319
aaaaataatcaattcttttcttctctgtctccagctctcttctctctcagcacaagcataccatagcctctgcttaaccacgaagaaaccgagacaacaaaacacacttttttttcttttttttttcctccgtttctgccctgttctttccacgctgttcttcaccctttcaaccaaaacatgatccaccccatttcatgtttcctcttccaaccctcaaattctccataaagttcaacttttttcgatcctttctcaactgggtcaatcacaacaccaaaagggtgtcacaccattagatctcaaattcttcagctctaatggcgacgtgccctgcgaattccttcaacttcaacaccaccctctgcgcgtgcacccccggtcacgtgctccagcacgtgaggaacacgtgcgtgctctacgaggggaattcaacaatcctcaccgacaccggcgtcgactactacgcgctgagcttccccgagacgctcttcgcgttcgacagaatcaagaagttcacgcagtcgcaggcggtgttcttggaagccacgctcgttatgcttctctcgtggcttctgttctgcgtgtttctgaggtgcacgaagctcggtgatggaaggaacgtttggttcaaaatcaggtggtggatcagtaggttggatatttgcttcgccacaaggcactggctggttagtttttttttattatgtggtcctcagtatccatcagctgtcaataactaatttttatcttcggaggaaacctatctaaccacctttaatggattattatctcgtaatcacattttttttcatccaccagcctccaactccagaccttggtttgttttgtttggttctgtgtttttggtttcgtgaattgtggtgatggtttagcttcgcaatccaacttcatccatgagtttgtcttttttaaggatataatttaaatgtagtgatttagatatttttggtgttctttgcttatcagaattagaggccgccatttaatgcaaatatttattgaaattggattctcgattagtttaggcatacaaaatttaacgaaatttgctcttacttaatatctgcaattaatctggaaaacatttcacacatgtgatttttttttaaaaaaataatatgaaattctaatatattaaaacaagtaaattccattgttttgt

SEQ ID NO: 7863 - protein, 140 aa, Glycine max
  peptide (1)..(140): Ceres Seq. ID no. 14306320
  misc_feature (4)..(123): NCBI GI NO: 30685896 NR Description: expressed protein [Arabidopsis thaliana]
  misc_feature (4)..(63): NCBI GI NO: 9759136 NR Description: gene_id:MQK4.27~unknown protein
  misc_feature (85)..(123): NCBI GI NO: 9759136 NR Description: gene_id:MQK4.27~unknown protein
  misc_feature (1)..(122): NCBI GI NO: 34893992 NR Description: P0672D08.4
MATCPANSFNFNTTLCACTPGHVLQHVRNTCVLYEGNSTILTDTGVDYYALSFPETLFAFDRIKKFTQSQAVFLEATLVMLLSWLLFCVFLRCTKLGDGRNVWFKIRWWISRLDICFATRHWLVSFFLLCGPQYPSAVNN

SEQ ID NO: 7864 - DNA, 1731 bp, Glycine max
  misc_feature (1)..(1731): Ceres Seq. ID no. 14314620
gacaaagatctcactcaattcaaccgcctccactctcacgcaaaccatttttcttttctttctctccctctgagcctttcatcgctgcctcggagagatggcagtgtcggaaggatcaccaacccctcagacggttggcaatgcttttgttgagcagtattactccatactgcatcaaaagccagaccaagttcacagattttaccacgagtctagcatcctaagccgacctgaagaagatggtaccatgactatggtgactactactttggaaattaataaaaagatactctctctggattacacaagctttagggtggaaattctgagtgctgatgcacagccttcttacaaggatggggtaattgttgtagtgactggctgcttaactggaagtgacaatctgaaaaggaagtttactcagtcctttttcctagctccccaggacaaaggctactttgttttgaatgatgttttcagatatgttgatgagtataagtcagttgatattgagtctgtgcctgcaaacgatgctgctgatgaaagtgctccaacagatgcttttgtccccgagcctgaggccattcatgttgctgaagatgttcccgctagtcaaactgatgttgttgatgctgacattggtgtcagtaaagaagtgagtcaaccactagagaatggaaatttatcagttactgaaaaggtggtgcctgttgatcatgttaaagaatgcagtcatcaggaacatcattcacacgctgagaaagctgcttctaataattcactggaggatactccaaagaagtcttttgcatccattgtgaatgcactaaaagaaaatgctgctcccttccatgtgagggtttcccctgtgaaacttcttgaacaaccacgtgtttctagtatacctgcaccagaagcaccagctcctagcactgacagtccaccagaaaagaataatgagattggaggtaaggcttatgcaatatttgttgcaaatttgcccatgaatgcaacagttgaacagctggaacgtgttttccagaaattttgggcccattaaacgggatggctttcaggttagaagtaacaagcaacaacaatccttgttttggttttggggaaatttgaatctgctacttcaatgcaaagtgcacttgaggcttctcctcctgttaccttggatggacgtagactttcaattgaagagcgacgagcaaataatgatagggggaggcattcatcaggaaggggcagttaccggaatgacagaaacgataacttcaggggccgtggcaacttcggtggtggccatggtggcggttatggaaacaggaaatgatagtttcgagaagcgaagcgagttctctggccggcctcgtggtggcaacaatggtgggcgtagcaatggagaagctgttccaaggagttatcagaatggaggagcaaaagtcactgtcaaccagtgaaagttcagtaaagtgattcattttgttgggaattgagtgacaacggcatttttcttatagatagcggcatctagggattctggtttgcaactgcattaagagttttttttctctattcctttatagctgtcatgatccttttgcttcagagtttttttggttaaatcacatcattccctatattcctttaaatcacattttgtatctaatattccggaataattgttttggaactgcccacaattatgccatttttttagaagcc

SEQ ID NO: 7865 - protein, 320 aa, Glycine max
  peptide (1)..(320): Ceres Seq. ID no. 14314621
  misc_feature (13)..(129): Pfam Name: NTF2 Pfam Description: Nuclear transport factor 2
  misc_feature (1)..(320): NCBI GI NO: 30697455 NR Description: NTF2-containing RNA-binding protein, putative
  misc_feature (1)..(320): NCBI GI NO: 30697452 NR Description: NTF2-containing RNA-binding protein, putative
  misc_feature (1)..(320): NCBI GI NO: 30687772 NR Description: NTF2-containing RNA-binding protein, putative
  misc_feature (1)..(320): NCBI GI NO: 21553535 NR Description: ras-GTPase-activating protein SH3-domain bindingprotein-like
  misc_feature (13)..(320): NCBI GI NO: 9294171 NR Description: RNA-binding protein-like [Arabidopsis thaliana]
  misc_feature (1)..(320): NCBI GI NO: 31126693 NR Description: putative GAP SH3 binding protein
  misc_feature (2)..(287): NCBI GI NO: 21742151 NR Description: OSJNBa0069D17.2
  misc_feature (1)..(320): NCBI GI NO: 15222258 NR Description: NTF2-containing RNA-binding protein, putative
  misc_feature (1)..(272): NCBI GI NO: 18394029 NR Description: NTF2-containing RNA-binding protein, putative
  misc_feature (7)..(281): NCBI GI NO: 25411027 NR Description: hypothetical protein At2g03640
MAVSEGSPTPQTVGNAFVEQYYSILHQKPDQVHRFYHESSILSRPEEDGTMTMVTTTLEINKKILSLDYTSFRVEILSADAQPSYKDGVIVVVTGCLTGSDNLKRKFTQSFFLAPQDKGYFVLNDVFRYVDEYKSVDIESVPANDAADESAPTDAFVPEPEAIHVAEDVPASQTDVVDADIGVSKEVSQPLENGNLSVTEKVVPVDHVKECSHQEHHSHAEKAASNNSLEDTPKKSFASIVNALKENAAPFHVRVSPVKLLEQPRVSSIPAPEAPAPSTDSPPEKNNEIGGKAYAIFVANLPMNATVEQLERVFQKFWAH

SEQ ID NO: 7866 - protein, 270 aa, Glycine max
  peptide (1)..(270): Ceres Seq. ID no. 14314622
  misc_feature (1)..(79): Pfam Name: NTF2 Pfam Description: Nuclear transport factor 2
  misc_feature (1)..(270): NCBI GI NO: 30697455 NR Description: NTF2-containing RNA-binding protein, putative
  misc_feature (1)..(270): NCBI GI NO: 30697452 NR Description: NTF2-containing RNA-binding protein, putative
  misc_feature (1)..(270): NCBI GI NO: 30687772 NR Description: NTF2-containing RNA-binding protein, putative
  misc_feature (1)..(270): NCBI GI NO: 21553535 NR Description: ras-GTPase-activating protein SH3-domain bindingprotein-like
  misc_feature (1)..(270): NCBI GI NO: 9294171 NR Description: RNA-binding protein-like [Arabidopsis thaliana]
  misc_feature (1)..(270): NCBI GI NO: 31126693 NR Description: putative GAP SH3 binding protein
  misc_feature (1)..(237): NCBI GI NO: 21742151 NR Description: OSJNBa0069D17.2
  misc_feature (1)..(270): NCBI GI NO: 15222258 NR Description: NTF2-containing RNA-binding protein, putative
  misc_feature (1)..(222): NCBI GI NO: 18394029 NR Description: NTF2-containing RNA-binding protein, putative
  misc_feature (1)..(231): NCBI GI NO: 25411027 NR Description: hypothetical protein At2g03640
MTMVTTTLEINKKILSLDYTSFRVEILSADAQPSYKDGVIVVVTGCLTGSDNLKRKFTQSFFLAPQDKGYFVLNDVFRYVDEYKSVDIESVPANDAADESAPTDAFVPEPEAIHVAEDVPASQTDVVDADIGVSKEVSQPLENGNLSVTEKVVPVDHVKECSHQEHHSHAEKAASNNSLEDTPKKSFASIVNALKENAAPFHVRVSPVKLLEQPRVSSIPAPEAPAPSTDSPPEKNNEIGGKAYAIFVANLPMNATVEQLERVFQKFWAH

SEQ ID NO: 7867 - protein, 268 aa, Glycine max
  peptide (1)..(268): Ceres Seq. ID no. 14314623
  misc_feature (1)..(77): Pfam Name: NTF2 Pfam Description: Nuclear transport factor 2
  misc_feature (1)..(268): NCBI GI NO: 30697455 NR Description: NTF2-containing RNA-binding protein, putative
  misc_feature (1)..(268): NCBI GI NO: 30697452 NR Description: NTF2-containing RNA-binding protein, putative
  misc_feature (1)..(268): NCBI GI NO: 30687772 NR Description: NTF2-containing RNA-binding protein, putative
  misc_feature (1)..(268): NCBI GI NO: 21553535 NR Description: ras-GTPase-activating protein SH3-domain bindingprotein-like
  misc_feature (1)..(268): NCBI GI NO: 9294171 NR Description: RNA-binding protein-like [Arabidopsis thaliana]
  misc_feature (1)..(268): NCBI GI NO: 31126693 NR Description: putative GAP SH3 binding protein
  misc_feature (1)..(235): NCBI GI NO: 21742151 NR Description: OSJNBa0069D17.2
  misc_feature (1)..(268): NCBI GI NO: 15222258 NR Description: NTF2-containing RNA-binding protein, putative
  misc_feature (1)..(220): NCBI GI NO: 18394029 NR Description: NTF2-containing RNA-binding protein, putative
  misc_feature (1)..(229): NCBI GI NO: 25411027 NR Description: hypothetical protein At2g03640
MVTTTLEINKKILSLDYTSFRVEILSADAQPSYKDGVIVVVTGCLTGSDNLKRKFTQSFFLAPQDKGYFVLNDVFRYVDEYKSVDIESVPANDAADESAPTDAFVPEPEAIHVAEDVPASQTDVVDADIGVSKEVSQPLENGNLSVTEKVVPVDHVKECSHQEHHSHAEKAASNNSLEDTPKKSFASIVNALKENAAPFHVRVSPVKLLEQPRVSSIPAPEAPAPSTDSPPEKNNEIGGKAYAIFVANLPMNATVEQLERVFQKFWAH

SEQ ID NO: 7868 - DNA, 910 bp, Glycine max
  misc_feature (1)..(910): Ceres Seq. ID no. 14306315
atagttgaatttttaacttgtctgttcttatcttcatcctacgccaatagcccaaaaccttgttctctttttgtggttcatttctctcttccagatgccacttgccgttcttcaccctcacgattttctcaggaaaaacccatctaaccagtaccagaccataatccctcactctcccaacatgaatcctaataagtctcatcggacttcccgaaaccgtaagaagcggcccgatccaagcccacaaggcgttgtcagcccagcccggctcacattatccccgaaaccccaagtcaaaaacaagccgcagcagcaactcgtcatgggtcaggtcaaaatactcaaacgcggccaacttttgacccaaacgacgccggatccaccgccgcagacggaaatcgtcgatcagaagttaactccgcagacggaaaccgtcgaaaaaaaggacttaacttcaatcgtagatggtttatatgcaggctattcgatgttggtgatgtctccacctcctagctccgttccgttaccggctttcatcactaagaagattgcggttgttagtgacgccacgagcgacttgcggaaaatgttacggcttgattttccctaatcctgtggcggtttgtgaatgaacgaggatttgaacggaggttgttggtgattagggcattgtagtgctcgatcttctcttattttttcagcgggaaggtcgtgtcacgaatgcaagtctcttattgtttagaactttcttcagattgccgtacatacatgttactactgggattagtcttcgtactttttagattaattactttgtgatactaattattagttttaaggaataggcttctgtatatctgtgtaatgctttgtaagtatttaggatatagaagcattttcttcctctctc

SEQ ID NO: 7869 - protein, 171 aa, Glycine max
  peptide (1)..(171): Ceres Seq. ID no. 14306316
  misc_feature (1)..(169): NCBI GI NO: 15236646 NR Description: expressed protein [Arabidopsis thaliana]
  misc_feature (1)..(169): NCBI GI NO: 14326506 NR Description: AT4g32020/F10N7_170 [Arabidopsis thaliana]
MPLAVLHPHDFLRKNPSNQYQTIIPHSPNMNPNKSHRTSRNRKKRPDPSPQGVVSPARLTLSPKPQVKNKPQQQLVMGQVKILKRGQLLTQTTPDPPPQTEIVDQKLTPQTETVEKKDLTSIVDGLYAGYSMLVMSPPPSSVPLPAFITKKIAVVSDATSDLRKMLRLDFP

SEQ ID NO: 7870 - protein, 142 aa, Glycine max
  peptide (1)..(142): Ceres Seq. ID no. 14306317
  misc_feature (1)..(140): NCBI GI NO: 15236646 NR Description: expressed protein [Arabidopsis thaliana]
  misc_feature (1)..(140): NCBI GI NO: 14326506 NR Description: AT4g32020/F10N7_170 [Arabidopsis thaliana]
MNPNKSHRTSRNRKKRPDPSPQGVVSPARLTLSPKPQVKNKPQQQLVMGQVKILKRGQLLTQTTPDPPPQTEIVDQKLTPQTETVEKKDLTSIVDGLYAGYSMLVMSPPPSSVPLPAFITKKIAVVSDATSDLRKMLRLDFP

SEQ ID NO: 7871 - protein, 95 aa, Glycine max
  peptide (1)..(95): Ceres Seq. ID no. 14306318
  misc_feature (1)..(93): NCBI GI NO: 15236646 NR Description: expressed protein [Arabidopsis thaliana]
  misc_feature (1)..(93): NCBI GI NO: 14326506 NR Description: AT4g32020/F10N7_170 [Arabidopsis thaliana]
MGQVKILKRGQLLTQTTPDPPPQTEIVDQKLTPQTETVEKKDLTSIVDGLYAGYSMLVMSPPPSSVPLPAFITKKIAVVSDATSDLRKMLRLDFP

SEQ ID NO: 7872 - DNA, 1329 bp, Glycine max
  misc_feature (1)..(1329): Ceres Seq. ID no. 14315035
accacaccaccctactacattcccacctttagtcttgttcttagagatggcttgtgaaaccaagtcatggttggttatgtttcttgttttcttggttgctaattgcatgcaacattgtgtccacggggtgtctcaagtgccttgcctttttatctttggggactctatgtctgatagtggaaacaacaatgaacttccaaccacttcaaaatctaatttcagaccatatgggatcgactttccattaggaccaactgggagatataccaatggccgaacagaaattgacataatcactcaatttctgggatttgagaaatttatcccaccctttgcaaacactagtggttcagacatacttaaaggtgttaactatgcatcaggtggatctggtatacgcaacgaaactggctggcattatggtgctgctatcggcttgggattacagttagcaaatcacagagtcatagtatctgaaattgctaccaaacttggaagtcctgacttagctcgacaataccttgaaaaatgcttgtattatgtgaacataggcagcaatgattacatgggcaattacttccttcccccgttctacccaacaagcaccatttataccattgaggagtttacacaagttctgattgaagagttatctctgaatttacaggctttacatgacattggagcaagaaagtatgccttggctgggttgggccttataggatgcaccccaggtatggtgagtgctcatgggacaaatggatcatgtgctgaagagcaaaatctcgctgcattcaatttcaataacaagcttaaagctcgagtggatcaattcaacaatgatttctattatgctaattccaaattcatctttataaacactcaagcattggccattgagcttcgcgataaatatggttttccggttccggaaactccttgctgcctaccgggattaacaggggagtgtgttcctgatcaagagccgtgctataataggaatgactatgtgttttttgatgctttccatcccaccgagcaatggaacctactcaatgcattgacatcttataattctaccactaattcagccttcacttatccaatggatatcaagcaccttgttgatcatgaaattaagacggaattggagctcacaaatgagtccacttcacaacttagtgccactgaataagttctggttatcatgtagtcgttcatatggagttgaaataattgtgagttgaatatgtattaagtaatggcctgccactgaattgaacgacaaagtggaatgaatcaagtgaataaattggctatcctgcctcg

SEQ ID NO: 7873 - protein, 397 aa, Glycine max
  peptide (1)..(397): Ceres Seq. ID no. 14315036
  misc_feature (50)..(356): Pfam Name: Pfam Description:  GDSL-like Lipase/Acylhydrolase
  misc_feature (21)..(374): NCBI GI NO: 15220514 NR Description: GDSL-motif lipase/hydrolase protein
  misc_feature (21)..(374): NCBI GI NO: 21592417 NR Description: lipase/hydrolase, putative [Arabidopsis thaliana]
  misc_feature (25)..(374): NCBI GI NO: 15242458 NR Description: GDSL-motif lipase/hydrolase protein
  misc_feature (25)..(374): NCBI GI NO: 21553940 NR Description: GDSL-motif lipase/hydrolase-like protein
  misc_feature (25)..(374): NCBI GI NO: 7485419 NR Description: hypothetical protein F13C5
  misc_feature (25)..(374): NCBI GI NO: 18415211 NR Description: GDSL-motif lipase/hydrolase protein
  misc_feature (21)..(374): NCBI GI NO: 15220512 NR Description: GDSL-motif lipase/hydrolase protein
  misc_feature (21)..(374): NCBI GI NO: 21594055 NR Description: lipase/hydrolase, putative [Arabidopsis thaliana]
  misc_feature (25)..(374): NCBI GI NO: 21618199 NR Description: GDSL-motif lipase/hydrolase-like protein
  misc_feature (44)..(376): NCBI GI NO: 18398991 NR Description: GDSL-motif lipase/hydrolase protein
PHHPTTFPPLVLFLEMACETKSWLVMFLVFLVANCMQHCVHGVSQVPCLFIFGDSMSDSGNNNELPTTSKSNFRPYGIDFPLGPTGRYTNGRTEIDIITQFLGFEKFIPPFANTSGSDILKGVNYASGGSGIRNETGWHYGAAIGLGLQLANHRVIVSEIATKLGSPDLARQYLEKCLYYVNIGSNDYMGNYFLPPFYPTSTIYTIEEFTQVLIEELSLNLQALHDIGARKYALAGLGLIGCTPGMVSAHGTNGSCAEEQNLAAFNFNNKLKARVDQFNNDFYYANSKFIFINTQALAIELRDKYGFPVPETPCCLPGLTGECVPDQEPCYNRNDYVFFDAFHPTEQWNLLNALTSYNSTTNSAFTYPMDIKHLVDHEIKTELELTNESTSQLSATE

SEQ ID NO: 7874 - protein, 382 aa, Glycine max
  peptide (1)..(382): Ceres Seq. ID no. 14315037
  misc_feature (35)..(341): Pfam Name: Pfam Description:  GDSL-like Lipase/Acylhydrolase
  misc_feature (6)..(359): NCBI GI NO: 15220514 NR Description: GDSL-motif lipase/hydrolase protein
  misc_feature (6)..(359): NCBI GI NO: 21592417 NR Description: lipase/hydrolase, putative [Arabidopsis thaliana]
  misc_feature (10)..(359): NCBI GI NO: 15242458 NR Description: GDSL-motif lipase/hydrolase protein
  misc_feature (10)..(359): NCBI GI NO: 21553940 NR Description: GDSL-motif lipase/hydrolase-like protein
  misc_feature (10)..(359): NCBI GI NO: 7485419 NR Description: hypothetical protein F13C5
  misc_feature (10)..(359): NCBI GI NO: 18415211 NR Description: GDSL-motif lipase/hydrolase protein
  misc_feature (6)..(359): NCBI GI NO: 15220512 NR Description: GDSL-motif lipase/hydrolase protein
  misc_feature (6)..(359): NCBI GI NO: 21594055 NR Description: lipase/hydrolase, putative [Arabidopsis thaliana]
  misc_feature (10)..(359): NCBI GI NO: 21618199 NR Description: GDSL-motif lipase/hydrolase-like protein
  misc_feature (29)..(361): NCBI GI NO: 18398991 NR Description: GDSL-motif lipase/hydrolase protein
MACETKSWLVMFLVFLVANCMQHCVHGVSQVPCLFIFGDSMSDSGNNNELPTTSKSNFRPYGIDFPLGPTGRYTNGRTEIDIITQFLGFEKFIPPFANTSGSDILKGVNYASGGSGIRNETGWHYGAAIGLGLQLANHRVIVSEIATKLGSPDLARQYLEKCLYYVNIGSNDYMGNYFLPPFYPTSTIYTIEEFTQVLIEELSLNLQALHDIGARKYALAGLGLIGCTPGMVSAHGTNGSCAEEQNLAAFNFNNKLKARVDQFNNDFYYANSKFIFINTQALAIELRDKYGFPVPETPCCLPGLTGECVPDQEPCYNRNDYVFFDAFHPTEQWNLLNALTSYNSTTNSAFTYPMDIKHLVDHEIKTELELTNESTSQLSATE

SEQ ID NO: 7875 - protein, 372 aa, Glycine max
  peptide (1)..(372): Ceres Seq. ID no. 14315038
  misc_feature (25)..(331): Pfam Name: Pfam Description:  GDSL-like Lipase/Acylhydrolase
  misc_feature (1)..(349): NCBI GI NO: 15220514 NR Description: GDSL-motif lipase/hydrolase protein
  misc_feature (1)..(349): NCBI GI NO: 21592417 NR Description: lipase/hydrolase, putative [Arabidopsis thaliana]
  misc_feature (1)..(349): NCBI GI NO: 15242458 NR Description: GDSL-motif lipase/hydrolase protein
  misc_feature (1)..(349): NCBI GI NO: 21553940 NR Description: GDSL-motif lipase/hydrolase-like protein
  misc_feature (1)..(349): NCBI GI NO: 7485419 NR Description: hypothetical protein F13C5
  misc_feature (1)..(349): NCBI GI NO: 18415211 NR Description: GDSL-motif lipase/hydrolase protein
  misc_feature (1)..(349): NCBI GI NO: 15220512 NR Description: GDSL-motif lipase/hydrolase protein
  misc_feature (1)..(349): NCBI GI NO: 21594055 NR Description: lipase/hydrolase, putative [Arabidopsis thaliana]
  misc_feature (1)..(349): NCBI GI NO: 21618199 NR Description: GDSL-motif lipase/hydrolase-like protein
  misc_feature (19)..(351): NCBI GI NO: 18398991 NR Description: GDSL-motif lipase/hydrolase protein
MFLVFLVANCMQHCVHGVSQVPCLFIFGDSMSDSGNNNELPTTSKSNFRPYGIDFPLGPTGRYTNGRTEIDIITQFLGFEKFIPPFANTSGSDILKGVNYASGGSGIRNETGWHYGAAIGLGLQLANHRVIVSEIATKLGSPDLARQYLEKCLYYVNIGSNDYMGNYFLPPFYPTSTIYTIEEFTQVLIEELSLNLQALHDIGARKYALAGLGLIGCTPGMVSAHGTNGSCAEEQNLAAFNFNNKLKARVDQFNNDFYYANSKFIFINTQALAIELRDKYGFPVPETPCCLPGLTGECVPDQEPCYNRNDYVFFDAFHPTEQWNLLNALTSYNSTTNSAFTYPMDIKHLVDHEIKTELELTNESTSQLSATE

SEQ ID NO: 7876 - DNA, 1767 bp, Glycine max
  misc_feature (1)..(1767): Ceres Seq. ID no. 15177878
aaaccgaacactctcattataaactctcccaaacccaaactacactctccacacacacacacacactcaccgccgtatcgttcacactgaaccaatccaaaccccactctctctctctccgccgcaaacgacccttctccggggcggcgccaccgtacaacccccgatttaactaaaggagcaacagaaggagctgcttggttacaaatggcggccaccgcaagcaacaatgacgtcgccgccgccaacgacggtcccgtgatgagccttatcaacaagcgcctccgcgctctccgcaagaagctgaaccgcatcctcgccatggaagaggccgtcaccttgggcaagcccttgaacaaggagcaggaagaggttctacgctccaaaccctccgtcctcgccctcatcgatgagctcgataagctccggcaacctctcgccaccgctctctccgaagagctccaaatcaacggcacgtcttctcaaaaccctcgccacgagaccgagaccgaaaacgaaaccctagctgagagctccggctcgactgagccgaactcgaactcgaggaacgacgtcgttgtggaggacctgcttaatttgctctattttggttcacttttcgatgtgaagagtgactttgcgtccacgatgcttaccaggacgcacgagcgtggctgctgcttgacctacgactacgtcaccgacgatgccaccgatctgcttggcgagaaggacttggattcgatctccgcactgagagggttgctcgtttcgcggcccgcggattcaagcttttcgcacaagaacgcgctgcaccgctgcgtggaacacgccaagctgtggcttgctaagtcggagcagcccattgggcctgatgctgatgttacttatgctgcattaagggagaagttgaacaagattatgtcttcggagtactttactacgacacctgagatgaaggctccggttgaagttgctgcggcagctgctgggggaaattacgtttccttccatgtgccggtgcatgggtctgtggttccggttgaagtggagcagcctgtttttcagtctcaggagagggatgaaggaactgcaattcaaggacatggatctgaagaagatccctctgatcctgagggagagcttgtgaaggatgaagtagaagcagaagcagaaaatgcaggtgaagtggtgtcagttcaacatgaacagacgaaccagcaagtggatctagagtataatgaacgagatgtagaggcaaaggaccagcagtcataccccaggaggggttatcagaaccatagaggtggtcgtggtggaggtggtcgcaggggttactcaaatggtcgtggaggtcgaagtggtggcagaggaggctaccaaaatgggcgcaaccaatattatgatcaacctggaaattattatccaaggaacaactattataacaacagaggaagaggtggcagaggtggtggctattacaacaaccatggtgctggtggtcaagttaatcacgtcgcaggtgatgtgggggtgcaatcatgataagttatgagttgtttatagtggttattactgtcactagttggtggtgaaccattttttattcgcctggcatgaaaacatgttttgaacaattttgtttgacacttgaaagttcaaacgtctagactcctccactattttgtagtccagtggctagtgtggacctttgtccgaaatctcacatgaagaaactaaactgtatgcgaatatctaatgttctgg

SEQ ID NO: 7877 - protein, 445 aa, Glycine max
  peptide (1)..(445): Ceres Seq. ID no. 15177879
  misc_feature (1)..(428): NCBI GI NO: 15223426 NR Description: glycine-rich protein [Arabidopsis thaliana]
  misc_feature (12)..(123): NCBI GI NO: 15230159 NR Description: hypothetical protein [Arabidopsis thaliana]
  misc_feature (313)..(439): NCBI GI NO: 1170023 NR Description: ABSCISIC ACID AND ENVIRONMENTAL STRESS INDUCIBLE PROTEIN
  misc_feature (328)..(429): NCBI GI NO: 7488799 NR Description: dormancy-associated protein 2 - garden pea
  misc_feature (361)..(436): NCBI GI NO: 122785 NR Description: GLYCINE-RICH PROTEIN HC1
  misc_feature (361)..(436): NCBI GI NO: 585219 NR Description: GLYCINE-RICH PROTEIN DC9.1
  misc_feature (315)..(439): NCBI GI NO: 1170023 NR Description: ABSCISIC ACID AND ENVIRONMENTAL STRESS INDUCIBLE PROTEIN
  misc_feature (343)..(436): NCBI GI NO: 7488799 NR Description: dormancy-associated protein 2 - garden pea
  misc_feature (310)..(444): NCBI GI NO: 7439981 NR Description: glycine-rich RNA-binding protein GRP1 - wheat
  misc_feature (313)..(432): NCBI GI NO: 7442088 NR Description: glycine-rich protein 1 - chickpea
MAATASNNDVAAANDGPVMSLINKRLRALRKKLNRILAMEEAVTLGKPLNKEQEEVLRSKPSVLALIDELDKLRQPLATALSEELQINGTSSQNPRHETETENETLAESSGSTEPNSNSRNDVVVEDLLNLLYFGSLFDVKSDFASTMLTRTHERGCCLTYDYVTDDATDLLGEKDLDSISALRGLLVSRPADSSFSHKNALHRCVEHAKLWLAKSEQPIGPDADVTYAALREKLNKIMSSEYFTTTPEMKAPVEVAAAAAGGNYVSFHVPVHGSVVPVEVEQPVFQSQERDEGTAIQGHGSEEDPSDPEGELVKDEVEAEAENAGEVVSVQHEQTNQQVDLEYNERDVEAKDQQSYPRRGYQNHRGGRGGGGRRGYSNGRGGRSGGRGGYQNGRNQYYDQPGNYYPRNNYYNNRGRGGRGGGYYNNHGAGGQVNHVAGDVGVQS

SEQ ID NO: 7878 - protein, 427 aa, Glycine max
  peptide (1)..(427): Ceres Seq. ID no. 15177880
  misc_feature (1)..(410): NCBI GI NO: 15223426 NR Description: glycine-rich protein [Arabidopsis thaliana]
  misc_feature (1)..(105): NCBI GI NO: 15230159 NR Description: hypothetical protein [Arabidopsis thaliana]
  misc_feature (295)..(421): NCBI GI NO: 1170023 NR Description: ABSCISIC ACID AND ENVIRONMENTAL STRESS INDUCIBLE PROTEIN
  misc_feature (310)..(411): NCBI GI NO: 7488799 NR Description: dormancy-associated protein 2 - garden pea
  misc_feature (343)..(418): NCBI GI NO: 122785 NR Description: GLYCINE-RICH PROTEIN HC1
  misc_feature (343)..(418): NCBI GI NO: 585219 NR Description: GLYCINE-RICH PROTEIN DC9.1
  misc_feature (297)..(421): NCBI GI NO: 1170023 NR Description: ABSCISIC ACID AND ENVIRONMENTAL STRESS INDUCIBLE PROTEIN
  misc_feature (325)..(418): NCBI GI NO: 7488799 NR Description: dormancy-associated protein 2 - garden pea
  misc_feature (292)..(426): NCBI GI NO: 7439981 NR Description: glycine-rich RNA-binding protein GRP1 - wheat
  misc_feature (295)..(414): NCBI GI NO: 7442088 NR Description: glycine-rich protein 1 - chickpea
MSLINKRLRALRKKLNRILAMEEAVTLGKPLNKEQEEVLRSKPSVLALIDELDKLRQPLATALSEELQINGTSSQNPRHETETENETLAESSGSTEPNSNSRNDVVVEDLLNLLYFGSLFDVKSDFASTMLTRTHERGCCLTYDYVTDDATDLLGEKDLDSISALRGLLVSRPADSSFSHKNALHRCVEHAKLWLAKSEQPIGPDADVTYAALREKLNKIMSSEYFTTTPEMKAPVEVAAAAAGGNYVSFHVPVHGSVVPVEVEQPVFQSQERDEGTAIQGHGSEEDPSDPEGELVKDEVEAEAENAGEVVSVQHEQTNQQVDLEYNERDVEAKDQQSYPRRGYQNHRGGRGGGGRRGYSNGRGGRSGGRGGYQNGRNQYYDQPGNYYPRNNYYNNRGRGGRGGGYYNNHGAGGQVNHVAGDVGVQS

SEQ ID NO: 7879 - protein, 407 aa, Glycine max
  peptide (1)..(407): Ceres Seq. ID no. 15177881
  misc_feature (1)..(390): NCBI GI NO: 15223426 NR Description: glycine-rich protein [Arabidopsis thaliana]
  misc_feature (1)..(85): NCBI GI NO: 15230159 NR Description: hypothetical protein [Arabidopsis thaliana]
  misc_feature (275)..(401): NCBI GI NO: 1170023 NR Description: ABSCISIC ACID AND ENVIRONMENTAL STRESS INDUCIBLE PROTEIN
  misc_feature (290)..(391): NCBI GI NO: 7488799 NR Description: dormancy-associated protein 2 - garden pea
  misc_feature (323)..(398): NCBI GI NO: 122785 NR Description: GLYCINE-RICH PROTEIN HC1
  misc_feature (323)..(398): NCBI GI NO: 585219 NR Description: GLYCINE-RICH PROTEIN DC9.1
  misc_feature (277)..(401): NCBI GI NO: 1170023 NR Description: ABSCISIC ACID AND ENVIRONMENTAL STRESS INDUCIBLE PROTEIN
  misc_feature (305)..(398): NCBI GI NO: 7488799 NR Description: dormancy-associated protein 2 - garden pea
  misc_feature (272)..(406): NCBI GI NO: 7439981 NR Description: glycine-rich RNA-binding protein GRP1 - wheat
  misc_feature (275)..(394): NCBI GI NO: 7442088 NR Description: glycine-rich protein 1 - chickpea
MEEAVTLGKPLNKEQEEVLRSKPSVLALIDELDKLRQPLATALSEELQINGTSSQNPRHETETENETLAESSGSTEPNSNSRNDVVVEDLLNLLYFGSLFDVKSDFASTMLTRTHERGCCLTYDYVTDDATDLLGEKDLDSISALRGLLVSRPADSSFSHKNALHRCVEHAKLWLAKSEQPIGPDADVTYAALREKLNKIMSSEYFTTTPEMKAPVEVAAAAAGGNYVSFHVPVHGSVVPVEVEQPVFQSQERDEGTAIQGHGSEEDPSDPEGELVKDEVEAEAENAGEVVSVQHEQTNQQVDLEYNERDVEAKDQQSYPRRGYQNHRGGRGGGGRRGYSNGRGGRSGGRGGYQNGRNQYYDQPGNYYPRNNYYNNRGRGGRGGGYYNNHGAGGQVNHVAGDVGVQS

SEQ ID NO: 7880 - DNA, 832 bp, Glycine max
  misc_feature (1)..(832): Ceres Seq. ID no. 14306303
aaccttacgcattagatcaatattaaagctaaccactcgtttgcattgtatggtatatcattccaagaatctcagctgcagtaaacaacgaccatgaaactaatgacagcaacaacaacgtttgatgtctctgccacatgcttccgtgcccctcctccttcgtgctcaatgaatccatgccacaccagtttttcagttataaactccctgaatcctcacaagggacgacggataagcgttgctgttccacccaagtttccaaacttccggagggaagcatctctgcaggggaatttggaggctattagagtcccaacttcggtgcctgtgcgtgtagcatacgagcttcttctagctggtcatcgatatttggatgtaaggaccccggaagagttcgatgctggacacgctcctggcgcaattaacattccttatatgttcagagttggatcagggatgacaaagaacagcaactttattagagaggtgtcttcacagtttaggaaagatgatgaaattattgtcgggtgtgagcttggtaaaagatctatgatggccgcaagtgacttgctagctgctgggttcactggactcacagacatggctggtggttatgctgcatggacacaaaatggacttccaacagagctatgaagtgtttctgttggaactgtagctgtaaatagaataagttttgggaggagtccaatgcatggaaatgcagaaacacttcaccaagacagtgacaatctgacactgggaaaacaaaaatctataaatggaaaattaaatgtatttgtcgatatcaacaataaataaaatgttaatatat

SEQ ID NO: 7881 - protein, 186 aa, Glycine max
  peptide (1)..(186): Ceres Seq. ID no. 14306304
  misc_feature (77)..(180): Pfam Name: Pfam Description:  Rhodanese-like domain
  misc_feature (37)..(185): NCBI GI NO: 7594903 NR Description: Ntdin [Nicotiana tabacum]
  misc_feature (45)..(185): NCBI GI NO: 7340289 NR Description: OP1 [Cucumis sativus]
  misc_feature (41)..(185): NCBI GI NO: 7488606 NR Description: senescence-associated protein din1
  misc_feature (45)..(185): NCBI GI NO: 15233328 NR Description: senescence-associated protein sen1
  misc_feature (45)..(185): NCBI GI NO: 21537402 NR Description: senescence-associated protein sen1
  misc_feature (45)..(185): NCBI GI NO: 1046268 NR Description: senescence-associated protein
  misc_feature (41)..(185): NCBI GI NO: 118636 NR Description: Senescence-associated protein DIN1
  misc_feature (69)..(185): NCBI GI NO: 30698182 NR Description: senescence-associated protein
  misc_feature (72)..(186): NCBI GI NO: 2129628 NR Description: ketoconazole resistance protein
  misc_feature (63)..(183): NCBI GI NO: 18425042 NR Description: senescence-associated protein
MKLMTATTTFDVSATCFRAPPPSCSMNPCHTSFSVINSLNPHKGRRISVAVPPKFPNFRREASLQGNLEAIRVPTSVPVRVAYELLLAGHRYLDVRTPEEFDAGHAPGAINIPYMFRVGSGMTKNSNFIREVSSQFRKDDEIIVGCELGKRSMMAASDLLAAGFTGLTDMAGGYAAWTQNGLPTEL

SEQ ID NO: 7882 - protein, 183 aa, Glycine max
  peptide (1)..(183): Ceres Seq. ID no. 14306305
  misc_feature (74)..(177): Pfam Name: Pfam Description:  Rhodanese-like domain
  misc_feature (34)..(182): NCBI GI NO: 7594903 NR Description: Ntdin [Nicotiana tabacum]
  misc_feature (42)..(182): NCBI GI NO: 7340289 NR Description: OP1 [Cucumis sativus]
  misc_feature (38)..(182): NCBI GI NO: 7488606 NR Description: senescence-associated protein din1
  misc_feature (42)..(182): NCBI GI NO: 15233328 NR Description: senescence-associated protein sen1
  misc_feature (42)..(182): NCBI GI NO: 21537402 NR Description: senescence-associated protein sen1
  misc_feature (42)..(182): NCBI GI NO: 1046268 NR Description: senescence-associated protein
  misc_feature (38)..(182): NCBI GI NO: 118636 NR Description: Senescence-associated protein DIN1
  misc_feature (66)..(182): NCBI GI NO: 30698182 NR Description: senescence-associated protein
  misc_feature (69)..(183): NCBI GI NO: 2129628 NR Description: ketoconazole resistance protein
  misc_feature (60)..(180): NCBI GI NO: 18425042 NR Description: senescence-associated protein
MTATTTFDVSATCFRAPPPSCSMNPCHTSFSVINSLNPHKGRRISVAVPPKFPNFRREASLQGNLEAIRVPTSVPVRVAYELLLAGHRYLDVRTPEEFDAGHAPGAINIPYMFRVGSGMTKNSNFIREVSSQFRKDDEIIVGCELGKRSMMAASDLLAAGFTGLTDMAGGYAAWTQNGLPTEL

SEQ ID NO: 7883 - protein, 161 aa, Glycine max
  peptide (1)..(161): Ceres Seq. ID no. 14306306
  misc_feature (52)..(155): Pfam Name: Pfam Description:  Rhodanese-like domain
  misc_feature (12)..(160): NCBI GI NO: 7594903 NR Description: Ntdin [Nicotiana tabacum]
  misc_feature (20)..(160): NCBI GI NO: 7340289 NR Description: OP1 [Cucumis sativus]
  misc_feature (16)..(160): NCBI GI NO: 7488606 NR Description: senescence-associated protein din1
  misc_feature (20)..(160): NCBI GI NO: 15233328 NR Description: senescence-associated protein sen1
  misc_feature (20)..(160): NCBI GI NO: 21537402 NR Description: senescence-associated protein sen1
  misc_feature (20)..(160): NCBI GI NO: 1046268 NR Description: senescence-associated protein
  misc_feature (16)..(160): NCBI GI NO: 118636 NR Description: Senescence-associated protein DIN1
  misc_feature (44)..(160): NCBI GI NO: 30698182 NR Description: senescence-associated protein
  misc_feature (47)..(161): NCBI GI NO: 2129628 NR Description: ketoconazole resistance protein
  misc_feature (38)..(158): NCBI GI NO: 18425042 NR Description: senescence-associated protein
MNPCHTSFSVINSLNPHKGRRISVAVPPKFPNFRREASLQGNLEAIRVPTSVPVRVAYELLLAGHRYLDVRTPEEFDAGHAPGAINIPYMFRVGSGMTKNSNFIREVSSQFRKDDEIIVGCELGKRSMMAASDLLAAGFTGLTDMAGGYAAWTQNGLPTEL

SEQ ID NO: 7884 - DNA, 1260 bp, Glycine max
  misc_feature (1)..(1260): Ceres Seq. ID no. 14314628
attaattcgctccctacaattttactttgccataacggtgagtttagagagggaataatggatggaagaggaggctgttgcatcgccaggtatgtacccggtgcatcccacgggtccaccgtcgacaaaataatgcttaggtttcgtccaatcgctcccaaacccgccgccgcggccaccgcttccgacggctcttcgtccgagagcagtgacgcttttctcaaaaacggaaccactaaaagaaagtacgtaagagataacaactacaccagcaaacgaagaatccgccggagaaagaacacttcctcgccggagaaaaagcagaagccggtggtgactcttccgttgcttccggaaactcccgatcggaaggattctcgggcaaaggatctaactccatcaccagctaaaccagtacgaaacaacaacaacaacaacaacaagagcaagaacttgaatattattaacaagaacgtgccggtgtgggtgagttttgagaatcgaagccttacgatgatgggagggtggtgttcgtgtgtgacggtggagggcgtgacggacacgtgcttggagagcgagtggctggggagtacagacgaggaacggagactgaacctcagcaatgacacgtgtccagggttcatatcagacggttacgggagggtgacgtggacgaacgaggcgtacgggaagatgatgatgatgaagggcgagggtgatgagggacagggaccagtgttgctggtgaataaggtgaatacggtggttccgcacgcgtcgttcacgtgcttggtgagggtggtgcaatactcgtgtgggaaggagagaaactcgctcacggtgccctgcgatgtgtggagaatggactgtggtgggtttgcatggagattagacgttaaaactgcgcttagcttgagattgggttattagttcacaaaggtatcacgaactcgaaatacaaaacggcgtcgctccatggtcgtagaactataacactatttcttctcttttaagagcttagaatcgtgaatatatatatctatatatctatatatatatatatataactactgacgctaagctagcttgtttcactgtaaattcatatatgcatgtagcttgtcttttgttctcttagatggttttttctgatttgagtttgagcttggaacagtagctgtgagctaattatgaataactcgctacgtaccgttatggttatgtaacacttcttctggttagtgaaacttttgttacgtc

SEQ ID NO: 7885 - protein, 309 aa, Glycine max
  peptide (1)..(309): Ceres Seq. ID no. 14314629
  misc_feature (20)..(305): NCBI GI NO: 15242729 NR Description: expressed protein [Arabidopsis thaliana]
  misc_feature (20)..(305): NCBI GI NO: 15240662 NR Description: expressed protein [Arabidopsis thaliana]
  misc_feature (20)..(305): NCBI GI NO: 18408645 NR Description: expressed protein [Arabidopsis thaliana]
  misc_feature (20)..(305): NCBI GI NO: 21537225 NR Description: unknown [Arabidopsis thaliana]
  misc_feature (30)..(307): NCBI GI NO: 15232126 NR Description: expressed protein [Arabidopsis thaliana]
  misc_feature (35)..(307): NCBI GI NO: 15237495 NR Description: hypothetical protein [Arabidopsis thaliana]
  misc_feature (20)..(308): NCBI GI NO: 15237494 NR Description: hypothetical protein [Arabidopsis thaliana]
INSLPTILLCHNGEFREGIMDGRGGCCIARYVPGASHGSTVDKIMLRFRPIAPKPAAAATASDGSSSESSDAFLKNGTTKRKYVRDNNYTSKRRIRRRKNTSSPEKKQKPVVTLPLLPETPDRKDSRAKDLTPSPAKPVRNNNNNNNKSKNLNIINKNVPVWVSFENRSLTMMGGWCSCVTVEGVTDTCLESEWLGSTDEERRLNLSNDTCPGFISDGYGRVTWTNEAYGKMMMMKGEGDEGQGPVLLVNKVNTVVPHASFTCLVRVVQYSCGKERNSLTVPCDVWRMDCGGFAWRLDVKTALSLRLGY

SEQ ID NO: 7886 - protein, 290 aa, Glycine max
  peptide (1)..(290): Ceres Seq. ID no. 14314630
  misc_feature (1)..(286): NCBI GI NO: 15242729 NR Description: expressed protein [Arabidopsis thaliana]
  misc_feature (1)..(286): NCBI GI NO: 15240662 NR Description: expressed protein [Arabidopsis thaliana]
  misc_feature (1)..(286): NCBI GI NO: 18408645 NR Description: expressed protein [Arabidopsis thaliana]
  misc_feature (1)..(286): NCBI GI NO: 21537225 NR Description: unknown [Arabidopsis thaliana]
  misc_feature (11)..(288): NCBI GI NO: 15232126 NR Description: expressed protein [Arabidopsis thaliana]
  misc_feature (16)..(288): NCBI GI NO: 15237495 NR Description: hypothetical protein [Arabidopsis thaliana]
  misc_feature (1)..(289): NCBI GI NO: 15237494 NR Description: hypothetical protein [Arabidopsis thaliana]
MDGRGGCCIARYVPGASHGSTVDKIMLRFRPIAPKPAAAATASDGSSSESSDAFLKNGTTKRKYVRDNNYTSKRRIRRRKNTSSPEKKQKPVVTLPLLPETPDRKDSRAKDLTPSPAKPVRNNNNNNNKSKNLNIINKNVPVWVSFENRSLTMMGGWCSCVTVEGVTDTCLESEWLGSTDEERRLNLSNDTCPGFISDGYGRVTWTNEAYGKMMMMKGEGDEGQGPVLLVNKVNTVVPHASFTCLVRVVQYSCGKERNSLTVPCDVWRMDCGGFAWRLDVKTALSLRLGY

SEQ ID NO: 7887 - protein, 265 aa, Glycine max
  peptide (1)..(265): Ceres Seq. ID no. 14314631
  misc_feature (1)..(261): NCBI GI NO: 15242729 NR Description: expressed protein [Arabidopsis thaliana]
  misc_feature (1)..(261): NCBI GI NO: 15240662 NR Description: expressed protein [Arabidopsis thaliana]
  misc_feature (1)..(261): NCBI GI NO: 18408645 NR Description: expressed protein [Arabidopsis thaliana]
  misc_feature (1)..(261): NCBI GI NO: 21537225 NR Description: unknown [Arabidopsis thaliana]
  misc_feature (1)..(263): NCBI GI NO: 15232126 NR Description: expressed protein [Arabidopsis thaliana]
  misc_feature (1)..(263): NCBI GI NO: 15237495 NR Description: hypothetical protein [Arabidopsis thaliana]
  misc_feature (1)..(264): NCBI GI NO: 15237494 NR Description: hypothetical protein [Arabidopsis thaliana]
MLRFRPIAPKPAAAATASDGSSSESSDAFLKNGTTKRKYVRDNNYTSKRRIRRRKNTSSPEKKQKPVVTLPLLPETPDRKDSRAKDLTPSPAKPVRNNNNNNNKSKNLNIINKNVPVWVSFENRSLTMMGGWCSCVTVEGVTDTCLESEWLGSTDEERRLNLSNDTCPGFISDGYGRVTWTNEAYGKMMMMKGEGDEGQGPVLLVNKVNTVVPHASFTCLVRVVQYSCGKERNSLTVPCDVWRMDCGGFAWRLDVKTALSLRLGY

SEQ ID NO: 7888 - DNA, 1251 bp, Glycine max
  misc_feature (1)..(1251): Ceres Seq. ID no. 15177654
atcgactgctccaaatggccgaggtaattttgaatctaatcgtggaatccatgatgcctgatgggaatcattgcagccaaaagacatcataccagttcctggtttccttgattgtcttagaagaacaaacagccttgcatatcttttggtggtgagttaggtctttcttgaatgtacccatgaaatcaggctatcaacacggtggagttgatattactcacactaaggcctttctaacatcactgtcagctatggtggctgagaccacaactttccccatagatttgatcaagaccaggctccaactccatggcgagtcactttcctcgagtcaccccactagtgcatttcgagtaggcttgggcattattcgtgaacaaggtgcccttggcctttacagtggcctgtcaccagcaattattagacacatgttctactcgcctattcgaattgttgggtatgagaacctgagaaatgttgtttctgttgataatgcttcgttctctatcgttggcaaggctgtagttggtggaatctctggtgtcttggctcaggttatagccagcccagctgatcttgtcaaggtgaggatgcaagctgatggccaaagggtgagccaaggtcttcaaccccggtattcggggccatttgatgctctaaacaaaattgttcgtgctgaaggatttcaaggattgtggaagggtgtttttcctaatatccaaagagccttcttagtgaacatgggagaattagcctgttatgatcatgctaaacaatttgttattagaagtaggatagctgatgacaatgtttttgcccacacttttgcttccatcatgtcaggtttagcggcaacgtctttgagctgcccggctgatgttgtgaagactagaatgatgaatcaggcagctaaaaaggaagggaaagtcttatataatagctcttatgattgcttggtgaagacaattaaagttgaaggaataagagcattgtggaaaggattcttccccacatgggcaaggcttggcccatggcaatttgtgttctgggtttcctatgagaagttcaggaaatttgcagggctctcttctttctaatataacattttatttatttatttatactagcactcattcatccataataaattcacaagtcacagcctacagggtactaacacccagatttatatttttctcaacttttagctcagtgtatacttttttgagataaactacattactctttcct

SEQ ID NO: 7889 - protein, 305 aa, Glycine max
  peptide (1)..(305): Ceres Seq. ID no. 15177655
  misc_feature (13)..(305): NCBI GI NO: 15223098 NR Description: mitochondrial carrier protein family
  misc_feature (8)..(305): NCBI GI NO: 38344836 NR Description: OSJNBa0064H22.17
  misc_feature (15)..(305): NCBI GI NO: 31418769 NR Description: Unknown (protein for MGC:63899) [Danio rerio]
  misc_feature (15)..(305): NCBI GI NO: 16758260 NR Description: uncoupling protein UCP-4 [Rattus norvegicus]
  misc_feature (15)..(305): NCBI GI NO: 21312006 NR Description: RIKEN cDNA 3632410G24 [Mus musculus]
  misc_feature (18)..(305): NCBI GI NO: 31231996 NR Description: ENSANGP00000020981 [Anopheles gambiae]
  misc_feature (22)..(305): NCBI GI NO: 18860079 NR Description: CG6492-PA [Drosophila melanogaster]
  misc_feature (15)..(305): NCBI GI NO: 39594577 NR Description: Hypothetical protein CBG19253
  misc_feature (15)..(305): NCBI GI NO: 17562272 NR Description: uncoupling protein (5J815)
  misc_feature (22)..(298): NCBI GI NO: 24637836 NR Description: brain mitochondrial carrier protein short-insertedform
MKSGYQHGGVDITHTKAFLTSLSAMVAETTTFPIDLIKTRLQLHGESLSSSHPTSAFRVGLGIIREQGALGLYSGLSPAIIRHMFYSPIRIVGYENLRNVVSVDNASFSIVGKAVVGGISGVLAQVIASPADLVKVRMQADGQRVSQGLQPRYSGPFDALNKIVRAEGFQGLWKGVFPNIQRAFLVNMGELACYDHAKQFVIRSRIADDNVFAHTFASIMSGLAATSLSCPADVVKTRMMNQAAKKEGKVLYNSSYDCLVKTIKVEGIRALWKGFFPTWARLGPWQFVFWVSYEKFRKFAGLSSF

SEQ ID NO: 7890 - protein, 281 aa, Glycine max
  peptide (1)..(281): Ceres Seq. ID no. 15177656
  misc_feature (1)..(281): NCBI GI NO: 15223098 NR Description: mitochondrial carrier protein family
  misc_feature (1)..(281): NCBI GI NO: 38344836 NR Description: OSJNBa0064H22.17
  misc_feature (1)..(281): NCBI GI NO: 31418769 NR Description: Unknown (protein for MGC:63899) [Danio rerio]
  misc_feature (1)..(281): NCBI GI NO: 16758260 NR Description: uncoupling protein UCP-4 [Rattus norvegicus]
  misc_feature (1)..(281): NCBI GI NO: 21312006 NR Description: RIKEN cDNA 3632410G24 [Mus musculus]
  misc_feature (1)..(281): NCBI GI NO: 31231996 NR Description: ENSANGP00000020981 [Anopheles gambiae]
  misc_feature (1)..(281): NCBI GI NO: 18860079 NR Description: CG6492-PA [Drosophila melanogaster]
  misc_feature (1)..(281): NCBI GI NO: 39594577 NR Description: Hypothetical protein CBG19253
  misc_feature (1)..(281): NCBI GI NO: 17562272 NR Description: uncoupling protein (5J815)
  misc_feature (1)..(274): NCBI GI NO: 24637836 NR Description: brain mitochondrial carrier protein short-insertedform
MVAETTTFPIDLIKTRLQLHGESLSSSHPTSAFRVGLGIIREQGALGLYSGLSPAIIRHMFYSPIRIVGYENLRNVVSVDNASFSIVGKAVVGGISGVLAQVIASPADLVKVRMQADGQRVSQGLQPRYSGPFDALNKIVRAEGFQGLWKGVFPNIQRAFLVNMGELACYDHAKQFVIRSRIADDNVFAHTFASIMSGLAATSLSCPADVVKTRMMNQAAKKEGKVLYNSSYDCLVKTIKVEGIRALWKGFFPTWARLGPWQFVFWVSYEKFRKFAGLSSF

SEQ ID NO: 7891 - protein, 222 aa, Glycine max
  peptide (1)..(222): Ceres Seq. ID no. 15177657
  misc_feature (1)..(222): NCBI GI NO: 15223098 NR Description: mitochondrial carrier protein family
  misc_feature (1)..(222): NCBI GI NO: 38344836 NR Description: OSJNBa0064H22.17
  misc_feature (1)..(222): NCBI GI NO: 31418769 NR Description: Unknown (protein for MGC:63899) [Danio rerio]
  misc_feature (1)..(222): NCBI GI NO: 16758260 NR Description: uncoupling protein UCP-4 [Rattus norvegicus]
  misc_feature (1)..(222): NCBI GI NO: 21312006 NR Description: RIKEN cDNA 3632410G24 [Mus musculus]
  misc_feature (1)..(222): NCBI GI NO: 31231996 NR Description: ENSANGP00000020981 [Anopheles gambiae]
  misc_feature (1)..(222): NCBI GI NO: 18860079 NR Description: CG6492-PA [Drosophila melanogaster]
  misc_feature (1)..(222): NCBI GI NO: 39594577 NR Description: Hypothetical protein CBG19253
  misc_feature (1)..(222): NCBI GI NO: 17562272 NR Description: uncoupling protein (5J815)
  misc_feature (1)..(215): NCBI GI NO: 24637836 NR Description: brain mitochondrial carrier protein short-insertedform
MFYSPIRIVGYENLRNVVSVDNASFSIVGKAVVGGISGVLAQVIASPADLVKVRMQADGQRVSQGLQPRYSGPFDALNKIVRAEGFQGLWKGVFPNIQRAFLVNMGELACYDHAKQFVIRSRIADDNVFAHTFASIMSGLAATSLSCPADVVKTRMMNQAAKKEGKVLYNSSYDCLVKTIKVEGIRALWKGFFPTWARLGPWQFVFWVSYEKFRKFAGLSSF

SEQ ID NO: 7892 - DNA, 1454 bp, Glycine max
  misc_feature (1)..(1454): Ceres Seq. ID no. 15171197
ttctttctctctctttttctgtttttttttttgttcctctctctagattttatttgttgttcttcttctttatgagccctaacttggggacccatcgtcgtcgtcgtctttagccatgtcgctgaggaaggtcttccgctcccgcaagttctccagatcgttcaaggaggtgctgccggcggagggcgccgcaattgtcggcggcgaggacggggtcgccggcgccggtgaggagtcgtcgaatgggaataatggttggtccaacatgcttccagagatcctcggcgagatcgtgcggcgcgtggatgccgccgaggaacagtggccgaaccgccagaacgtcgtcgcatgcgcgtgcgtctgcaagcgttggcgtgacatcacgcgcgaggtcgtgcgcgtgccctcccacaccgggaaaataaccttccctgcgtgccttaagcagccaggaccacgtgacgttccccaccaatgtcttataaagcggaacaagaaaacttcaactttttatttatatcttgcccttacaccatcattcacagataaagggaagtttctgctagcagctaggagatataggtgtggtactcataccgagtatataatttcacttgatgctgatgatttatcccaaggaagcaatgcttatgttggaaagctaagctcggattttcttggcaccaacttcacaatttatgacagccagccaccccatagtggtgcaaaaccatcaagtggcagggccagccgtcggtttgccagcaagcagataagcccacaagttcctgcaggtaactttgaggtggggcaggtctcctacaagttcaaccttttgaaatcaagagggccaaggagaatggtttgctcattgaagtgtcccgtgactcctgtcgtctcaccatcggttgaaagttcagatagcacgccggtcaatggccataagattcccgataaagaacaagttgcatctggctacacaatcttgaagaataaagctccaaggtggcatgagcatttgcaatgttggtgcttgaatttccatggccgtgtgacagtggcctcggtgaagaactttcagctggttgcaacagtggaccaaagccaaccaggagggaaaggagatgaggaaacagttctcctccagtttggtaaagtaggggatgatacttttaccatggattatagacagcccttgtctgctttccaggcttttgccatttgcttaactagctttggcactaaacttgcttgtgagtaatataattttggtgtcactgcttatttattccgtggatgaatgtttaagtgaatagttattttattttttttactcggctttgagtcaacaatttgattgcaggaagcttcttgttgtaaatgtgttatatcatcaaataggacatgacatcttccataaatcaaatatattgccctattcaagcggttggtcc

SEQ ID NO: 7893 - protein, 381 aa, Glycine max
  peptide (1)..(381): Ceres Seq. ID no. 15171198
  misc_feature (112)..(381): Pfam Name: Pfam Description:  Tub family
  misc_feature (1)..(381): NCBI GI NO: 18404413 NR Description: F-box containing tubby family protein
  misc_feature (173)..(381): NCBI GI NO: 7769867 NR Description: F12M16.22 [Arabidopsis thaliana]
  misc_feature (1)..(185): NCBI GI NO: 7769867 NR Description: F12M16.22 [Arabidopsis thaliana]
  misc_feature (112)..(381): NCBI GI NO: 34911070 NR Description: putative tubby-like protein
  misc_feature (21)..(111): NCBI GI NO: 34911070 NR Description: putative tubby-like protein
  misc_feature (1)..(379): NCBI GI NO: 34909710 NR Description: putative Tub family protein
  misc_feature (48)..(277): NCBI GI NO: 34899264 NR Description: contains ESTsAU068695
  misc_feature (290)..(381): NCBI GI NO: 34899264 NR Description: contains ESTsAU068695
  misc_feature (48)..(297): NCBI GI NO: 30690823 NR Description: F-box containing tubby family protein
  misc_feature (263)..(381): NCBI GI NO: 30690823 NR Description: F-box containing tubby family protein
MSLRKVFRSRKFSRSFKEVLPAEGAAIVGGEDGVAGAGEESSNGNNGWSNMLPEILGEIVRRVDAAEEQWPNRQNVVACACVCKRWRDITREVVRVPSHTGKITFPACLKQPGPRDVPHQCLIKRNKKTSTFYLYLALTPSFTDKGKFLLAARRYRCGTHTEYIISLDADDLSQGSNAYVGKLSSDFLGTNFTIYDSQPPHSGAKPSSGRASRRFASKQISPQVPAGNFEVGQVSYKFNLLKSRGPRRMVCSLKCPVTPVVSPSVESSDSTPVNGHKIPDKEQVASGYTILKNKAPRWHEHLQCWCLNFHGRVTVASVKNFQLVATVDQSQPGGKGDEETVLLQFGKVGDDTFTMDYRQPLSAFQAFAICLTSFGTKLACE

SEQ ID NO: 7894 - protein, 331 aa, Glycine max
  peptide (1)..(331): Ceres Seq. ID no. 15171199
  misc_feature (62)..(331): Pfam Name: Pfam Description:  Tub family
  misc_feature (1)..(331): NCBI GI NO: 18404413 NR Description: F-box containing tubby family protein
  misc_feature (123)..(331): NCBI GI NO: 7769867 NR Description: F12M16.22 [Arabidopsis thaliana]
  misc_feature (1)..(135): NCBI GI NO: 7769867 NR Description: F12M16.22 [Arabidopsis thaliana]
  misc_feature (62)..(331): NCBI GI NO: 34911070 NR Description: putative tubby-like protein
  misc_feature (1)..(61): NCBI GI NO: 34911070 NR Description: putative tubby-like protein
  misc_feature (1)..(329): NCBI GI NO: 34909710 NR Description: putative Tub family protein
  misc_feature (1)..(227): NCBI GI NO: 34899264 NR Description: contains ESTsAU068695
  misc_feature (240)..(331): NCBI GI NO: 34899264 NR Description: contains ESTsAU068695
  misc_feature (1)..(247): NCBI GI NO: 30690823 NR Description: F-box containing tubby family protein
  misc_feature (213)..(331): NCBI GI NO: 30690823 NR Description: F-box containing tubby family protein
MLPEILGEIVRRVDAAEEQWPNRQNVVACACVCKRWRDITREVVRVPSHTGKITFPACLKQPGPRDVPHQCLIKRNKKTSTFYLYLALTPSFTDKGKFLLAARRYRCGTHTEYIISLDADDLSQGSNAYVGKLSSDFLGTNFTIYDSQPPHSGAKPSSGRASRRFASKQISPQVPAGNFEVGQVSYKFNLLKSRGPRRMVCSLKCPVTPVVSPSVESSDSTPVNGHKIPDKEQVASGYTILKNKAPRWHEHLQCWCLNFHGRVTVASVKNFQLVATVDQSQPGGKGDEETVLLQFGKVGDDTFTMDYRQPLSAFQAFAICLTSFGTKLACE

SEQ ID NO: 7895 - DNA, 1069 bp, Glycine max
  misc_feature (1)..(1069): Ceres Seq. ID no. 14306299
caattggcgattcttcctcacggacctaaaccgcaagtggcctaactcccctacaacaccatagctaaactccaaccacatattcttaaaccaagttcacatatataaattaaggtacatagctcaaaattttgtgccacacaccaacccaagtgccaaaatgaaagcccatttggtccttttcttgctcatgattcttgtcaccttcactagcaatgttaacactctctcgattaatcccaaatctaactcttcaattcctcaattgacccaacagaaaaggcctgacaatgagaccatatatagggtgtcaaagcagctatgttggggttgcattgcggagtcactagagtttttgttcaggcacaacttggtgagagcagccaagtgggaacttccactgatgtgggacttccagctggagcaatacgcgaggtggtgggctggtgaaaggaaagcagattgcaagctcgaacattctttcccagaagatggtttcaagcttggagagaacatttattggggtagtggctcagcgtggacgccaagtgatgctgtaagagcatgggctgatgaagagaaatactacacctacgccactaatacctgtgtgccaggtcagatgtgtggccattacactcaaatagtatggaagagcacccgaagaattggatgtgctcgggttgtatgtgatgatggagatgtcttcatgacttgtaattatgaccctgtgggcaattatgttggagagcgaccctattagattcttataaactatgtgtgcattaattcatgtggatagattgaaactctagtattacataatatgtagtgctagcttatgtgagtgtcatgaatttactagctagtttagtttagcagtgagtatgtgcgagtgtatgtatatagtacttgtgggagaatatgggattggttttaataattacctagtacttggaacaataaataaaagtaccaagaagtaattaaagggtaccagtagttggagatctgttgcctgaggttaaactttgagtcaagtgaaataaaatatttatcctcccatgtg

SEQ ID NO: 7896 - protein, 200 aa, Glycine max
  peptide (1)..(200): Ceres Seq. ID no. 14306300
  misc_feature (66)..(187): Pfam Name: Pfam Description:  SCP-like extracellular protein
  misc_feature (47)..(200): NCBI GI NO: 15235992 NR Description: pathogenesis-related protein, putative
  misc_feature (64)..(200): NCBI GI NO: 2500715 NR Description: Pathogenesis-related protein PR-1 precursor
  misc_feature (42)..(200): NCBI GI NO: 22327916 NR Description: pathogenesis-related protein family
  misc_feature (64)..(200): NCBI GI NO: 15235994 NR Description: pathogenesis-related protein, putative
  misc_feature (55)..(200): NCBI GI NO: 15234704 NR Description: pathogenesis-related protein family
  misc_feature (62)..(200): NCBI GI NO: 15223370 NR Description: pathogenesis-related protein family
  misc_feature (62)..(200): NCBI GI NO: 25518458 NR Description: hypothetical protein F6F3
  misc_feature (64)..(200): NCBI GI NO: 480679 NR Description: pathogenesis-related protein 1a - barley
  misc_feature (64)..(200): NCBI GI NO: 3702665 NR Description: pathogenisis-related protein 1.2
  misc_feature (1)..(200): NCBI GI NO: 15235962 NR Description: pathogenesis-related protein, putative
MKAHLVLFLLMILVTFTSNVNTLSINPKSNSSIPQLTQQKRPDNETIYRVSKQLCWGCIAESLEFLFRHNLVRAAKWELPLMWDFQLEQYARWWAGERKADCKLEHSFPEDGFKLGENIYWGSGSAWTPSDAVRAWADEEKYYTYATNTCVPGQMCGHYTQIVWKSTRRIGCARVVCDDGDVFMTCNYDPVGNYVGERPY

SEQ ID NO: 7897 - protein, 190 aa, Glycine max
  peptide (1)..(190): Ceres Seq. ID no. 14306301
  misc_feature (56)..(177): Pfam Name: Pfam Description:  SCP-like extracellular protein
  misc_feature (37)..(190): NCBI GI NO: 15235992 NR Description: pathogenesis-related protein, putative
  misc_feature (54)..(190): NCBI GI NO: 2500715 NR Description: Pathogenesis-related protein PR-1 precursor
  misc_feature (32)..(190): NCBI GI NO: 22327916 NR Description: pathogenesis-related protein family
  misc_feature (54)..(190): NCBI GI NO: 15235994 NR Description: pathogenesis-related protein, putative
  misc_feature (45)..(190): NCBI GI NO: 15234704 NR Description: pathogenesis-related protein family
  misc_feature (52)..(190): NCBI GI NO: 15223370 NR Description: pathogenesis-related protein family
  misc_feature (52)..(190): NCBI GI NO: 25518458 NR Description: hypothetical protein F6F3
  misc_feature (54)..(190): NCBI GI NO: 480679 NR Description: pathogenesis-related protein 1a - barley
  misc_feature (54)..(190): NCBI GI NO: 3702665 NR Description: pathogenisis-related protein 1.2
  misc_feature (1)..(190): NCBI GI NO: 15235962 NR Description: pathogenesis-related protein, putative
MILVTFTSNVNTLSINPKSNSSIPQLTQQKRPDNETIYRVSKQLCWGCIAESLEFLFRHNLVRAAKWELPLMWDFQLEQYARWWAGERKADCKLEHSFPEDGFKLGENIYWGSGSAWTPSDAVRAWADEEKYYTYATNTCVPGQMCGHYTQIVWKSTRRIGCARVVCDDGDVFMTCNYDPVGNYVGERPY

SEQ ID NO: 7898 - protein, 119 aa, Glycine max
  peptide (1)..(119): Ceres Seq. ID no. 14306302
  misc_feature (1)..(106): Pfam Name: Pfam Description:  SCP-like extracellular protein
  misc_feature (1)..(119): NCBI GI NO: 15235992 NR Description: pathogenesis-related protein, putative
  misc_feature (1)..(119): NCBI GI NO: 2500715 NR Description: Pathogenesis-related protein PR-1 precursor
  misc_feature (1)..(119): NCBI GI NO: 22327916 NR Description: pathogenesis-related protein family
  misc_feature (1)..(119): NCBI GI NO: 15235994 NR Description: pathogenesis-related protein, putative
  misc_feature (1)..(119): NCBI GI NO: 15234704 NR Description: pathogenesis-related protein family
  misc_feature (1)..(119): NCBI GI NO: 15223370 NR Description: pathogenesis-related protein family
  misc_feature (1)..(119): NCBI GI NO: 25518458 NR Description: hypothetical protein F6F3
  misc_feature (1)..(119): NCBI GI NO: 480679 NR Description: pathogenesis-related protein 1a - barley
  misc_feature (1)..(119): NCBI GI NO: 3702665 NR Description: pathogenisis-related protein 1.2
  misc_feature (1)..(119): NCBI GI NO: 15235962 NR Description: pathogenesis-related protein, putative
MWDFQLEQYARWWAGERKADCKLEHSFPEDGFKLGENIYWGSGSAWTPSDAVRAWADEEKYYTYATNTCVPGQMCGHYTQIVWKSTRRIGCARVVCDDGDVFMTCNYDPVGNYVGERPY

SEQ ID NO: 7899 - DNA, 1282 bp, Glycine max
  misc_feature (1)..(1282): Ceres Seq. ID no. 14314647
gaaattcttttaacattgaattacctagctgagaatccagagaccacttgggtaactgaaatggaataaaaagggagtcgagtttcattagcgatagcatgagccagtctagttagccacatggggatggtagatcggcaagagcaacatattcagttcctccttaacattcttcatcccacccaaatccctaaaaattgtcacatccttccccttaacctcaacaccaccacagactgaacccttccgaagctgaaccagaagggcctcctccactcgacgccgccggagcaccggccttctcccgttcctactgaacccagcaatgagacccagctgtgcctgagcctgtcccacaaaaacaattaccaaaaaactaggctagaaaaaaaaaaaagataacttctcaatctgtttttctaaactgtttttattttaaaaaatatattttctcttgagaaacaaattttattgaatacacttatcttaaaattgattttttcctctttgttctcaagatgtcctcacccgaaacccttacattcatggagctcgccatacaacaggcaaagttagctttggatgttcttgaagtgcctgttggatgtgtaattgttgaggatggcaaggttatagcctcaggcaggaatcgaactacccagacacgaaatgctacaaggcatgcagaaatggaagctgtagatgtgcttctcgggcagtggcagaaacatggactttcaatgtctgaagtttctgaaaaattctcaaactgcagcctttatgttacctgtgaaccatgcataatgtgtgcatctgctttatcaattttaggtataaaggaagtattttatggctgttcaaatgataaatttggaggctgtggatcgatactgtcattgcatttaagtaacaccacaccgctcaataatgaagttccacccggaaagtgtttcaaatgtactggaggtataatggcatcagaagctgttcttctctttcgaacattctatgagcaaggaaatcccaatgctccaaagccacacaggcctctagcacgtcaggcatgaagtttaatttgtatataaccagttactgatatggttatcagtcatggcctgaggatctgtgctaccgtagcattttgggcaggttgaagctgttattgaatgccatacagggctttttaattcgaaaaatcaacttcatgtattgattattaatgtatgatttgaaagatgaatcaggggttgccgtttgaaatgaatcttactggattaagttc

SEQ ID NO: 7900 - protein, 182 aa, Glycine max
  peptide (1)..(182): Ceres Seq. ID no. 14314648
  misc_feature (30)..(113): Pfam Name: Pfam Description:  Cytidine and deoxycytidylate deaminase zinc-binding region
  misc_feature (30)..(170): NCBI GI NO: 8778532 NR Description: F21D18.9 [Arabidopsis thaliana]
  misc_feature (58)..(181): NCBI GI NO: 30694260 NR Description: expressed protein [Arabidopsis thaliana]
  misc_feature (1)..(173): NCBI GI NO: 31652308 NR Description: dJ20N2
  misc_feature (1)..(173): NCBI GI NO: 27754114 NR Description: RIKEN cDNA 4933426M09 [Mus musculus]
  misc_feature (32)..(173): NCBI GI NO: 32698845 NR Description: hypothetical protein DKFZp686L1118 [Homo sapiens]
  misc_feature (3)..(182): NCBI GI NO: 31206173 NR Description: ENSANGP00000018657 [Anopheles gambiae]
  misc_feature (1)..(127): NCBI GI NO: 34852600 NR Description: similar to RIKEN cDNA 4933426M09
  misc_feature (9)..(172): NCBI GI NO: 21355527 NR Description: CG5292-PA [Drosophila melanogaster]
  misc_feature (3)..(176): NCBI GI NO: 17541138 NR Description: deaminase (4O9) [Caenorhabditis elegans]
  misc_feature (76)..(179): NCBI GI NO: 23619417 NR Description: cytidine and deoxycytidylate deaminase family
MSSPETLTFMELAIQQAKLALDVLEVPVGCVIVEDGKVIASGRNRTTQTRNATRHAEMEAVDVLLGQWQKHGLSMSEVSEKFSNCSLYVTCEPCIMCASALSILGIKEVFYGCSNDKFGGCGSILSLHLSNTTPLNNEVPPGKCFKCTGGIMASEAVLLFRTFYEQGNPNAPKPHRPLARQA

SEQ ID NO: 7901 - protein, 173 aa, Glycine max
  peptide (1)..(173): Ceres Seq. ID no. 14314649
  misc_feature (21)..(104): Pfam Name: Pfam Description:  Cytidine and deoxycytidylate deaminase zinc-binding region
  misc_feature (21)..(161): NCBI GI NO: 8778532 NR Description: F21D18.9 [Arabidopsis thaliana]
  misc_feature (49)..(172): NCBI GI NO: 30694260 NR Description: expressed protein [Arabidopsis thaliana]
  misc_feature (1)..(164): NCBI GI NO: 31652308 NR Description: dJ20N2
  misc_feature (1)..(164): NCBI GI NO: 27754114 NR Description: RIKEN cDNA 4933426M09 [Mus musculus]
  misc_feature (23)..(164): NCBI GI NO: 32698845 NR Description: hypothetical protein DKFZp686L1118 [Homo sapiens]
  misc_feature (1)..(173): NCBI GI NO: 31206173 NR Description: ENSANGP00000018657 [Anopheles gambiae]
  misc_feature (1)..(118): NCBI GI NO: 34852600 NR Description: similar to RIKEN cDNA 4933426M09
  misc_feature (1)..(163): NCBI GI NO: 21355527 NR Description: CG5292-PA [Drosophila melanogaster]
  misc_feature (1)..(167): NCBI GI NO: 17541138 NR Description: deaminase (4O9) [Caenorhabditis elegans]
  misc_feature (67)..(170): NCBI GI NO: 23619417 NR Description: cytidine and deoxycytidylate deaminase family
MELAIQQAKLALDVLEVPVGCVIVEDGKVIASGRNRTTQTRNATRHAEMEAVDVLLGQWQKHGLSMSEVSEKFSNCSLYVTCEPCIMCASALSILGIKEVFYGCSNDKFGGCGSILSLHLSNTTPLNNEVPPGKCFKCTGGIMASEAVLLFRTFYEQGNPNAPKPHRPLARQA

SEQ ID NO: 7902 - protein, 125 aa, Glycine max
  peptide (1)..(125): Ceres Seq. ID no. 14314650
  misc_feature (1)..(56): Pfam Name: Pfam Description:  Cytidine and deoxycytidylate deaminase zinc-binding region
  misc_feature (1)..(113): NCBI GI NO: 8778532 NR Description: F21D18.9 [Arabidopsis thaliana]
  misc_feature (1)..(124): NCBI GI NO: 30694260 NR Description: expressed protein [Arabidopsis thaliana]
  misc_feature (1)..(116): NCBI GI NO: 31652308 NR Description: dJ20N2
  misc_feature (1)..(116): NCBI GI NO: 27754114 NR Description: RIKEN cDNA 4933426M09 [Mus musculus]
  misc_feature (1)..(116): NCBI GI NO: 32698845 NR Description: hypothetical protein DKFZp686L1118 [Homo sapiens]
  misc_feature (1)..(125): NCBI GI NO: 31206173 NR Description: ENSANGP00000018657 [Anopheles gambiae]
  misc_feature (1)..(70): NCBI GI NO: 34852600 NR Description: similar to RIKEN cDNA 4933426M09
  misc_feature (1)..(115): NCBI GI NO: 21355527 NR Description: CG5292-PA [Drosophila melanogaster]
  misc_feature (1)..(119): NCBI GI NO: 17541138 NR Description: deaminase (4O9) [Caenorhabditis elegans]
  misc_feature (19)..(122): NCBI GI NO: 23619417 NR Description: cytidine and deoxycytidylate deaminase family
MEAVDVLLGQWQKHGLSMSEVSEKFSNCSLYVTCEPCIMCASALSILGIKEVFYGCSNDKFGGCGSILSLHLSNTTPLNNEVPPGKCFKCTGGIMASEAVLLFRTFYEQGNPNAPKPHRPLARQA

SEQ ID NO: 7903 - DNA, 1247 bp, Glycine max
  misc_feature (1)..(1247): Ceres Seq. ID no. 15171212
atgttcttgttcttttacttttctttatatacatcctttaattgctttcgcagttattcatatgaaacgtctgcatatctgccaaaaagttttttactctttaattaaagaatgcatatctataatatgctcattcaatttatccacatgccagcaccctaaaaaagaaaactgtgtgcgtgcatatatatacagatacactagctagattattcttatttaatttgattaatttgatcaggttcttggacaaggcttgtatcagagtacaacagggtacggggagtagcagtaacgacactaaggaaagcccgtggatattgtgcagtgtcgcgcaagttgagcaagcaaagatattgctatcagttattcccatatttgctagcaccattgttttcaacacaatattagcacaactgcaaacattctcggtccaacaagggagttccatggacactcacctcaccaaatcgtttcatgtccctcctgcgtcgcttcaatccattccttacattttgctcattgttgtggtccctctctatgatagtttctttgtcccttttgctagaaaaatcaccggccatgagtccggaatttcacctttgcagcgaataggctttgggctctttctagctacattttctatgatttcagctgcccttgtggagaaaaagagaagggatgcagctgtgaacctcaacgaaactatatccattttttggattaccccacaattcttaatttttggcttgtctgagatgtttacagctgttgggctcattgagttcttctacaaacagtccttgaaagggatgcagacattcttcactgccatcacatattgctcttactcattcggcttttatctgagctcactattggtttctatggtgaataacatcagttcctcttcttcaactggtggttggctccatgacaacgatctcaacaaagacaagcttgactttttctattggttactagctgccctaagcttcctcaacttcctcaactatctcttttggtccagatggtattcttacaagccatcccaatcccaaggcgatactaatgccaatgaaagcattaatctgtttggccacagctctaaaaactactctggagatgacaatattccgtagcaagttgttaatcatatatactctacattaattaattaattaattagtcttgtattaaaattaaagtataaagtacgttatataagaaatctgcacttatctctt

SEQ ID NO: 7904 - protein, 230 aa, Glycine max
  peptide (1)..(230): Ceres Seq. ID no. 15171213
  misc_feature (1)..(134): Pfam Name: Pfam Description:  POT family
  misc_feature (1)..(210): NCBI GI NO: 15217546 NR Description: nitrate transporter NTL1 -related
  misc_feature (1)..(208): NCBI GI NO: 15218903 NR Description: oligopeptide transporter -related
  misc_feature (1)..(208): NCBI GI NO: 25404224 NR Description: hypothetical protein F23H11.6
  misc_feature (1)..(213): NCBI GI NO: 32479675 NR Description: P0076O17.8
  misc_feature (1)..(213): NCBI GI NO: 38346577 NR Description: OSJNBa0064D20.8
  misc_feature (1)..(203): NCBI GI NO: 34909514 NR Description: putative nitrate transporter
  misc_feature (1)..(199): NCBI GI NO: 15240905 NR Description: oligopeptide transporter - like protein
  misc_feature (1)..(199): NCBI GI NO: 28973642 NR Description: putative oligopeptide transporter protein
  misc_feature (1)..(204): NCBI GI NO: 11358579 NR Description: nitrate transporter NTL1
  misc_feature (1)..(204): NCBI GI NO: 18409382 NR Description: nitrate transporter (NTL1) [Arabidopsis thaliana]
MDTHLTKSFHVPPASLQSIPYILLIVVVPLYDSFFVPFARKITGHESGISPLQRIGFGLFLATFSMISAALVEKKRRDAAVNLNETISIFWITPQFLIFGLSEMFTAVGLIEFFYKQSLKGMQTFFTAITYCSYSFGFYLSSLLVSMVNNISSSSSTGGWLHDNDLNKDKLDFFYWLLAALSFLNFLNYLFWSRWYSYKPSQSQGDTNANESINLFGHSSKNYSGDDNIP

SEQ ID NO: 7905 - protein, 165 aa, Glycine max
  peptide (1)..(165): Ceres Seq. ID no. 15171214
  misc_feature (1)..(69): Pfam Name: Pfam Description:  POT family
  misc_feature (1)..(145): NCBI GI NO: 15217546 NR Description: nitrate transporter NTL1 -related
  misc_feature (1)..(143): NCBI GI NO: 15218903 NR Description: oligopeptide transporter -related
  misc_feature (1)..(143): NCBI GI NO: 25404224 NR Description: hypothetical protein F23H11.6
  misc_feature (1)..(148): NCBI GI NO: 32479675 NR Description: P0076O17.8
  misc_feature (1)..(148): NCBI GI NO: 38346577 NR Description: OSJNBa0064D20.8
  misc_feature (1)..(138): NCBI GI NO: 34909514 NR Description: putative nitrate transporter
  misc_feature (1)..(134): NCBI GI NO: 15240905 NR Description: oligopeptide transporter - like protein
  misc_feature (1)..(134): NCBI GI NO: 28973642 NR Description: putative oligopeptide transporter protein
  misc_feature (1)..(139): NCBI GI NO: 11358579 NR Description: nitrate transporter NTL1
  misc_feature (1)..(139): NCBI GI NO: 25404844 NR Description: nitrate transporter (NTL1), 53025-56402
MISAALVEKKRRDAAVNLNETISIFWITPQFLIFGLSEMFTAVGLIEFFYKQSLKGMQTFFTAITYCSYSFGFYLSSLLVSMVNNISSSSSTGGWLHDNDLNKDKLDFFYWLLAALSFLNFLNYLFWSRWYSYKPSQSQGDTNANESINLFGHSSKNYSGDDNIP

SEQ ID NO: 7906 - protein, 127 aa, Glycine max
  peptide (1)..(127): Ceres Seq. ID no. 15171215
  misc_feature (1)..(107): NCBI GI NO: 15217546 NR Description: nitrate transporter NTL1 -related
  misc_feature (1)..(105): NCBI GI NO: 15218903 NR Description: oligopeptide transporter -related
  misc_feature (1)..(105): NCBI GI NO: 25404224 NR Description: hypothetical protein F23H11.6
  misc_feature (1)..(110): NCBI GI NO: 32479675 NR Description: P0076O17.8
  misc_feature (1)..(110): NCBI GI NO: 38346577 NR Description: OSJNBa0064D20.8
  misc_feature (1)..(100): NCBI GI NO: 34909514 NR Description: putative nitrate transporter
  misc_feature (1)..(96): NCBI GI NO: 15240905 NR Description: oligopeptide transporter - like protein
  misc_feature (1)..(96): NCBI GI NO: 28973642 NR Description: putative oligopeptide transporter protein
  misc_feature (1)..(101): NCBI GI NO: 11358579 NR Description: nitrate transporter NTL1
  misc_feature (1)..(101): NCBI GI NO: 17064754 NR Description: nitrate transporter (NTL1) [Arabidopsis thaliana]
MFTAVGLIEFFYKQSLKGMQTFFTAITYCSYSFGFYLSSLLVSMVNNISSSSSTGGWLHDNDLNKDKLDFFYWLLAALSFLNFLNYLFWSRWYSYKPSQSQGDTNANESINLFGHSSKNYSGDDNIP

SEQ ID NO: 7907 - DNA, 1583 bp, Glycine max
  misc_feature (1)..(1583): Ceres Seq. ID no. 14314643
acaacccaccttggattgtttttctgcgaccaaagcacgaacttacacacacacagactccgacttgtgttgtgaaaacctttgtgcattacccgacgcttcttcttttcttgttttcgctccaaaacccattgcttcaatcactaatactccactttcagatcggggtgtgtctctctccaacacgcacaaaaaaaggatttgaagatttggataagttgctttcagtcttgaagtactaaaaaagttgagtgtgaggtgtgaagtgaattttaacagtgataattggtaaatggggacccaaactatggggactcatggtggtggtggagacagtaatgggaaacagtcaccactccagcctctggtgcggcaaaactcaatgtacagtctcacacttgatgaggttcagaatcaattgggcgatttggggaagccgctaactagtatgaacattgatgagcttctaaaaaatgtgtggaccgctgaggcaagtcagaccattggtatggacaatgagggcacagcacaagctagtcaagcttctctgcagcgtcaggctagtctgtcattaaccggtgcactaagcaagaagactgtagatgaggtttggagagatatccaacaaaacaaaatcgtaggggagaagaagttccaagacagacatcctactttgggagaaatgacattggaggatttcttggtgaaagcaggtgttgttgcaggtgcatcttctaatagaacaaataccagtactatagctggagttgattcaaacgtggcagtaccacagtttccttcacaagcacagtggatacaatatccacaagcacaatatcagcatccaccacaaagtttaatggggatgtatatgcctagccaaggtatggtacagccattacacatgggggctggagcttcattagatgtttcgtttgcagataatcagatggcaatgccatcgtctctgatgggaacaatgtcagatacgcagactcctggaagaaaaaagagcacttctgaggacatgatagagaagactgttgagaggagacagaaaaggatgataaaaaatcgggaatctgctgcccgttcaagagcaaggaaacaggcatacacaaatgaattggagaataaagtctcgcgcctggaagaggaaaatgaaaggctgaggaaacgaaaggagctagagcagatgttgtcatgtgcaccccctcctgaacctaaatatcaacttcgccgaatagcatcagctccattctgagatctgtacctagttgtagcggtttgtatatttgagtatcagggaattctccttgtggattactgtgtggttgaatccagtatgtcaagaatagctatgtgatgcatttgcatccaatgacttgcttttaattgttaagttctttataactcctctgtgaaggttctttagaaaaaaatgtaaaatattgtagttttacctttcacaatatagcccttttaataatgccttgaggtacttttacgatttggggatgacaaaattgtggggtcttgccatttttcaagatatgggaaaatagggccactgtttaatattc

SEQ ID NO: 7908 - protein, 323 aa, Glycine max
  peptide (1)..(323): Ceres Seq. ID no. 14314644
  misc_feature (18)..(210): NCBI GI NO: 13346155 NR Description: bZIP protein DPBF3 [Arabidopsis thaliana]
  misc_feature (216)..(323): NCBI GI NO: 13346155 NR Description: bZIP protein DPBF3 [Arabidopsis thaliana]
  misc_feature (13)..(183): NCBI GI NO: 26451276 NR Description: putative bZIP transcription factor AtbZIP12 / DPBF4
  misc_feature (226)..(321): NCBI GI NO: 26451276 NR Description: putative bZIP transcription factor AtbZIP12 / DPBF4
  misc_feature (13)..(183): NCBI GI NO: 18405590 NR Description: bZIP family transcription factor
  misc_feature (226)..(321): NCBI GI NO: 18405590 NR Description: bZIP family transcription factor
  misc_feature (85)..(323): NCBI GI NO: 7489325 NR Description: Dc3 promoter-binding factor-3 - common sunflower
  misc_feature (47)..(183): NCBI GI NO: 21694632 NR Description: basic leucine zipper transcription factor
  misc_feature (226)..(321): NCBI GI NO: 21694632 NR Description: basic leucine zipper transcription factor
  misc_feature (10)..(298): NCBI GI NO: 34909206 NR Description: putative promoter-binding factor-like protein
MGTQTMGTHGGGGDSNGKQSPLQPLVRQNSMYSLTLDEVQNQLGDLGKPLTSMNIDELLKNVWTAEASQTIGMDNEGTAQASQASLQRQASLSLTGALSKKTVDEVWRDIQQNKIVGEKKFQDRHPTLGEMTLEDFLVKAGVVAGASSNRTNTSTIAGVDSNVAVPQFPSQAQWIQYPQAQYQHPPQSLMGMYMPSQGMVQPLHMGAGASLDVSFADNQMAMPSSLMGTMSDTQTPGRKKSTSEDMIEKTVERRQKRMIKNRESAARSRARKQAYTNELENKVSRLEEENERLRKRKELEQMLSCAPPPEPKYQLRRIASAPF

SEQ ID NO: 7909 - protein, 318 aa, Glycine max
  peptide (1)..(318): Ceres Seq. ID no. 14314645
  misc_feature (13)..(205): NCBI GI NO: 13346155 NR Description: bZIP protein DPBF3 [Arabidopsis thaliana]
  misc_feature (211)..(318): NCBI GI NO: 13346155 NR Description: bZIP protein DPBF3 [Arabidopsis thaliana]
  misc_feature (8)..(178): NCBI GI NO: 26451276 NR Description: putative bZIP transcription factor AtbZIP12 / DPBF4
  misc_feature (221)..(316): NCBI GI NO: 26451276 NR Description: putative bZIP transcription factor AtbZIP12 / DPBF4
  misc_feature (8)..(178): NCBI GI NO: 18405590 NR Description: bZIP family transcription factor
  misc_feature (221)..(316): NCBI GI NO: 18405590 NR Description: bZIP family transcription factor
  misc_feature (80)..(318): NCBI GI NO: 7489325 NR Description: Dc3 promoter-binding factor-3 - common sunflower
  misc_feature (42)..(178): NCBI GI NO: 21694632 NR Description: basic leucine zipper transcription factor
  misc_feature (221)..(316): NCBI GI NO: 21694632 NR Description: basic leucine zipper transcription factor
  misc_feature (5)..(293): NCBI GI NO: 34909206 NR Description: putative promoter-binding factor-like protein
MGTHGGGGDSNGKQSPLQPLVRQNSMYSLTLDEVQNQLGDLGKPLTSMNIDELLKNVWTAEASQTIGMDNEGTAQASQASLQRQASLSLTGALSKKTVDEVWRDIQQNKIVGEKKFQDRHPTLGEMTLEDFLVKAGVVAGASSNRTNTSTIAGVDSNVAVPQFPSQAQWIQYPQAQYQHPPQSLMGMYMPSQGMVQPLHMGAGASLDVSFADNQMAMPSSLMGTMSDTQTPGRKKSTSEDMIEKTVERRQKRMIKNRESAARSRARKQAYTNELENKVSRLEEENERLRKRKELEQMLSCAPPPEPKYQLRRIASAPF

SEQ ID NO: 7910 - protein, 293 aa, Glycine max
  peptide (1)..(293): Ceres Seq. ID no. 14314646
  misc_feature (1)..(180): NCBI GI NO: 13346155 NR Description: bZIP protein DPBF3 [Arabidopsis thaliana]
  misc_feature (186)..(293): NCBI GI NO: 13346155 NR Description: bZIP protein DPBF3 [Arabidopsis thaliana]
  misc_feature (1)..(153): NCBI GI NO: 26451276 NR Description: putative bZIP transcription factor AtbZIP12 / DPBF4
  misc_feature (196)..(291): NCBI GI NO: 26451276 NR Description: putative bZIP transcription factor AtbZIP12 / DPBF4
  misc_feature (1)..(153): NCBI GI NO: 18405590 NR Description: bZIP family transcription factor
  misc_feature (196)..(291): NCBI GI NO: 18405590 NR Description: bZIP family transcription factor
  misc_feature (55)..(293): NCBI GI NO: 7489325 NR Description: Dc3 promoter-binding factor-3 - common sunflower
  misc_feature (17)..(153): NCBI GI NO: 21694632 NR Description: basic leucine zipper transcription factor
  misc_feature (196)..(291): NCBI GI NO: 21694632 NR Description: basic leucine zipper transcription factor
  misc_feature (1)..(268): NCBI GI NO: 34909206 NR Description: putative promoter-binding factor-like protein
MYSLTLDEVQNQLGDLGKPLTSMNIDELLKNVWTAEASQTIGMDNEGTAQASQASLQRQASLSLTGALSKKTVDEVWRDIQQNKIVGEKKFQDRHPTLGEMTLEDFLVKAGVVAGASSNRTNTSTIAGVDSNVAVPQFPSQAQWIQYPQAQYQHPPQSLMGMYMPSQGMVQPLHMGAGASLDVSFADNQMAMPSSLMGTMSDTQTPGRKKSTSEDMIEKTVERRQKRMIKNRESAARSRARKQAYTNELENKVSRLEEENERLRKRKELEQMLSCAPPPEPKYQLRRIASAPF

SEQ ID NO: 7911 - DNA, 1131 bp, Glycine max
  misc_feature (1)..(1131): Ceres Seq. ID no. 14306297
gaattgcaacccaagctataggtttaataaacgttgaaactattcctcctgcgccatctccattgctgttttctctctgcttgctattacaatccaattcaagaagttcgttcaactttgatgctcaagtctaacaacatatataaccattgacagatattcaaattcagcataattgtgattaaaattttggtccttccctggaatgaaaatactgtttgtcaataaatttgggagtgatttttgcggttatatttaatgggctgctactgttcaacttcaaagaaaaccgaagcacaaggttatgaggaacccactgttcttgcatctgtgacaccttgtgagtaccatgatccatcattgaatgttactgttagtgaagtagaggccttgcatgaactctacaagaagttgagcaattcaattattgaagatggtcttattcacagggaagaattccagctggcactattcaggaataaaaacaagaaaaatctgtttgcagataggatttttgacttatttgatctcaagcgcaacggggtcattgagtttggggaatttgttcgatcactgggtgtttttcacccaaatgcagcattagaagacaagattacctttgcttttaggttgtatgatctgaggcagacagggtttattgaacgagaggagttaaaggagatggtattggcacttttgcatgagtcggatcttgagctttcagatgatatgattgaaaccattgtggataagacttttagtgatgctgatataaacggtgatggaaggatcgatcaagatgaatggaaagcatttgtgtccaagcatccatccttgataaagaatatgacacttccatatctgaaggatattaccttggcttttcccagttttgtcacaggaacggatattgaagagtcagagatgtgactctgggaggttttggcttcaccaataatgatgctatacactagcatagtagtatttgagtcattttgaatacaaggttagaagtactcttgagaatttttctattggaaaaagttctatatttttaatagaaaagctctaaaaaacacttctggtttgtatccaaacataccatatatatctttgatttcgtctcttgat

SEQ ID NO: 7912 - protein, 223 aa, Glycine max
  peptide (1)..(223): Ceres Seq. ID no. 14306298
  misc_feature (81)..(109): Pfam Name: Pfam Description:  EF hand
  misc_feature (1)..(223): NCBI GI NO: 15237928 NR Description: calcineurin B-like protein, putative
  misc_feature (1)..(220): NCBI GI NO: 18414931 NR Description: calcineurin B-like protein 1 (CBL1)
  misc_feature (1)..(220): NCBI GI NO: 15238015 NR Description: calcineurin B-like protein 9 (CBL9)
  misc_feature (1)..(220): NCBI GI NO: 15217657 NR Description: calcineurin B-like protein (CBL8)
  misc_feature (38)..(220): NCBI GI NO: 15234011 NR Description: calcineurin B-like protein (fragment)
  misc_feature (38)..(220): NCBI GI NO: 30689575 NR Description: calcineurin B-like protein (fragment)
  misc_feature (38)..(221): NCBI GI NO: 15236778 NR Description: calcineurin B-like protein 3 (CBL3)
  misc_feature (1)..(221): NCBI GI NO: 16924116 NR Description: putative calcineurin B-like protein [Oryza sativa]
  misc_feature (5)..(221): NCBI GI NO: 22137326 NR Description: calcineurin B [Pisum sativum]
  misc_feature (1)..(220): NCBI GI NO: 25295757 NR Description: protein F1N19.5 [imported] - Arabidopsis thaliana
MGCYCSTSKKTEAQGYEEPTVLASVTPCEYHDPSLNVTVSEVEALHELYKKLSNSIIEDGLIHREEFQLALFRNKNKKNLFADRIFDLFDLKRNGVIEFGEFVRSLGVFHPNAALEDKITFAFRLYDLRQTGFIEREELKEMVLALLHESDLELSDDMIETIVDKTFSDADINGDGRIDQDEWKAFVSKHPSLIKNMTLPYLKDITLAFPSFVTGTDIEESEM

SEQ ID NO: 7913 - DNA, 1415 bp, Glycine max
  misc_feature (1)..(1415): Ceres Seq. ID no. 14314640
atttttacactctttgccagttgacacttgtttctctcttttcatgactccctttctcccaaaaagtgaaacaccaaaatcctcccacaacaacaacaaacaggttaggacttagagagccactcattcccatttgatggaggcgaagaaggaatatgaagtggaccatctgagcacacccacagggaccagtttctctcagttactattcggagatgacgacgacgacgttgatgaaagtgcattgggtctcgctgtggaccagtcttactcttacaattacaacaaccttacccgttcacctcttttctccattcacaaggcaccccaaatgctttgttttggcaaccatcaaaacgaagaaggtggcgttttgcttcctgaaaccaacgtaacccctcagaaatctgtcatcacttctagtgactcctcttctgctagcgcttcctcctgcaaccacaccaacaccgccttcaattccttacctaagtctaataatagtttgcagaaaaagcgacaagaaggagttgccaaggttggtgttggaagccagagacaaactaaaaagaacaaagcagagaaccccacctcaaccggacatgcaaagaggaaggagaagctcggagaacgaattgcaacgttacaacaacttgtttctccctttggaaagacagatacagcatcagtgcttcacgaggccatgggttatataagatttcttcatgaccaagttcaggtcctgtgctctccttacttgcaaagtttgccttcctcataccatcaaaatcagcacgggggcggaggtaacaatgaagaggaagtgaacaaggacttgaggagtaagggtctttgcttgatccctgtgggatgcaccgtacacgtggcaggtagcaatggtgctgatttttggtcatctgctgcaatagggaacaatgttagtttcaccatcagccaagcagtgaaacgaaaccaagatcaatgaatccttttcaaaaaaagttgtagccttttgggaaatgggtttcctatgtctgcccaaattgaagttgtacccaatctggagatggatggttgaggaggtaaactacatgaaatggcaaagagggataacaaataacaagaatggttcaaagttcacacatgggggtacaaaccagaggccatgattttgtccttaattatgtaacatctgttttggtttttggggggtccttttctcaggacacctatatcaatattctatagaaggaaggaaggaaatattttatgtaggatttagggatgtgtgctggcattgaaccctgaactaggagtctaggattccatatatttttattatagatattttgtctctgtaaatttcggtaggcaagccagttaatgaagttattataacatatatttttattatatac

SEQ ID NO: 7914 - protein, 281 aa, Glycine max
  peptide (1)..(281): Ceres Seq. ID no. 14314641
  misc_feature (158)..(196): Pfam Name: Pfam Description:  Helix-loop-helix DNA-binding domain
  misc_feature (18)..(273): NCBI GI NO: 21536756 NR Description: unknown [Arabidopsis thaliana]
  misc_feature (18)..(273): NCBI GI NO: 18402256 NR Description: expressed protein [Arabidopsis thaliana]
  misc_feature (77)..(280): NCBI GI NO: 14488370 NR Description: putative ethylene-responsive protein
  misc_feature (124)..(259): NCBI GI NO: 22093671 NR Description: bHLH transcription factor-like protein
  misc_feature (118)..(266): NCBI GI NO: 18407276 NR Description: expressed protein [Arabidopsis thaliana]
  misc_feature (118)..(266): NCBI GI NO: 21553730 NR Description: unknown [Arabidopsis thaliana]
  misc_feature (112)..(259): NCBI GI NO: 15232315 NR Description: bHLH transcription factor (bHLH123) -related
  misc_feature (112)..(259): NCBI GI NO: 9294343 NR Description: gene_id:F3H11.2~unknown protein
  misc_feature (143)..(259): NCBI GI NO: 5669656 NR Description: ER33 protein [Lycopersicon esculentum]
  misc_feature (137)..(261): NCBI GI NO: 21740790 NR Description: OSJNBb0091E11.4
MEAKKEYEVDHLSTPTGTSFSQLLFGDDDDDVDESALGLAVDQSYSYNYNNLTRSPLFSIHKAPQMLCFGNHQNEEGGVLLPETNVTPQKSVITSSDSSSASASSCNHTNTAFNSLPKSNNSLQKKRQEGVAKVGVGSQRQTKKNKAENPTSTGHAKRKEKLGERIATLQQLVSPFGKTDTASVLHEAMGYIRFLHDQVQVLCSPYLQSLPSSYHQNQHGGGGNNEEEVNKDLRSKGLCLIPVGCTVHVAGSNGADFWSSAAIGNNVSFTISQAVKRNQDQ

SEQ ID NO: 7915 - protein, 216 aa, Glycine max
  peptide (1)..(216): Ceres Seq. ID no. 14314642
  misc_feature (93)..(131): Pfam Name: Pfam Description:  Helix-loop-helix DNA-binding domain
  misc_feature (1)..(208): NCBI GI NO: 21536756 NR Description: unknown [Arabidopsis thaliana]
  misc_feature (1)..(208): NCBI GI NO: 18402256 NR Description: expressed protein [Arabidopsis thaliana]
  misc_feature (12)..(215): NCBI GI NO: 14488370 NR Description: putative ethylene-responsive protein
  misc_feature (59)..(194): NCBI GI NO: 22093671 NR Description: bHLH transcription factor-like protein
  misc_feature (53)..(201): NCBI GI NO: 18407276 NR Description: expressed protein [Arabidopsis thaliana]
  misc_feature (53)..(201): NCBI GI NO: 21553730 NR Description: unknown [Arabidopsis thaliana]
  misc_feature (47)..(194): NCBI GI NO: 15232315 NR Description: bHLH transcription factor (bHLH123) -related
  misc_feature (47)..(194): NCBI GI NO: 9294343 NR Description: gene_id:F3H11.2~unknown protein
  misc_feature (78)..(194): NCBI GI NO: 5669656 NR Description: ER33 protein [Lycopersicon esculentum]
  misc_feature (72)..(196): NCBI GI NO: 21740790 NR Description: OSJNBb0091E11.4
MLCFGNHQNEEGGVLLPETNVTPQKSVITSSDSSSASASSCNHTNTAFNSLPKSNNSLQKKRQEGVAKVGVGSQRQTKKNKAENPTSTGHAKRKEKLGERIATLQQLVSPFGKTDTASVLHEAMGYIRFLHDQVQVLCSPYLQSLPSSYHQNQHGGGGNNEEEVNKDLRSKGLCLIPVGCTVHVAGSNGADFWSSAAIGNNVSFTISQAVKRNQDQ

SEQ ID NO: 7916 - DNA, 843 bp, Glycine max
  misc_feature (1)..(843): Ceres Seq. ID no. 14306286
acgagtcactcttcttagtgatacttatcctttgctgaaccttgttgtgatctgacatggcagaagaacaacaacgacggatcctggtggccgtggatgaaggcgaggagagcatgtatgctctctcatggtgccttaagaaccttgcttttcaaaattccaaagacacccttcttcttctctacgtcaaaccccctcgagtcacttattcagccttcgatggcacaggatatttgttttcctctgacataacggctaccatggagaggtatagccaacaagtggccgattgcgtcttggagaaagccaagaaattgtgtaacaatattgaaaatgtagagacgagggtagagaatggcgatccaagggacgtgatttgtcagatggttcaaaagttgggtgctgatgtcttagtcatgggaagccatggttatggtctcatcaagagggctttccttggaagcgtcagcaatcactgtgcacagaacgtgaagtgcccggttttgattgttaagaagccaaaaccaaccaccggagaaacataataatgataataataataaattaatcgttactagctttgtttttatgtaaaaaatagacaaccagtttgcttctgtcgcttatgtgttatttgggctctgtgtgttttgtttgtttctcctctaaaggaatatctcgccaaatattaaatgttaaaggctaagtgaagatgaggatgcacgccttttggttttgactttattattttctattcaaaagtttcctattcgtttgttacttttacataatttgtactccatgttgaactattgaatattgataatgctcctaaatcatgat

SEQ ID NO: 7917 - protein, 162 aa, Glycine max
  peptide (1)..(162): Ceres Seq. ID no. 14306287
  misc_feature (6)..(153): Pfam Name: Pfam Description:  Universal stress protein family
  misc_feature (1)..(154): NCBI GI NO: 15228790 NR Description: expressed protein [Arabidopsis thaliana]
  misc_feature (2)..(133): NCBI GI NO: 34905540 NR Description: B1146F03.27
  misc_feature (9)..(156): NCBI GI NO: 30681321 NR Description: ER6 protein -related [Arabidopsis thaliana]
  misc_feature (2)..(156): NCBI GI NO: 20067187 NR Description: putative universal stress protein USP1
  misc_feature (9)..(156): NCBI GI NO: 25402571 NR Description: hypothetical protein
  misc_feature (2)..(156): NCBI GI NO: 22831145 NR Description: universal stress protein USP1-like protein
  misc_feature (7)..(154): NCBI GI NO: 34914610 NR Description: P0520B06.18
  misc_feature (7)..(159): NCBI GI NO: 18399413 NR Description: ethylene-responsive protein -related
  misc_feature (7)..(159): NCBI GI NO: 30681955 NR Description: ethylene-responsive protein -related
  misc_feature (9)..(153): NCBI GI NO: 5669654 NR Description: ER6 protein [Lycopersicon esculentum]
MAEEQQRRILVAVDEGEESMYALSWCLKNLAFQNSKDTLLLLYVKPPRVTYSAFDGTGYLFSSDITATMERYSQQVADCVLEKAKKLCNNIENVETRVENGDPRDVICQMVQKLGADVLVMGSHGYGLIKRAFLGSVSNHCAQNVKCPVLIVKKPKPTTGET

SEQ ID NO: 7918 - protein, 143 aa, Glycine max
  peptide (1)..(143): Ceres Seq. ID no. 14306288
  misc_feature (1)..(134): Pfam Name: Pfam Description:  Universal stress protein family
  misc_feature (1)..(135): NCBI GI NO: 15228790 NR Description: expressed protein [Arabidopsis thaliana]
  misc_feature (1)..(114): NCBI GI NO: 34905540 NR Description: B1146F03.27
  misc_feature (1)..(137): NCBI GI NO: 30681321 NR Description: ER6 protein -related [Arabidopsis thaliana]
  misc_feature (1)..(137): NCBI GI NO: 20067187 NR Description: putative universal stress protein USP1
  misc_feature (1)..(137): NCBI GI NO: 25402571 NR Description: hypothetical protein
  misc_feature (1)..(137): NCBI GI NO: 22831145 NR Description: universal stress protein USP1-like protein
  misc_feature (1)..(135): NCBI GI NO: 34914610 NR Description: P0520B06.18
  misc_feature (1)..(140): NCBI GI NO: 18399413 NR Description: ethylene-responsive protein -related
  misc_feature (1)..(140): NCBI GI NO: 30681955 NR Description: ethylene-responsive protein -related
  misc_feature (1)..(134): NCBI GI NO: 5669654 NR Description: ER6 protein [Lycopersicon esculentum]
MYALSWCLKNLAFQNSKDTLLLLYVKPPRVTYSAFDGTGYLFSSDITATMERYSQQVADCVLEKAKKLCNNIENVETRVENGDPRDVICQMVQKLGADVLVMGSHGYGLIKRAFLGSVSNHCAQNVKCPVLIVKKPKPTTGET

SEQ ID NO: 7919 - protein, 94 aa, Glycine max
  peptide (1)..(94): Ceres Seq. ID no. 14306289
  misc_feature (1)..(85): Pfam Name: Pfam Description:  Universal stress protein family
  misc_feature (1)..(86): NCBI GI NO: 15228790 NR Description: expressed protein [Arabidopsis thaliana]
  misc_feature (1)..(65): NCBI GI NO: 34905540 NR Description: B1146F03.27
  misc_feature (1)..(88): NCBI GI NO: 30681321 NR Description: ER6 protein -related [Arabidopsis thaliana]
  misc_feature (1)..(88): NCBI GI NO: 20067187 NR Description: putative universal stress protein USP1
  misc_feature (1)..(88): NCBI GI NO: 25402571 NR Description: hypothetical protein
  misc_feature (1)..(88): NCBI GI NO: 22831145 NR Description: universal stress protein USP1-like protein
  misc_feature (1)..(86): NCBI GI NO: 34914610 NR Description: P0520B06.18
  misc_feature (1)..(91): NCBI GI NO: 18399413 NR Description: ethylene-responsive protein -related
  misc_feature (1)..(91): NCBI GI NO: 30681955 NR Description: ethylene-responsive protein -related
  misc_feature (1)..(85): NCBI GI NO: 5669654 NR Description: ER6 protein [Lycopersicon esculentum]
MERYSQQVADCVLEKAKKLCNNIENVETRVENGDPRDVICQMVQKLGADVLVMGSHGYGLIKRAFLGSVSNHCAQNVKCPVLIVKKPKPTTGET

SEQ ID NO: 7920 - DNA, 402 bp, Glycine max
  misc_feature (1)..(402): Ceres Seq. ID no. 14306345
aaaaagtgtatatagatatcgattgtagtgagctgtatcttccatctttcaatacattgaattaggtttataatttaaaaattttactcaaggaaaatgagtggctttagagcagcaggaatgaactacattcaagtgtccaacatttgtgctaagctgctaaggcgagctctaaagccaaatttgaagacagaggctctaaaacgagacgaatctgttgtgaggttcactccatggaaagatggaaaggcaatcactgaaaaataaagagattccggaaagattaagaggacgacataaggaaacccagcagcagttcaacataaagtcacctaaaaccatcttagattgaattgttaattatttaagctgtttttactcgctattaaagagtgttaattt

SEQ ID NO: 7921 - protein, 56 aa, Glycine max
  peptide (1)..(56): Ceres Seq. ID no. 14306346
  misc_feature (2)..(50): Pfam Name: Pfam Description:  Mitochondrial ATP synthase epsilon chain
  misc_feature (1)..(51): NCBI GI NO: 31203819 NR Description: ENSANGP00000012584 [Anopheles gambiae]
  misc_feature (1)..(56): NCBI GI NO: 31231703 NR Description: ENSANGP00000025012 [Anopheles gambiae]
  misc_feature (1)..(52): NCBI GI NO: 31210015 NR Description: ENSANGP00000010662 [Anopheles gambiae]
  misc_feature (1)..(56): NCBI GI NO: 24642319 NR Description: stunted CG9032-PB [Drosophila melanogaster]
  misc_feature (1)..(51): NCBI GI NO: 17864256 NR Description: stunted CG9032-PA [Drosophila melanogaster]
  misc_feature (1)..(56): NCBI GI NO: 24645608 NR Description: CG31477-PA [Drosophila melanogaster]
  misc_feature (4)..(52): NCBI GI NO: 21068676 NR Description: putative epsilon subunit of mitochondrial F1-ATPase
MSGFRAAGMNYIQVSNICAKLLRRALKPNLKTEALKRDESVVRFTPWKDGKAITEK

SEQ ID NO: 7922 - protein, 48 aa, Glycine max
  peptide (1)..(48): Ceres Seq. ID no. 14306347
  misc_feature (1)..(42): Pfam Name: Pfam Description:  Mitochondrial ATP synthase epsilon chain
  misc_feature (1)..(43): NCBI GI NO: 31203819 NR Description: ENSANGP00000012584 [Anopheles gambiae]
  misc_feature (1)..(48): NCBI GI NO: 31231703 NR Description: ENSANGP00000025012 [Anopheles gambiae]
  misc_feature (1)..(44): NCBI GI NO: 31210015 NR Description: ENSANGP00000010662 [Anopheles gambiae]
  misc_feature (1)..(48): NCBI GI NO: 24642319 NR Description: stunted CG9032-PB [Drosophila melanogaster]
  misc_feature (1)..(43): NCBI GI NO: 17864256 NR Description: stunted CG9032-PA [Drosophila melanogaster]
  misc_feature (1)..(48): NCBI GI NO: 24645608 NR Description: CG31477-PA [Drosophila melanogaster]
  misc_feature (1)..(44): NCBI GI NO: 21068676 NR Description: putative epsilon subunit of mitochondrial F1-ATPase
MNYIQVSNICAKLLRRALKPNLKTEALKRDESVVRFTPWKDGKAITEK

SEQ ID NO: 7923 - protein, 36 aa, Glycine max
  peptide (1)..(36): Ceres Seq. ID no. 14306348
MERQSLKNKEIPERLRGRHKETQQQFNIKSPKTILD

SEQ ID NO: 7924 - DNA, 835 bp, Glycine max
  misc_feature (1)..(835): Ceres Seq. ID no. 14306255
aatattaatctcttccatcacttaaatctcaattcaccgcaaaccaaaaaaagcttcatcatcatcttcttcttctctgcatcatcacaatggctgaagtacgttcacaacaacaacaaccccagcatgtgcaagtccacgcaaccacaacacacaccccacaacaccatggcggggaaggtggcagcggcattctgaacctcatcccggagatgtccctcacgggttcccaactcctagctctcctcgccggcgttccccttggtgcaatgctgctcctcctctccggcatctcgctcatcgccagcctcttggggctggcggtggcgacgccgctcttcatcttcttcagcccgctgctggtccccgccgccttcgccataggaatggcggtgaccgcggtgctggcggcgggggcgtgcgggctggcggggctcgtgttgttctcgtgggtggtgaactatctccggcagatgccacgggggacgacgatgatgacggtgctgccggagcaagcgaagcggcacgtggcggacatggcggagtacgtggggcagaagacgaaggaggttgggcaagacattcagacaagggcacatcatgcccagggaacaacaaggatgacagtgcattgagttatcatgagacaagaaaatggtttcaatttatatcgcttatgtatgacttgtgagatatactagtatgtaattaacctttggtacgtgtgttttggactttggaggagttccattttcagtgttccatgttgtgtcactttctgtatttgctcatgtacgtgtaatcagtaatattaatgcatttttcttttgggttc

SEQ ID NO: 7925 - protein, 181 aa, Glycine max
  peptide (1)..(181): Ceres Seq. ID no. 14306256
  misc_feature (47)..(165): Pfam Name: Pfam Description:  Oleosin
  misc_feature (11)..(169): NCBI GI NO: 13161005 NR Description: oleosin variant A [Arachis hypogaea]
  misc_feature (11)..(169): NCBI GI NO: 13161008 NR Description: oleosin variant B [Arachis hypogaea]
  misc_feature (17)..(179): NCBI GI NO: 82051 NR Description: lipid body-associated membrane protein - carrot
  misc_feature (1)..(170): NCBI GI NO: 15232141 NR Description: oleosin [Arabidopsis thaliana]
  misc_feature (9)..(169): NCBI GI NO: 1709459 NR Description: P24 OLEOSIN ISOFORM A (P89)
  misc_feature (1)..(176): NCBI GI NO: 266690 NR Description: Oleosin 18.2 kDa
  misc_feature (15)..(179): NCBI GI NO: 1592686 NR Description: oleosin type4 [Arabidopsis thaliana]
  misc_feature (15)..(179): NCBI GI NO: 15232227 NR Description: oleosin [Arabidopsis thaliana]
  misc_feature (1)..(176): NCBI GI NO: 22651523 NR Description: oleosin [Olea europaea subsp. europaea]
  misc_feature (15)..(179): NCBI GI NO: 21554017 NR Description: oleosin isoform [Arabidopsis thaliana]
MAEVRSQQQQPQHVQVHATTTHTPQHHGGEGGSGILNLIPEMSLTGSQLLALLAGVPLGAMLLLLSGISLIASLLGLAVATPLFIFFSPLLVPAAFAIGMAVTAVLAAGACGLAGLVLFSWVVNYLRQMPRGTTMMTVLPEQAKRHVADMAEYVGQKTKEVGQDIQTRAHHAQGTTRMTVH

SEQ ID NO: 7926 - protein, 140 aa, Glycine max
  peptide (1)..(140): Ceres Seq. ID no. 14306257
  misc_feature (6)..(124): Pfam Name: Pfam Description:  Oleosin
  misc_feature (1)..(128): NCBI GI NO: 13161005 NR Description: oleosin variant A [Arachis hypogaea]
  misc_feature (1)..(128): NCBI GI NO: 13161008 NR Description: oleosin variant B [Arachis hypogaea]
  misc_feature (1)..(138): NCBI GI NO: 82051 NR Description: lipid body-associated membrane protein - carrot
  misc_feature (1)..(129): NCBI GI NO: 15232141 NR Description: oleosin [Arabidopsis thaliana]
  misc_feature (1)..(128): NCBI GI NO: 1709459 NR Description: P24 OLEOSIN ISOFORM A (P89)
  misc_feature (1)..(135): NCBI GI NO: 266690 NR Description: Oleosin 18.2 kDa
  misc_feature (1)..(138): NCBI GI NO: 1592686 NR Description: oleosin type4 [Arabidopsis thaliana]
  misc_feature (1)..(138): NCBI GI NO: 15232227 NR Description: oleosin [Arabidopsis thaliana]
  misc_feature (1)..(135): NCBI GI NO: 22651523 NR Description: oleosin [Olea europaea subsp. europaea]
  misc_feature (1)..(138): NCBI GI NO: 21554017 NR Description: oleosin isoform [Arabidopsis thaliana]
MSLTGSQLLALLAGVPLGAMLLLLSGISLIASLLGLAVATPLFIFFSPLLVPAAFAIGMAVTAVLAAGACGLAGLVLFSWVVNYLRQMPRGTTMMTVLPEQAKRHVADMAEYVGQKTKEVGQDIQTRAHHAQGTTRMTVH

SEQ ID NO: 7927 - protein, 121 aa, Glycine max
  peptide (1)..(121): Ceres Seq. ID no. 14306258
  misc_feature (1)..(105): Pfam Name: Pfam Description:  Oleosin
  misc_feature (1)..(109): NCBI GI NO: 13161005 NR Description: oleosin variant A [Arachis hypogaea]
  misc_feature (1)..(109): NCBI GI NO: 13161008 NR Description: oleosin variant B [Arachis hypogaea]
  misc_feature (1)..(119): NCBI GI NO: 82051 NR Description: lipid body-associated membrane protein - carrot
  misc_feature (1)..(110): NCBI GI NO: 15232141 NR Description: oleosin [Arabidopsis thaliana]
  misc_feature (1)..(109): NCBI GI NO: 1709459 NR Description: P24 OLEOSIN ISOFORM A (P89)
  misc_feature (1)..(116): NCBI GI NO: 266690 NR Description: Oleosin 18.2 kDa
  misc_feature (1)..(119): NCBI GI NO: 1592686 NR Description: oleosin type4 [Arabidopsis thaliana]
  misc_feature (1)..(119): NCBI GI NO: 15232227 NR Description: oleosin [Arabidopsis thaliana]
  misc_feature (1)..(116): NCBI GI NO: 22651523 NR Description: oleosin [Olea europaea subsp. europaea]
  misc_feature (1)..(119): NCBI GI NO: 21554017 NR Description: oleosin isoform [Arabidopsis thaliana]
MLLLLSGISLIASLLGLAVATPLFIFFSPLLVPAAFAIGMAVTAVLAAGACGLAGLVLFSWVVNYLRQMPRGTTMMTVLPEQAKRHVADMAEYVGQKTKEVGQDIQTRAHHAQGTTRMTVH

SEQ ID NO: 7928 - DNA, 576 bp, Glycine max
  misc_feature (1)..(576): Ceres Seq. ID no. 14314609
attgaaatttcttctcctgggtttctctatatatttttctttccttgcaagtagattctagcaatttcttctattccttagtattgtttaaaggatgattctttcgatgaagcaagttttctcactagcaatattcattgcattttgggaactttcttctgttgtagctgatgggggagatgtgactatagttcgagtatcaaataatttaaaccaaggtttaagtttcacaattcattgcaaaaccaataacaaagacttgggaactcaagtggtgaatcaaaattactatgaacgatttgaactccatcgtgacaatgcacctggcttaacattcttgttttgcaaaataacatggagagatgcatcaattctatatgtcctttaccaagatgcaagggattttcgccgtagatgtacaactgattgtaattgggaagtcaacaacgaaaaccttcttggcactaatcaatatactctaaaaccagatattattgtcccatggcctaaaaattgatacccatttagtgaacatccaattttacttggataatttaaataaaaaagtgttgtgtt

SEQ ID NO: 7929 - protein, 140 aa, Glycine max
  peptide (1)..(140): Ceres Seq. ID no. 14314610
  misc_feature (33)..(126): Pfam Name: Pfam Description:  Plant self-incompatibility protein S1
  misc_feature (5)..(126): NCBI GI NO: 3097260 NR Description: self-incompatibility [Papaver rhoeas]
  misc_feature (7)..(116): NCBI GI NO: 15239858 NR Description: self-incompatibility protein-related
  misc_feature (8)..(117): NCBI GI NO: 15239857 NR Description: self-incompatibility protein-related
  misc_feature (33)..(126): NCBI GI NO: 2148045 NR Description: self-incompatibility protein S3 precursor
MILSMKQVFSLAIFIAFWELSSVVADGGDVTIVRVSNNLNQGLSFTIHCKTNNKDLGTQVVNQNYYERFELHRDNAPGLTFLFCKITWRDASILYVLYQDARDFRRRCTTDCNWEVNNENLLGTNQYTLKPDIIVPWPKN

SEQ ID NO: 7930 - protein, 136 aa, Glycine max
  peptide (1)..(136): Ceres Seq. ID no. 14314611
  misc_feature (29)..(122): Pfam Name: Pfam Description:  Plant self-incompatibility protein S1
  misc_feature (1)..(122): NCBI GI NO: 3097260 NR Description: self-incompatibility [Papaver rhoeas]
  misc_feature (3)..(112): NCBI GI NO: 15239858 NR Description: self-incompatibility protein-related
  misc_feature (4)..(113): NCBI GI NO: 15239857 NR Description: self-incompatibility protein-related
  misc_feature (29)..(122): NCBI GI NO: 2148045 NR Description: self-incompatibility protein S3 precursor
MKQVFSLAIFIAFWELSSVVADGGDVTIVRVSNNLNQGLSFTIHCKTNNKDLGTQVVNQNYYERFELHRDNAPGLTFLFCKITWRDASILYVLYQDARDFRRRCTTDCNWEVNNENLLGTNQYTLKPDIIVPWPKN

SEQ ID NO: 7931 - DNA, 1292 bp, Glycine max
  misc_feature (1)..(1292): Ceres Seq. ID no. 14314651
ccttttttaagactgagagagttatgttttgtccatgtcattgacacagtattaaatattacaaatattctgttcaaaaacaagttttaaaatgagctgtaaaatcaaccatataatcaaaagtgtgattaaaacaattaagtaatacaagctagtttatttctgcttccaacaagcatgcagtgcacttattaaaaaaagggttaggttagtcaattaggcaaaacatgttaaactgttagttcaacaatataaaaatgcatttaattacttgtcttgtagtttatttaacattaattggacaaaataaagctgaatcaatgcttgaaggcttctactgcggccgagacaattgttatgatgtgttgggtgttactcgggatacaagcagagctgacattgcaaaagcctacagaaaacttgcaaaaaaattccatccagatttatataggaatgaagatgagaaaatagaagcggaatctaattttaagagggtagccaatgcatatgaaatcctcaaagatgaagaatcacgaatggactatgattacatgcttgacaatccagagcaggtgtacagccattactaccgatattatcgtaggagagttgcgcctaaagtggatgttcgagtagtgatagccgtcagtattactatcatatccgctattcagtatgtcactgcttggcagagatacaactcggcaataaaatacttattgacagttccaaaatacagaaataaggcgctgcaaattgccaaagaaaaagggctgcttgaaaaagttagaaaaacacgaggaaaaagcaagtcagaagtgaaagaggaaactgaagatgtaatacgaaaagtgttagaagagaacatggatatcagaggagcatatgccaagccagtgataactgatattctgtggctgaaaataatacttttcccagttgatttagtaaaatacatgtactggtacacatgttggatttggaagcataatatcctccaacttccttatgatgatgaagaaaagctgtatcttatcaggaagtacatgaagaaaggacctaatcaatttgctgctattgaagaatctgaaaaacaagagtacttaaaacaagaactgtggatcagagagaaatttgatgtatggtttcaagaaaaagaagaagaacagaaaaagcttcttgctgaaaatgcgagatacaaagcataccgaagatacctcaagacacatggaactggaagaatgacatttgatgattcatgattttgtgatttattataattctcagttgtt

SEQ ID NO: 7932 - protein, 334 aa, Glycine max
  peptide (1)..(334): Ceres Seq. ID no. 14314652
  misc_feature (32)..(100): Pfam Name: Pfam Description:  DnaJ domain
  misc_feature (8)..(333): NCBI GI NO: 18859921 NR Description: CG7872-PA [Drosophila melanogaster]
  misc_feature (3)..(333): NCBI GI NO: 31219417 NR Description: ENSANGP00000010358 [Anopheles gambiae]
  misc_feature (19)..(333): NCBI GI NO: 38078426 NR Description: RIKEN cDNA 2010203O07 [Mus musculus]
  misc_feature (19)..(333): NCBI GI NO: 34868434 NR Description: similar to bA16L21
  misc_feature (3)..(333): NCBI GI NO: 12313893 NR Description: bA16L21
  misc_feature (7)..(326): NCBI GI NO: 39593758 NR Description: Hypothetical protein CBG06069
  misc_feature (27)..(326): NCBI GI NO: 17538212 NR Description: DNaJ domain (prokaryotic heat shock protein) (40
  misc_feature (99)..(333): NCBI GI NO: 13874539 NR Description: hypothetical protein [Macaca fascicularis]
  misc_feature (4)..(306): NCBI GI NO: 30696610 NR Description: DnaJ protein family [Arabidopsis thaliana]
  misc_feature (4)..(262): NCBI GI NO: 25404348 NR Description: hypothetical protein T13M11.13
MHLITCLVVYLTLIGQNKAESMLEGFYCGRDNCYDVLGVTRDTSRADIAKAYRKLAKKFHPDLYRNEDEKIEAESNFKRVANAYEILKDEESRMDYDYMLDNPEQVYSHYYRYYRRRVAPKVDVRVVIAVSITIISAIQYVTAWQRYNSAIKYLLTVPKYRNKALQIAKEKGLLEKVRKTRGKSKSEVKEETEDVIRKVLEENMDIRGAYAKPVITDILWLKIILFPVDLVKYMYWYTCWIWKHNILQLPYDDEEKLYLIRKYMKKGPNQFAAIEESEKQEYLKQELWIREKFDVWFQEKEEEQKKLLAENARYKAYRRYLKTHGTGRMTFDDS

SEQ ID NO: 7933 - protein, 313 aa, Glycine max
  peptide (1)..(313): Ceres Seq. ID no. 14314653
  misc_feature (11)..(79): Pfam Name: Pfam Description:  DnaJ domain
  misc_feature (1)..(312): NCBI GI NO: 18859921 NR Description: CG7872-PA [Drosophila melanogaster]
  misc_feature (1)..(312): NCBI GI NO: 31219417 NR Description: ENSANGP00000010358 [Anopheles gambiae]
  misc_feature (1)..(312): NCBI GI NO: 38078426 NR Description: RIKEN cDNA 2010203O07 [Mus musculus]
  misc_feature (1)..(312): NCBI GI NO: 34868434 NR Description: similar to bA16L21
  misc_feature (1)..(312): NCBI GI NO: 12313893 NR Description: bA16L21
  misc_feature (1)..(305): NCBI GI NO: 39593758 NR Description: Hypothetical protein CBG06069
  misc_feature (6)..(305): NCBI GI NO: 17538212 NR Description: DNaJ domain (prokaryotic heat shock protein) (40
  misc_feature (78)..(312): NCBI GI NO: 13874539 NR Description: hypothetical protein [Macaca fascicularis]
  misc_feature (1)..(285): NCBI GI NO: 30696610 NR Description: DnaJ protein family [Arabidopsis thaliana]
  misc_feature (1)..(241): NCBI GI NO: 25404348 NR Description: hypothetical protein T13M11.13
MLEGFYCGRDNCYDVLGVTRDTSRADIAKAYRKLAKKFHPDLYRNEDEKIEAESNFKRVANAYEILKDEESRMDYDYMLDNPEQVYSHYYRYYRRRVAPKVDVRVVIAVSITIISAIQYVTAWQRYNSAIKYLLTVPKYRNKALQIAKEKGLLEKVRKTRGKSKSEVKEETEDVIRKVLEENMDIRGAYAKPVITDILWLKIILFPVDLVKYMYWYTCWIWKHNILQLPYDDEEKLYLIRKYMKKGPNQFAAIEESEKQEYLKQELWIREKFDVWFQEKEEEQKKLLAENARYKAYRRYLKTHGTGRMTFDDS

SEQ ID NO: 7934 - protein, 241 aa, Glycine max
  peptide (1)..(241): Ceres Seq. ID no. 14314654
  misc_feature (1)..(240): NCBI GI NO: 18859921 NR Description: CG7872-PA [Drosophila melanogaster]
  misc_feature (1)..(240): NCBI GI NO: 31219417 NR Description: ENSANGP00000010358 [Anopheles gambiae]
  misc_feature (1)..(240): NCBI GI NO: 38078426 NR Description: RIKEN cDNA 2010203O07 [Mus musculus]
  misc_feature (1)..(240): NCBI GI NO: 34868434 NR Description: similar to bA16L21
  misc_feature (1)..(240): NCBI GI NO: 12313893 NR Description: bA16L21
  misc_feature (1)..(233): NCBI GI NO: 39593758 NR Description: Hypothetical protein CBG06069
  misc_feature (1)..(233): NCBI GI NO: 17538212 NR Description: DNaJ domain (prokaryotic heat shock protein) (40
  misc_feature (6)..(240): NCBI GI NO: 13874539 NR Description: hypothetical protein [Macaca fascicularis]
  misc_feature (1)..(213): NCBI GI NO: 30696610 NR Description: DnaJ protein family [Arabidopsis thaliana]
  misc_feature (1)..(169): NCBI GI NO: 25404348 NR Description: hypothetical protein T13M11.13
MDYDYMLDNPEQVYSHYYRYYRRRVAPKVDVRVVIAVSITIISAIQYVTAWQRYNSAIKYLLTVPKYRNKALQIAKEKGLLEKVRKTRGKSKSEVKEETEDVIRKVLEENMDIRGAYAKPVITDILWLKIILFPVDLVKYMYWYTCWIWKHNILQLPYDDEEKLYLIRKYMKKGPNQFAAIEESEKQEYLKQELWIREKFDVWFQEKEEEQKKLLAENARYKAYRRYLKTHGTGRMTFDDS

SEQ ID NO: 7935 - DNA, 1637 bp, Glycine max
  misc_feature (1)..(1637): Ceres Seq. ID no. 14314636
gctcttggctgatatttcctgataagtggacagacgcttaaacagagaaactaacacagatttgcatgcatggggaaaataacgcacattgtagtaattcccagtgcagggtacagccacttcgttcccgttatccacttctcaaagagacttgttgagcttcacccagaaattcacgtcacatgcatcattcccattctggggtctctcccaagtgctgcaaaacccattctccaaacccttccacaaaacatcaacacggttttccttccaccggtgaaccctaatgacctaccacaaggtgttcccgtagttgtccaaattcagctagcaatggctcactccatgccctccatccaccacaccctcaagtccataacttcaaagactccctacgtggccatggtggttgattctttcgccatgcatgccctagatttcgctcacgagttcaacatgttgtcctacgtttacttccctatatcagccaccacactctccatgcacttgaacttgcccttgttggacgaggaaacatcatgtgagtacagatatctgccggaggctatcaaattaccgggttgcgtgccgtttcacggccgcgatctctatgcccaagcccaggatcgaaccagtcaactctaccagatgtcgctgaagcgttacaaacgatgctggttcgttaatgggatcttcatcaacagcttcctggcattggaaactggtcctataagagcattgagagatgaggatagaggttaccctgctgtgtaccctgttggaccacttgtccaaagtggtgatgatgatgcaaaagggttattggagtgtgtaacatggttggagaaacagcaagatggttcagttttgtatgtttcttttgggagtggtggaacactttcacaagagcaaatgaatgagctggcttgtggtttggagttgagtaaccacaagttcttgtgggttgtgagagcaccgaacaatgcaaaagctgatgctgcttatcttggtgcacaaaagtgtgttgaccctttgcagttcttaccatgtgagttcttggagaggacaaaagagaaaggtatggttgttccttcatgggcaccgcaggttcaaatccttagccacagttcagttggtgggttcttgactcactgtggctggaattcgaccctcgagagtgtgctgcatggtgtgccattgataacttggccactgtatgctgagcagagaatgaatgcggttgtgctttgtgaggatctcaaagtgggattgaggccgagagttggtgaaaatggtttggtcgagagaaaagaaattgctgatgttgtgaagcgtttgatggaaggaagggaaggtggggaaatgcgaaaaagaatgaagaaactagaagttgcggctgttaatgctctcaaagaagatgggtcttctaccaagactctttcagagttggcactaatgtggaaaaatgtggcttaggaaaacaagttttttatttatgttatgcatgcagcttgtgtagtagtgcctgtaatgttcaggtatttcgtatcttagtttttatttatgtaatgtaatgcagcttgtatggtgcttgtgtttttagttataaataaataaactttggtcattacaagatc

SEQ ID NO: 7936 - protein, 468 aa, Glycine max
  peptide (1)..(468): Ceres Seq. ID no. 14314637
  misc_feature (6)..(467): Pfam Name: Pfam Description:  UDP-glucoronosyl and UDP-glucosyl transferase
  misc_feature (1)..(467): NCBI GI NO: 19911209 NR Description: glucosyltransferase-13 [Vigna angularis]
  misc_feature (6)..(466): NCBI GI NO: 28380078 NR Description: Hydroquinone glucosyltransferase
  misc_feature (3)..(465): NCBI GI NO: 15234056 NR Description: glycosyltransferase family [Arabidopsis thaliana]
  misc_feature (55)..(457): NCBI GI NO: 19911195 NR Description: glucosyltransferase-6 [Vigna angularis]
  misc_feature (2)..(465): NCBI GI NO: 15223396 NR Description: glycosyltransferase family [Arabidopsis thaliana]
  misc_feature (6)..(465): NCBI GI NO: 15223392 NR Description: glycosyltransferase family [Arabidopsis thaliana]
  misc_feature (10)..(465): NCBI GI NO: 25286808 NR Description: protein probable UTP-glucose glucosyltransferase
  misc_feature (37)..(465): NCBI GI NO: 7433902 NR Description: UTP-glucose glucosyltransferase homologA_IG002N01
  misc_feature (6)..(468): NCBI GI NO: 34912764 NR Description: putative UTP-glucose glucosyltransferase
  misc_feature (6)..(465): NCBI GI NO: 34912752 NR Description: putative UTP-glucose glucosyltransferase
MGKITHIVVIPSAGYSHFVPVIHFSKRLVELHPEIHVTCIIPILGSLPSAAKPILQTLPQNINTVFLPPVNPNDLPQGVPVVVQIQLAMAHSMPSIHHTLKSITSKTPYVAMVVDSFAMHALDFAHEFNMLSYVYFPISATTLSMHLNLPLLDEETSCEYRYLPEAIKLPGCVPFHGRDLYAQAQDRTSQLYQMSLKRYKRCWFVNGIFINSFLALETGPIRALRDEDRGYPAVYPVGPLVQSGDDDAKGLLECVTWLEKQQDGSVLYVSFGSGGTLSQEQMNELACGLELSNHKFLWVVRAPNNAKADAAYLGAQKCVDPLQFLPCEFLERTKEKGMVVPSWAPQVQILSHSSVGGFLTHCGWNSTLESVLHGVPLITWPLYAEQRMNAVVLCEDLKVGLRPRVGENGLVERKEIADVVKRLMEGREGGEMRKRMKKLEVAAVNALKEDGSSTKTLSELALMWKNVA

SEQ ID NO: 7937 - protein, 380 aa, Glycine max
  peptide (1)..(380): Ceres Seq. ID no. 14314638
  misc_feature (1)..(379): Pfam Name: Pfam Description:  UDP-glucoronosyl and UDP-glucosyl transferase
  misc_feature (1)..(379): NCBI GI NO: 19911209 NR Description: glucosyltransferase-13 [Vigna angularis]
  misc_feature (1)..(378): NCBI GI NO: 28380078 NR Description: Hydroquinone glucosyltransferase
  misc_feature (1)..(377): NCBI GI NO: 15234056 NR Description: glycosyltransferase family [Arabidopsis thaliana]
  misc_feature (1)..(369): NCBI GI NO: 19911195 NR Description: glucosyltransferase-6 [Vigna angularis]
  misc_feature (1)..(377): NCBI GI NO: 15223396 NR Description: glycosyltransferase family [Arabidopsis thaliana]
  misc_feature (1)..(377): NCBI GI NO: 15223392 NR Description: glycosyltransferase family [Arabidopsis thaliana]
  misc_feature (1)..(377): NCBI GI NO: 25286808 NR Description: protein probable UTP-glucose glucosyltransferase
  misc_feature (1)..(377): NCBI GI NO: 7433902 NR Description: UTP-glucose glucosyltransferase homologA_IG002N01
  misc_feature (1)..(380): NCBI GI NO: 34912764 NR Description: putative UTP-glucose glucosyltransferase
  misc_feature (1)..(377): NCBI GI NO: 34912752 NR Description: putative UTP-glucose glucosyltransferase
MAHSMPSIHHTLKSITSKTPYVAMVVDSFAMHALDFAHEFNMLSYVYFPISATTLSMHLNLPLLDEETSCEYRYLPEAIKLPGCVPFHGRDLYAQAQDRTSQLYQMSLKRYKRCWFVNGIFINSFLALETGPIRALRDEDRGYPAVYPVGPLVQSGDDDAKGLLECVTWLEKQQDGSVLYVSFGSGGTLSQEQMNELACGLELSNHKFLWVVRAPNNAKADAAYLGAQKCVDPLQFLPCEFLERTKEKGMVVPSWAPQVQILSHSSVGGFLTHCGWNSTLESVLHGVPLITWPLYAEQRMNAVVLCEDLKVGLRPRVGENGLVERKEIADVVKRLMEGREGGEMRKRMKKLEVAAVNALKEDGSSTKTLSELALMWKNVA

SEQ ID NO: 7938 - protein, 376 aa, Glycine max
  peptide (1)..(376): Ceres Seq. ID no. 14314639
  misc_feature (1)..(375): Pfam Name: Pfam Description:  UDP-glucoronosyl and UDP-glucosyl transferase
  misc_feature (1)..(375): NCBI GI NO: 19911209 NR Description: glucosyltransferase-13 [Vigna angularis]
  misc_feature (1)..(374): NCBI GI NO: 28380078 NR Description: Hydroquinone glucosyltransferase
  misc_feature (1)..(373): NCBI GI NO: 15234056 NR Description: glycosyltransferase family [Arabidopsis thaliana]
  misc_feature (1)..(365): NCBI GI NO: 19911195 NR Description: glucosyltransferase-6 [Vigna angularis]
  misc_feature (1)..(373): NCBI GI NO: 15223396 NR Description: glycosyltransferase family [Arabidopsis thaliana]
  misc_feature (1)..(373): NCBI GI NO: 15223392 NR Description: glycosyltransferase family [Arabidopsis thaliana]
  misc_feature (1)..(373): NCBI GI NO: 25286808 NR Description: protein probable UTP-glucose glucosyltransferase
  misc_feature (1)..(373): NCBI GI NO: 7433902 NR Description: UTP-glucose glucosyltransferase homologA_IG002N01
  misc_feature (1)..(376): NCBI GI NO: 34912764 NR Description: putative UTP-glucose glucosyltransferase
  misc_feature (1)..(373): NCBI GI NO: 34912752 NR Description: putative UTP-glucose glucosyltransferase
MPSIHHTLKSITSKTPYVAMVVDSFAMHALDFAHEFNMLSYVYFPISATTLSMHLNLPLLDEETSCEYRYLPEAIKLPGCVPFHGRDLYAQAQDRTSQLYQMSLKRYKRCWFVNGIFINSFLALETGPIRALRDEDRGYPAVYPVGPLVQSGDDDAKGLLECVTWLEKQQDGSVLYVSFGSGGTLSQEQMNELACGLELSNHKFLWVVRAPNNAKADAAYLGAQKCVDPLQFLPCEFLERTKEKGMVVPSWAPQVQILSHSSVGGFLTHCGWNSTLESVLHGVPLITWPLYAEQRMNAVVLCEDLKVGLRPRVGENGLVERKEIADVVKRLMEGREGGEMRKRMKKLEVAAVNALKEDGSSTKTLSELALMWKNVA

SEQ ID NO: 7939 - DNA, 898 bp, Glycine max
  misc_feature (1)..(898): Ceres Seq. ID no. 14306223
aagacacaactccaacaaggcattgtttggtttggtttggttacttgaaaatctcgaatcgcttaattttgatttagttttccaccgcaacgcggaacctctttctcgaactggctaactctcaggcaagtggctcggacgctgattccagcaacacacggctggtggttgcactgtatgacgccctaaactccggcgactccaacgccgtcgtcaagatcgtcgccgccgacctcgagtggtggttccatggtccgccctctcaccagtttttgatgcgcatgctcaccggcgactccgccgccgacaactccttccgattcgttccgcagtccatcgccgccttcggctccaccgtcatcgtcgagggctgcgactccgcccgcaacattgcctgggtccacgcctggaccgtcactgatgggatgatcactcaaatcagagagtacttcaacaccgccctcaccgtcactcgcatccacgattccggcgagattgttccggccagatccggcgccggccgtttgccctgcgtctgggagagcagcgtctccggtcgggtcgggaaatccgtccccggtttggttctcgcaatataaaatataaaataagtaattagggaaggacgaggtcacgtgttgccgttgctataataattaaataagggacttgtgcacgtggcggtgactggatcgatcggtttcagggaacattgatactttgtgttagtattggaggttagggagatgtgagagctttgttgttattggtgtggtttgttttgtttgcttgtgtgtttttcaccactatgggcgtattcaggtggttgtatctttcttttgttatttggagtgttgatgatgatgcaataagaatatctatggactatgcttttaag

SEQ ID NO: 7940 - protein, 107 aa, Glycine max
  peptide (1)..(107): Ceres Seq. ID no. 14306224
  misc_feature (1)..(107): NCBI GI NO: 15228414 NR Description: expressed protein [Arabidopsis thaliana]
  misc_feature (1)..(107): NCBI GI NO: 15028339 NR Description: unknown protein [Arabidopsis thaliana]
  misc_feature (1)..(107): NCBI GI NO: 4574320 NR Description: wound-induced protein WI12
  misc_feature (1)..(107): NCBI GI NO: 139780 NR Description: WOUND-INDUCED PROTEIN 1
  misc_feature (1)..(107): NCBI GI NO: 10241935 NR Description: elicitor inducible protein [Nicotiana tabacum]
  misc_feature (1)..(107): NCBI GI NO: 15241041 NR Description: expressed protein [Arabidopsis thaliana]
  misc_feature (1)..(68): NCBI GI NO: 34898184 NR Description: P0034A04.2
MRMLTGDSAADNSFRFVPQSIAAFGSTVIVEGCDSARNIAWVHAWTVTDGMITQIREYFNTALTVTRIHDSGEIVPARSGAGRLPCVWESSVSGRVGKSVPGLVLAI

SEQ ID NO: 7941 - protein, 105 aa, Glycine max
  peptide (1)..(105): Ceres Seq. ID no. 14306225
  misc_feature (1)..(105): NCBI GI NO: 15228414 NR Description: expressed protein [Arabidopsis thaliana]
  misc_feature (1)..(105): NCBI GI NO: 15028339 NR Description: unknown protein [Arabidopsis thaliana]
  misc_feature (1)..(105): NCBI GI NO: 4574320 NR Description: wound-induced protein WI12
  misc_feature (1)..(105): NCBI GI NO: 139780 NR Description: WOUND-INDUCED PROTEIN 1
  misc_feature (1)..(105): NCBI GI NO: 10241935 NR Description: elicitor inducible protein [Nicotiana tabacum]
  misc_feature (1)..(105): NCBI GI NO: 15241041 NR Description: expressed protein [Arabidopsis thaliana]
  misc_feature (1)..(66): NCBI GI NO: 34898184 NR Description: P0034A04.2
MLTGDSAADNSFRFVPQSIAAFGSTVIVEGCDSARNIAWVHAWTVTDGMITQIREYFNTALTVTRIHDSGEIVPARSGAGRLPCVWESSVSGRVGKSVPGLVLAI

SEQ ID NO: 7942 - protein, 57 aa, Glycine max
  peptide (1)..(57): Ceres Seq. ID no. 14306226
  misc_feature (1)..(57): NCBI GI NO: 15228414 NR Description: expressed protein [Arabidopsis thaliana]
  misc_feature (1)..(57): NCBI GI NO: 15028339 NR Description: unknown protein [Arabidopsis thaliana]
  misc_feature (1)..(57): NCBI GI NO: 4574320 NR Description: wound-induced protein WI12
  misc_feature (1)..(57): NCBI GI NO: 139780 NR Description: WOUND-INDUCED PROTEIN 1
  misc_feature (1)..(57): NCBI GI NO: 10241935 NR Description: elicitor inducible protein [Nicotiana tabacum]
  misc_feature (1)..(57): NCBI GI NO: 15241041 NR Description: expressed protein [Arabidopsis thaliana]
  misc_feature (1)..(18): NCBI GI NO: 34898184 NR Description: P0034A04.2
MITQIREYFNTALTVTRIHDSGEIVPARSGAGRLPCVWESSVSGRVGKSVPGLVLAI

SEQ ID NO: 7943 - DNA, 1475 bp, Glycine max
  misc_feature (1)..(1475): Ceres Seq. ID no. 14314031
aggactagcatttgcaccaaatgtgagtcacgcagctcttcactttgaagactgaagacggtggcgtttagggtttcggaagagcatgcaattgaacccaaatggcgacggctgaagatgctccagtgctccctgaggacctcatagtggaaattctgtcatgggttgaagtgaagaatctcatgcgattcaggtgcgtttccaagtcctggaattccctcatcttcaatcccacattcattaaattgcaccttcaaaggtcctcccaaaacatccacatcctgttaacatttgaccaagattcatcgaacccctacccgtaccatgatgataactacatctccgtcgttgccgcaccctgctctatacagcgtttacttgagaacccatcatccactatttataatatagttcattttctcgaggctcagtcaacatcatcatcgtccactatttattttgatgtttgttaccgatttaagcacacttatttgttcttgggtgtatgcaatgggttggtttgcttgcttgattgtttgtatgaggatgaatttgaggaatactgggtccgattttggaacccggccactagggccatgtccgcagattcgccccacttgcgtgtccattcgagcaattataaacttggagacattgctgtgaagcatgcgtttgggtacgatgattcgagtgacacttacaaggtgttggcgatcctttttaacgttaaatcacaagattgggagctgagagttcactgcatgggtgatgacactggttggagaaatgttttgacttgttctgcttttcccattttgcaacaagtttatgggcagtttgtgagtggcactcttaactggctagcacttaacaattcgtcgggttctgatcattatcaatgggaaactgtcactgtcgatcagttagtcattttttcctatgatctgaagaacgagacatacagttatttgtcgatgcctgatggtctttctgaaatctctcttgacgagccttatcttggggttttgaatggctgcctttgtctttctcatgatcacaggcgaaccaatcttgttgtttggctaatgagagagtttggagctgaaaagtcttggactcagttgctgaatgtaagctatcatcatcttcaagttctagattttccaccttgtccagtggtacctttgtgcaagtctgaaaatgacgacgtcctgttgctggaagactatggaggtggtgcagaatttgttctggttgataagagagataatagtatagaccgcatggaaggtttcaacaatggattatcgtctttctctgcatttgtctctcatgattatgttcaaagtttggttttgccatatcgaaattaagctacctgcatttgcttatattatgtaagtggtttcagaaccgtggcatttaacatttggacaggagagatagcttgaataattttggtggttccttagttt

SEQ ID NO: 7944 - protein, 423 aa, Glycine max
  peptide (1)..(423): Ceres Seq. ID no. 14314032
  misc_feature (10)..(52): Pfam Name: Pfam Description:  F-box domain
  misc_feature (9)..(352): NCBI GI NO: 6862928 NR Description: hypothetical protein [Arabidopsis thaliana]
  misc_feature (9)..(352): NCBI GI NO: 30679777 NR Description: F-box protein family [Arabidopsis thaliana]
  misc_feature (174)..(344): NCBI GI NO: 15229536 NR Description: F-box protein family [Arabidopsis thaliana]
  misc_feature (10)..(105): NCBI GI NO: 15229536 NR Description: F-box protein family [Arabidopsis thaliana]
  misc_feature (159)..(419): NCBI GI NO: 7487230 NR Description: hypothetical protein T1P17
  misc_feature (10)..(62): NCBI GI NO: 7487230 NR Description: hypothetical protein T1P17
  misc_feature (159)..(419): NCBI GI NO: 30682162 NR Description: F-box protein family [Arabidopsis thaliana]
  misc_feature (10)..(62): NCBI GI NO: 30682162 NR Description: F-box protein family [Arabidopsis thaliana]
  misc_feature (139)..(254): NCBI GI NO: 25405558 NR Description: hypothetical protein F6D8.30
  misc_feature (10)..(65): NCBI GI NO: 25405558 NR Description: hypothetical protein F6D8.30
MATAEDAPVLPEDLIVEILSWVEVKNLMRFRCVSKSWNSLIFNPTFIKLHLQRSSQNIHILLTFDQDSSNPYPYHDDNYISVVAAPCSIQRLLENPSSTIYNIVHFLEAQSTSSSSTIYFDVCYRFKHTYLFLGVCNGLVCLLDCLYEDEFEEYWVRFWNPATRAMSADSPHLRVHSSNYKLGDIAVKHAFGYDDSSDTYKVLAILFNVKSQDWELRVHCMGDDTGWRNVLTCSAFPILQQVYGQFVSGTLNWLALNNSSGSDHYQWETVTVDQLVIFSYDLKNETYSYLSMPDGLSEISLDEPYLGVLNGCLCLSHDHRRTNLVVWLMREFGAEKSWTQLLNVSYHHLQVLDFPPCPVVPLCKSENDDVLLLEDYGGGAEFVLVDKRDNSIDRMEGFNNGLSSFSAFVSHDYVQSLVLPYRN

SEQ ID NO: 7945 - protein, 396 aa, Glycine max
  peptide (1)..(396): Ceres Seq. ID no. 14314033
  misc_feature (1)..(325): NCBI GI NO: 6862928 NR Description: hypothetical protein [Arabidopsis thaliana]
  misc_feature (1)..(325): NCBI GI NO: 30679777 NR Description: F-box protein family [Arabidopsis thaliana]
  misc_feature (147)..(317): NCBI GI NO: 15229536 NR Description: F-box protein family [Arabidopsis thaliana]
  misc_feature (1)..(78): NCBI GI NO: 15229536 NR Description: F-box protein family [Arabidopsis thaliana]
  misc_feature (132)..(392): NCBI GI NO: 7487230 NR Description: hypothetical protein T1P17
  misc_feature (1)..(35): NCBI GI NO: 7487230 NR Description: hypothetical protein T1P17
  misc_feature (132)..(392): NCBI GI NO: 30682162 NR Description: F-box protein family [Arabidopsis thaliana]
  misc_feature (1)..(35): NCBI GI NO: 30682162 NR Description: F-box protein family [Arabidopsis thaliana]
  misc_feature (112)..(227): NCBI GI NO: 25405558 NR Description: hypothetical protein F6D8.30
  misc_feature (1)..(38): NCBI GI NO: 25405558 NR Description: hypothetical protein F6D8.30
MRFRCVSKSWNSLIFNPTFIKLHLQRSSQNIHILLTFDQDSSNPYPYHDDNYISVVAAPCSIQRLLENPSSTIYNIVHFLEAQSTSSSSTIYFDVCYRFKHTYLFLGVCNGLVCLLDCLYEDEFEEYWVRFWNPATRAMSADSPHLRVHSSNYKLGDIAVKHAFGYDDSSDTYKVLAILFNVKSQDWELRVHCMGDDTGWRNVLTCSAFPILQQVYGQFVSGTLNWLALNNSSGSDHYQWETVTVDQLVIFSYDLKNETYSYLSMPDGLSEISLDEPYLGVLNGCLCLSHDHRRTNLVVWLMREFGAEKSWTQLLNVSYHHLQVLDFPPCPVVPLCKSENDDVLLLEDYGGGAEFVLVDKRDNSIDRMEGFNNGLSSFSAFVSHDYVQSLVLPYRN

SEQ ID NO: 7946 - protein, 258 aa, Glycine max
  peptide (1)..(258): Ceres Seq. ID no. 14314034
  misc_feature (1)..(187): NCBI GI NO: 6862928 NR Description: hypothetical protein [Arabidopsis thaliana]
  misc_feature (1)..(187): NCBI GI NO: 30679777 NR Description: F-box protein family [Arabidopsis thaliana]
  misc_feature (9)..(179): NCBI GI NO: 15229536 NR Description: F-box protein family [Arabidopsis thaliana]
  misc_feature (1)..(254): NCBI GI NO: 7487230 NR Description: hypothetical protein T1P17
  misc_feature (1)..(254): NCBI GI NO: 30682162 NR Description: F-box protein family [Arabidopsis thaliana]
  misc_feature (1)..(89): NCBI GI NO: 25405558 NR Description: hypothetical protein F6D8.30
  misc_feature (1)..(254): NCBI GI NO: 15235636 NR Description: F-box protein-related [Arabidopsis thaliana]
  misc_feature (26)..(89): NCBI GI NO: 22330194 NR Description: F-box protein family [Arabidopsis thaliana]
MSADSPHLRVHSSNYKLGDIAVKHAFGYDDSSDTYKVLAILFNVKSQDWELRVHCMGDDTGWRNVLTCSAFPILQQVYGQFVSGTLNWLALNNSSGSDHYQWETVTVDQLVIFSYDLKNETYSYLSMPDGLSEISLDEPYLGVLNGCLCLSHDHRRTNLVVWLMREFGAEKSWTQLLNVSYHHLQVLDFPPCPVVPLCKSENDDVLLLEDYGGGAEFVLVDKRDNSIDRMEGFNNGLSSFSAFVSHDYVQSLVLPYRN

SEQ ID NO: 7947 - DNA, 1163 bp, Glycine max
  misc_feature (1)..(1163): Ceres Seq. ID no. 14314019
gtacgattaacatggagcaaatagtttttctccgctcactgcgagcacctttgttgcacggaggaaaagagggctttgttcatctacccaatctccatgcatgctgtgaatcatccaattcccacccatgttctctcaatgcagaaaaccattttaacagttctatttcttaccttggagttgcattgcttggagtaggaatcgctctagatttttttcttacaactgggggaggaagtggatttgagtcttcattgctggagagtgtgtcgttttgcctgtcattgtagggaaccaggaatggaatggcttagaagaaatgtatgtgaaaacggcttgtggtttcacccatagcctgcggaaaatgctttattgtgtttcggatatcaatttaaagttcacagttatgcaaataaccagtgcattagtgaatggcagcgctcttcgtttccacttacctagatttctatgtgtgcgtcatcattcatcaaccaagttgtttgtcacagggctttcctatgataccaatgaaccgattctgagagatgcctttgggcaacatggtgaaatcattgaagttaaagtaatatgtgatcatgtgactgggaaatcaagaggttatggatttgtgcggttcgtttctgaaactacagctgctgcagctcgcaaagaaatgaatggccagatactggatggaagacgcattcgggtgagttatgcacacaaaggcgagcgactaagtctgccaaacaattcataaaacagttcatggttgcaacatattcactttctaactgtgatactcgaagtctatagttttggcttttaattttagccattcaacgcaccttttttcatttgatggcgatctagatagtctcagtttgtttcgatggcttgaattgttgttctcatgttccttgaccttgaaatgctaatatccgatgaataacaaaatataatttagggttcattttgttttgatggatggcttgaattgatgttctcatatcccttgcccttgaaatactaatatcatatcataagatcattgacaatatataatttgggaccaagctgtttttctgtttgtttcttcttttcttttttttttccgtaaattgttacttgaaatagaaagatgagtgtgacatattggcaac

SEQ ID NO: 7948 - protein, 146 aa, Glycine max
  peptide (1)..(146): Ceres Seq. ID no. 14314020
  misc_feature (60)..(131): Pfam Name: a.k.a. RRM, RBD, or RNP domain Pfam Description: RNA recognition motif.
  misc_feature (52)..(143): NCBI GI NO: 7439994 NR Description: glycine-rich RNA-binding protein - garden pea
  misc_feature (49)..(139): NCBI GI NO: 15822703 NR Description: RNA-binding protein precursor [Nicotiana tabacum]
  misc_feature (31)..(134): NCBI GI NO: 1084415 NR Description: RNA-binding protein - wood tobacco
  misc_feature (49)..(139): NCBI GI NO: 15822705 NR Description: RNA-binding protein precursor [Solanum tuberosum]
  misc_feature (49)..(136): NCBI GI NO: 21388662 NR Description: glycine-rich RNA-binding protein
  misc_feature (57)..(143): NCBI GI NO: 322514 NR Description: glycine-rich RNA-binding protein
  misc_feature (57)..(143): NCBI GI NO: 2826811 NR Description: AtGRP2 [Arabidopsis thaliana]
  misc_feature (57)..(143): NCBI GI NO: 15236359 NR Description: glycine-rich RNA-binding protein (AtGRP2)
  misc_feature (57)..(143): NCBI GI NO: 30682622 NR Description: glycine-rich RNA-binding protein (AtGRP2)
  misc_feature (55)..(146): NCBI GI NO: 15229525 NR Description: RNA-binding protein, putative
MYVKTACGFTHSLRKMLYCVSDINLKFTVMQITSALVNGSALRFHLPRFLCVRHHSSTKLFVTGLSYDTNEPILRDAFGQHGEIIEVKVICDHVTGKSRGYGFVRFVSETTAAAARKEMNGQILDGRRIRVSYAHKGERLSLPNNS

SEQ ID NO: 7949 - protein, 131 aa, Glycine max
  peptide (1)..(131): Ceres Seq. ID no. 14314021
  misc_feature (45)..(116): Pfam Name: a.k.a. RRM, RBD, or RNP domain Pfam Description: RNA recognition motif.
  misc_feature (37)..(128): NCBI GI NO: 7439994 NR Description: glycine-rich RNA-binding protein - garden pea
  misc_feature (34)..(124): NCBI GI NO: 15822703 NR Description: RNA-binding protein precursor [Nicotiana tabacum]
  misc_feature (16)..(119): NCBI GI NO: 1084415 NR Description: RNA-binding protein - wood tobacco
  misc_feature (34)..(124): NCBI GI NO: 15822705 NR Description: RNA-binding protein precursor [Solanum tuberosum]
  misc_feature (34)..(121): NCBI GI NO: 21388662 NR Description: glycine-rich RNA-binding protein
  misc_feature (42)..(128): NCBI GI NO: 322514 NR Description: glycine-rich RNA-binding protein
  misc_feature (42)..(128): NCBI GI NO: 2826811 NR Description: AtGRP2 [Arabidopsis thaliana]
  misc_feature (42)..(128): NCBI GI NO: 30682622 NR Description: glycine-rich RNA-binding protein (AtGRP2)
  misc_feature (42)..(128): NCBI GI NO: 15236359 NR Description: glycine-rich RNA-binding protein (AtGRP2)
  misc_feature (40)..(131): NCBI GI NO: 15229525 NR Description: RNA-binding protein, putative
MLYCVSDINLKFTVMQITSALVNGSALRFHLPRFLCVRHHSSTKLFVTGLSYDTNEPILRDAFGQHGEIIEVKVICDHVTGKSRGYGFVRFVSETTAAAARKEMNGQILDGRRIRVSYAHKGERLSLPNNS

SEQ ID NO: 7950 - protein, 117 aa, Glycine max
  peptide (1)..(117): Ceres Seq. ID no. 14314022
  misc_feature (31)..(102): Pfam Name: a.k.a. RRM, RBD, or RNP domain Pfam Description: RNA recognition motif.
  misc_feature (23)..(114): NCBI GI NO: 7439994 NR Description: glycine-rich RNA-binding protein - garden pea
  misc_feature (20)..(110): NCBI GI NO: 15822703 NR Description: RNA-binding protein precursor [Nicotiana tabacum]
  misc_feature (2)..(105): NCBI GI NO: 1084415 NR Description: RNA-binding protein - wood tobacco
  misc_feature (20)..(110): NCBI GI NO: 15822705 NR Description: RNA-binding protein precursor [Solanum tuberosum]
  misc_feature (20)..(107): NCBI GI NO: 21388662 NR Description: glycine-rich RNA-binding protein
  misc_feature (28)..(114): NCBI GI NO: 322514 NR Description: glycine-rich RNA-binding protein
  misc_feature (28)..(114): NCBI GI NO: 2826811 NR Description: AtGRP2 [Arabidopsis thaliana]
  misc_feature (28)..(114): NCBI GI NO: 30682622 NR Description: glycine-rich RNA-binding protein (AtGRP2)
  misc_feature (28)..(114): NCBI GI NO: 15236359 NR Description: glycine-rich RNA-binding protein (AtGRP2)
  misc_feature (26)..(117): NCBI GI NO: 15229525 NR Description: RNA-binding protein, putative
MQITSALVNGSALRFHLPRFLCVRHHSSTKLFVTGLSYDTNEPILRDAFGQHGEIIEVKVICDHVTGKSRGYGFVRFVSETTAAAARKEMNGQILDGRRIRVSYAHKGERLSLPNNS

SEQ ID NO: 7951 - DNA, 1424 bp, Glycine max
  misc_feature (1)..(1424): Ceres Seq. ID no. 15178086
aaaaaaggggttgactgaatgtcttgagtgtctcttcctccccaaggctgagccccgctcgttacgggtctctgtctcctttcctttcacgtatgcatcatagtaatagtaattacgaagagagacggaggagccgcagaggagtaaggaggagagcccagaatgagaatgagaagatggtggatctgccacaggaattgatacatgaaatccttttgcgcttgcccgtcaagtctcttattcgattcaaaactgtctgtaagtcatggctttctcacatctctgatccacactttactgcttcacattttaaactaggggcagcacccactgagagacttttgttcttatcgcctattgctcgtgaattcctatccatagacttcaatgaatcccttaatgatgattctgcttctgccgcattgaattgtgactttgtggaacattttgattaccttgaaatcattggttcatgtagagggtttttactcttggatttccgctatactctctgcgtgtggaatccatccacaggtgtccaccaatttgtgaaatggtcaccttttgtgtcatctaatatcatgggtctcgatgtgggtgatgagttttccttatctattcgtggttttgggtatgacccttcaacagatgattacttggcagttctggcatcgtgcaacgacgagcttgttataatccacatggagtatttctcactcagagctaatacttggaaagaaattgaggctagccatttgtcttttgcagaaatagcttataatgaagtcgggtcgttcttgaacactgctattcattggttggcttttagtcttgaggtatcaatggatgttattgttgcttttgatttaactgaaaaggagtttttcagagatacttctaccaattgattttgatttggacaattttcaactctgtgttttggcggtactgggagaattgctcaatctatgtgctgttggaggagatcagacattcggtagaaatatgggcgatgggagaatacaaagtaaggtcatcttggacaaagaccactgttgtgtctcacgattatttttctagtctctccttatttccaatatgttctaccgaagatggagatattgttgggacagatggctgtaatgtattgataaaatgtaatgacgagggacagctgcaagagtaccaaatctattctaatggtccatatcgatcagctgtgtacacagaatctctactttcactcccttgtgacagggagccagcagaaaatgtttaataagcgaataagaggaattaggttgtgaaatattttctgatacttttactatttgttggatactcatcttatattatcaattcttatggtatattaaagcatgaagaagtgacaggtagattaatgaaattgatatttcatggcc

SEQ ID NO: 7952 - protein, 271 aa, Glycine max
  peptide (1)..(271): Ceres Seq. ID no. 15178087
  misc_feature (32)..(68): Pfam Name: Pfam Description:  F-box domain
  misc_feature (31)..(264): NCBI GI NO: 15229536 NR Description: F-box protein family [Arabidopsis thaliana]
  misc_feature (12)..(264): NCBI GI NO: 15241861 NR Description: F-box protein family [Arabidopsis thaliana]
  misc_feature (29)..(264): NCBI GI NO: 7487230 NR Description: hypothetical protein T1P17
  misc_feature (29)..(264): NCBI GI NO: 30682162 NR Description: F-box protein family [Arabidopsis thaliana]
  misc_feature (9)..(264): NCBI GI NO: 15220964 NR Description: F-box protein family [Arabidopsis thaliana]
  misc_feature (15)..(264): NCBI GI NO: 15241905 NR Description: F-box protein family [Arabidopsis thaliana]
  misc_feature (31)..(266): NCBI GI NO: 15229011 NR Description: hypothetical protein [Arabidopsis thaliana]
  misc_feature (18)..(264): NCBI GI NO: 15231179 NR Description: F-box protein family [Arabidopsis thaliana]
  misc_feature (29)..(266): NCBI GI NO: 15229648 NR Description: hypothetical protein [Arabidopsis thaliana]
  misc_feature (31)..(266): NCBI GI NO: 15238057 NR Description: hypothetical protein [Arabidopsis thaliana]
MHHSNSNYEERRRSRRGVRRRAQNENEKMVDLPQELIHEILLRLPVKSLIRFKTVCKSWLSHISDPHFTASHFKLGAAPTERLLFLSPIAREFLSIDFNESLNDDSASAALNCDFVEHFDYLEIIGSCRGFLLLDFRYTLCVWNPSTGVHQFVKWSPFVSSNIMGLDVGDEFSLSIRGFGYDPSTDDYLAVLASCNDELVIIHMEYFSLRANTWKEIEASHLSFAEIAYNEVGSFLNTAIHWLAFSLEVSMDVIVAFDLTEKEFFRDTSTN

SEQ ID NO: 7953 - protein, 243 aa, Glycine max
  peptide (1)..(243): Ceres Seq. ID no. 15178088
  misc_feature (4)..(40): Pfam Name: Pfam Description:  F-box domain
  misc_feature (3)..(236): NCBI GI NO: 15229536 NR Description: F-box protein family [Arabidopsis thaliana]
  misc_feature (1)..(236): NCBI GI NO: 15241861 NR Description: F-box protein family [Arabidopsis thaliana]
  misc_feature (1)..(236): NCBI GI NO: 7487230 NR Description: hypothetical protein T1P17
  misc_feature (1)..(236): NCBI GI NO: 30682162 NR Description: F-box protein family [Arabidopsis thaliana]
  misc_feature (1)..(236): NCBI GI NO: 15220964 NR Description: F-box protein family [Arabidopsis thaliana]
  misc_feature (1)..(236): NCBI GI NO: 15241905 NR Description: F-box protein family [Arabidopsis thaliana]
  misc_feature (3)..(238): NCBI GI NO: 15229011 NR Description: hypothetical protein [Arabidopsis thaliana]
  misc_feature (1)..(236): NCBI GI NO: 15231179 NR Description: F-box protein family [Arabidopsis thaliana]
  misc_feature (1)..(238): NCBI GI NO: 15229648 NR Description: hypothetical protein [Arabidopsis thaliana]
  misc_feature (3)..(238): NCBI GI NO: 15238057 NR Description: hypothetical protein [Arabidopsis thaliana]
MVDLPQELIHEILLRLPVKSLIRFKTVCKSWLSHISDPHFTASHFKLGAAPTERLLFLSPIAREFLSIDFNESLNDDSASAALNCDFVEHFDYLEIIGSCRGFLLLDFRYTLCVWNPSTGVHQFVKWSPFVSSNIMGLDVGDEFSLSIRGFGYDPSTDDYLAVLASCNDELVIIHMEYFSLRANTWKEIEASHLSFAEIAYNEVGSFLNTAIHWLAFSLEVSMDVIVAFDLTEKEFFRDTSTN

SEQ ID NO: 7954 - DNA, 1296 bp, Glycine max
  misc_feature (1)..(1296): Ceres Seq. ID no. 14314050
atttatcatttcattcctataaagtgagtaatcgtgtcctgtcagtagatattccaaaaatgatttttcattaaaattaaaaacaattactttatcctcctccaaactccaaagtgagtaaccatatatagccaccctctctcctccgatcactctccactccagtgtggaaaatcaaaacaaggtgccatctttgtttgtcatacatgaccatggccatgcccctgtttctgatgttccttcttctgcacatagcttgggtggcatcgtcggatctccgacctgggttttactcaaaaacatgtccaaaagcggaactcatagtccgagatgtgatgaagaaggcccttatgagggaacccagaagtgttgcctctgttatgcgcttccagttccatgattgctttgtcaacgggtgtgatggttctatgctgcttgatgatacaccaacgatgctgggggagaaattggccctctcaaatataaattcgctgagatcgtatgaagttgtcgatcaagtgaaggaagcgctcgagaaggactgcccctgagtggtttcctgtgctgacatcataattatggcatctagagatgctgtctctctgacaggtggacctgagtgggaggtgaggttgggaagattggacagcttgagtgctaatcaagaagactcaaacaacatcatgccaagcccaagagccaacgcaagctctcttattgatctcttccagaaatataaccttactgtgaaagacctggtagcactctcaggatctcactctattggccaaggtcgttgtttctccatcatgtttaggctatacaatcaatctggaactggaaggcctgaccctgccattgaccctagctatagacaataccttaacaggctatgtccactggatgttgaccaaaatgtcacagggaaccttgattccacgcctctcgtctttgataaccaatatttcaaggacttggctgctgggaggggctttctcaattctgatcaaacactcttcacattcccccacacaagggagtttgtgaggttatttagtagacgcaaaactgagtttttcaaggcatttgtggaaggaatgttgaaaatgggtgacttgcagtctggtcgacctggggaagttaggactaactgcaggctcgtcaatgctcgcccgattaatttgctgcttcagtctccacacaacatggagagtaacgataaataaataaaaaataaatgcgtgtctcttcatattatatgttatccaaatatgaaacgaaatattttcacttccg

SEQ ID NO: 7955 - protein, 215 aa, Glycine max
  peptide (1)..(215): Ceres Seq. ID no. 14314051
  misc_feature (1)..(160): Pfam Name: Pfam Description:  Peroxidase
  misc_feature (1)..(206): NCBI GI NO: 15227200 NR Description: putative peroxidase [Arabidopsis thaliana]
  misc_feature (1)..(204): NCBI GI NO: 19698448 NR Description: gaiacol peroxidase [Gossypium hirsutum]
  misc_feature (1)..(196): NCBI GI NO: 15224116 NR Description: peroxidase, putative [Arabidopsis thaliana]
  misc_feature (1)..(196): NCBI GI NO: 21537275 NR Description: putative peroxidase [Arabidopsis thaliana]
  misc_feature (1)..(196): NCBI GI NO: 1403134 NR Description: peroxidase [Arabidopsis thaliana]
  misc_feature (1)..(196): NCBI GI NO: 21593604 NR Description: peroxidase ATP N [Arabidopsis thaliana]
  misc_feature (1)..(196): NCBI GI NO: 2129513 NR Description: peroxidase (EC 1
  misc_feature (1)..(196): NCBI GI NO: 18420061 NR Description: peroxidase, putative [Arabidopsis thaliana]
  misc_feature (1)..(197): NCBI GI NO: 15234394 NR Description: peroxidase, putative [Arabidopsis thaliana]
  misc_feature (1)..(196): NCBI GI NO: 1402918 NR Description: peroxidase [Arabidopsis thaliana]
MASRDAVSLTGGPEWEVRLGRLDSLSANQEDSNNIMPSPRANASSLIDLFQKYNLTVKDLVALSGSHSIGQGRCFSIMFRLYNQSGTGRPDPAIDPSYRQYLNRLCPLDVDQNVTGNLDSTPLVFDNQYFKDLAAGRGFLNSDQTLFTFPHTREFVRLFSRRKTEFFKAFVEGMLKMGDLQSGRPGEVRTNCRLVNARPINLLLQSPHNMESNDK

SEQ ID NO: 7956 - protein, 180 aa, Glycine max
  peptide (1)..(180): Ceres Seq. ID no. 14314052
  misc_feature (1)..(125): Pfam Name: Pfam Description:  Peroxidase
  misc_feature (1)..(171): NCBI GI NO: 15227200 NR Description: putative peroxidase [Arabidopsis thaliana]
  misc_feature (1)..(169): NCBI GI NO: 19698448 NR Description: gaiacol peroxidase [Gossypium hirsutum]
  misc_feature (1)..(161): NCBI GI NO: 15224116 NR Description: peroxidase, putative [Arabidopsis thaliana]
  misc_feature (1)..(161): NCBI GI NO: 21537275 NR Description: putative peroxidase [Arabidopsis thaliana]
  misc_feature (1)..(161): NCBI GI NO: 1403134 NR Description: peroxidase [Arabidopsis thaliana]
  misc_feature (1)..(161): NCBI GI NO: 21593604 NR Description: peroxidase ATP N [Arabidopsis thaliana]
  misc_feature (1)..(161): NCBI GI NO: 2129513 NR Description: peroxidase (EC 1
  misc_feature (1)..(161): NCBI GI NO: 18420061 NR Description: peroxidase, putative [Arabidopsis thaliana]
  misc_feature (1)..(162): NCBI GI NO: 15234394 NR Description: peroxidase, putative [Arabidopsis thaliana]
  misc_feature (1)..(161): NCBI GI NO: 1402918 NR Description: peroxidase [Arabidopsis thaliana]
MPSPRANASSLIDLFQKYNLTVKDLVALSGSHSIGQGRCFSIMFRLYNQSGTGRPDPAIDPSYRQYLNRLCPLDVDQNVTGNLDSTPLVFDNQYFKDLAAGRGFLNSDQTLFTFPHTREFVRLFSRRKTEFFKAFVEGMLKMGDLQSGRPGEVRTNCRLVNARPINLLLQSPHNMESNDK

SEQ ID NO: 7957 - protein, 138 aa, Glycine max
  peptide (1)..(138): Ceres Seq. ID no. 14314053
  misc_feature (1)..(83): Pfam Name: Pfam Description:  Peroxidase
  misc_feature (1)..(129): NCBI GI NO: 15227200 NR Description: putative peroxidase [Arabidopsis thaliana]
  misc_feature (1)..(127): NCBI GI NO: 19698448 NR Description: gaiacol peroxidase [Gossypium hirsutum]
  misc_feature (1)..(119): NCBI GI NO: 15224116 NR Description: peroxidase, putative [Arabidopsis thaliana]
  misc_feature (1)..(119): NCBI GI NO: 21537275 NR Description: putative peroxidase [Arabidopsis thaliana]
  misc_feature (1)..(119): NCBI GI NO: 1403134 NR Description: peroxidase [Arabidopsis thaliana]
  misc_feature (1)..(119): NCBI GI NO: 21593604 NR Description: peroxidase ATP N [Arabidopsis thaliana]
  misc_feature (1)..(119): NCBI GI NO: 2129513 NR Description: peroxidase (EC 1
  misc_feature (1)..(119): NCBI GI NO: 18420061 NR Description: peroxidase, putative [Arabidopsis thaliana]
  misc_feature (1)..(120): NCBI GI NO: 15234394 NR Description: peroxidase, putative [Arabidopsis thaliana]
  misc_feature (1)..(119): NCBI GI NO: 1402918 NR Description: peroxidase [Arabidopsis thaliana]
MFRLYNQSGTGRPDPAIDPSYRQYLNRLCPLDVDQNVTGNLDSTPLVFDNQYFKDLAAGRGFLNSDQTLFTFPHTREFVRLFSRRKTEFFKAFVEGMLKMGDLQSGRPGEVRTNCRLVNARPINLLLQSPHNMESNDK

SEQ ID NO: 7958 - DNA, 1574 bp, Glycine max
  misc_feature (1)..(1574): Ceres Seq. ID no. 14314054
aaagcagagagcaaatcaacaaaagaagccatggtagtgttacaagaagtcttcaacgttgtaccaacttccgaatcagaagagtttcagttaccaactcaaacatcgctttccctcaccttcttcgacatcctatggttaaggttaccacctgttcaacgcgtcttcttctatgaattccctcacccaacccatctcttctttgatacccttcttcccaaactcaaacactctctttctcttgcacttgcccactttttccctcttgcgggccacctcacttggccacttcactcccaaaaacccatcatcaattacaaatctggtgacactgttcccctcacagttgctgtatctgaagctgatttcaaccacctagcaggcacagatctttatgaagccaaagaaattccccatcttttaccccacttgaccatatcccacgaaaaagccacgcttttggccctgcaagctaccctctttccaaactctggattttccattggaataacctcacaccatgctgttctagatggcaagacttcaacatcgtttatcaaatcctgggcttatctttgtagagaatcacaatcacccacttctttaccacctgaactgattcctttttatgacagggaagtaatcaaagaccctaaccatttaggggtaaaatatgtcagtgattggttagagcagaatggacccaacaaccgaagcctcttggtttgggatctgcaagctccagaagatgcaactagaggcatatttcaattgtctcgttcggatattgaaaagctgaagcaaatagtggtgtccaagaagaaagggaacaacaccaaccttcgcttgtcaacctttgtgttgtctattgcctatgcttgtgttttcagggtgagagcagaggaaacaaagaacaagagagttatgttggctttgaatgttgattgcagggcacgtttggagccacctattccaccaacatattttggaaactgtgttggagcgagacttgcaattgctgaaacaagagagatattgggggaagatggcctaattgtggttgtggatgcactgaatgatgccttggggagtctcaaggatggagcactgagtggagcagaaaattggtcaaggtggttgcttgaaagttttagtgatgatgtgagaataattggtgttgctgggtcacctaggtttgaggcttatagtaatgactttggttggggaagaccaaagaaagtggagatggcttctatagacagaactggggcactttgtttatcagatagcaaaaatggtgatggggttgaggtaagttttgtgtccaacaaaagagcaatggagacctttgcttatctctttgccaatggccttcgatcttgagtccctcttggtacaatcttgtggtttttcatgaataaaaagttgaggaaaaataaaggtagagtagtgtaggtgttcttatgaaaattcgtttttaacaattaattgtctgaaatgttctggtggtgtgtaatgcttcaattatttgacaattttatgtatattaatcatgtattgctgttgattatccg

SEQ ID NO: 7959 - protein, 460 aa, Glycine max
  peptide (1)..(460): Ceres Seq. ID no. 14314055
  misc_feature (17)..(447): Pfam Name: Pfam Description:  Transferase family
  misc_feature (17)..(459): NCBI GI NO: 15241632 NR Description: transferase family [Arabidopsis thaliana]
  misc_feature (9)..(460): NCBI GI NO: 15450469 NR Description: AT5g39050/MXF12_60 [Arabidopsis thaliana]
  misc_feature (16)..(460): NCBI GI NO: 15230048 NR Description: transferase family [Arabidopsis thaliana]
  misc_feature (18)..(458): NCBI GI NO: 15230013 NR Description: transferase family [Arabidopsis thaliana]
  misc_feature (16)..(458): NCBI GI NO: 15230034 NR Description: transferase family [Arabidopsis thaliana]
  misc_feature (9)..(460): NCBI GI NO: 10177550 NR Description: anthocyanin acyltransferase-like protein
  misc_feature (16)..(449): NCBI GI NO: 15241631 NR Description: transferase family [Arabidopsis thaliana]
  misc_feature (16)..(459): NCBI GI NO: 21593292 NR Description: acyltransferase-like protein
  misc_feature (37)..(456): NCBI GI NO: 15230049 NR Description: transferase family [Arabidopsis thaliana]
  misc_feature (36)..(460): NCBI GI NO: 28396175 NR Description: malonyl-coenzyme A: anthocyanidin 3-O-glucoside-6''-O-malonyltransferase
KAESKSTKEAMVVLQEVFNVVPTSESEEFQLPTQTSLSLTFFDILWLRLPPVQRVFFYEFPHPTHLFFDTLLPKLKHSLSLALAHFFPLAGHLTWPLHSQKPIINYKSGDTVPLTVAVSEADFNHLAGTDLYEAKEIPHLLPHLTISHEKATLLALQATLFPNSGFSIGITSHHAVLDGKTSTSFIKSWAYLCRESQSPTSLPPELIPFYDREVIKDPNHLGVKYVSDWLEQNGPNNRSLLVWDLQAPEDATRGIFQLSRSDIEKLKQIVVSKKKGNNTNLRLSTFVLSIAYACVFRVRAEETKNKRVMLALNVDCRARLEPPIPPTYFGNCVGARLAIAETREILGEDGLIVVVDALNDALGSLKDGALSGAENWSRWLLESFSDDVRIIGVAGSPRFEAYSNDFGWGRPKKVEMASIDRTGALCLSDSKNGDGVEVSFVSNKRAMETFAYLFANGLRS

SEQ ID NO: 7960 - protein, 450 aa, Glycine max
  peptide (1)..(450): Ceres Seq. ID no. 14314056
  misc_feature (7)..(437): Pfam Name: Pfam Description:  Transferase family
  misc_feature (7)..(449): NCBI GI NO: 15241632 NR Description: transferase family [Arabidopsis thaliana]
  misc_feature (1)..(450): NCBI GI NO: 15450469 NR Description: AT5g39050/MXF12_60 [Arabidopsis thaliana]
  misc_feature (6)..(450): NCBI GI NO: 15230048 NR Description: transferase family [Arabidopsis thaliana]
  misc_feature (8)..(448): NCBI GI NO: 15230013 NR Description: transferase family [Arabidopsis thaliana]
  misc_feature (6)..(448): NCBI GI NO: 15230034 NR Description: transferase family [Arabidopsis thaliana]
  misc_feature (1)..(450): NCBI GI NO: 10177550 NR Description: anthocyanin acyltransferase-like protein
  misc_feature (6)..(439): NCBI GI NO: 15241631 NR Description: transferase family [Arabidopsis thaliana]
  misc_feature (6)..(449): NCBI GI NO: 21593292 NR Description: acyltransferase-like protein
  misc_feature (27)..(446): NCBI GI NO: 15230049 NR Description: transferase family [Arabidopsis thaliana]
  misc_feature (26)..(450): NCBI GI NO: 28396175 NR Description: malonyl-coenzyme A: anthocyanidin 3-O-glucoside-6''-O-malonyltransferase
MVVLQEVFNVVPTSESEEFQLPTQTSLSLTFFDILWLRLPPVQRVFFYEFPHPTHLFFDTLLPKLKHSLSLALAHFFPLAGHLTWPLHSQKPIINYKSGDTVPLTVAVSEADFNHLAGTDLYEAKEIPHLLPHLTISHEKATLLALQATLFPNSGFSIGITSHHAVLDGKTSTSFIKSWAYLCRESQSPTSLPPELIPFYDREVIKDPNHLGVKYVSDWLEQNGPNNRSLLVWDLQAPEDATRGIFQLSRSDIEKLKQIVVSKKKGNNTNLRLSTFVLSIAYACVFRVRAEETKNKRVMLALNVDCRARLEPPIPPTYFGNCVGARLAIAETREILGEDGLIVVVDALNDALGSLKDGALSGAENWSRWLLESFSDDVRIIGVAGSPRFEAYSNDFGWGRPKKVEMASIDRTGALCLSDSKNGDGVEVSFVSNKRAMETFAYLFANGLRS

SEQ ID NO: 7961 - DNA, 1390 bp, Glycine max
  misc_feature (1)..(1390): Ceres Seq. ID no. 14314015
attcattgcacgcagttcctggaaagtagcaaagtaaagctctcttggttttgggaaccgaaacctaagaaaaacgcagaatctgtttcggaaagcgaaggaggcatggcatttgagtccaacgaagttgcagccacaacgctccaagccatatgctacaagcgcggttccctccagcttctcgatcagagaaagctccctctggagacagtttacttggaaattcgggattcaacggatggctggaatgccatacgggaaatggtggtccggggagcacctgctattgcaattgcagcggcactctctttggctgtggaggtgttcaatttagattttaatgggtcagctactgatgctgtatccttgctgcagaagaaattagaatatcttgtcacaagtcggccaactgcagtgaacctatcagatgctgcgacaaaactcaaagaagtgatatcaaatgctgctgctaccacttcagagggaaggagtgttttccaagtgtatatagatgctgctgaagttatgcttgaggatgatgttgcgtcaaatagagctattggttcttatggagctagtattattcaacaacaaacagagaaacaaaagctttctgttttgactcattgcaacactggaagtctagccacagctggatatggtactgctctgggtgtcatccgtgcacttcatagtgccggagttctaaaaagggcttattgcacagaaacacgcccatttaatcaaggatctagacttactgcctttgagttggtgcatgaaaaaataccaggaactcttattgccgattctgctgcagctgcattaatgaaggcaggacatgtggatgctgttgttgttggggcagatcgggttgcatcaaatggtgacacagccaacaaaattggaacctacagcgttgccttgtccgctaagtttcataatgtacctttttatgtggctgcacccctaacttccattgatctatcactttcttctggacaagaaattgtcattgaggagaggtctcccaaggaattgctgaacacacatggaggacttggagagcagattgctgcctcaggaatttctgtgtggaacccagcttttgatgttactcctgctaatctaatatcggggatcatcactgagaagggtgtcattacgaagacatctgctggtgatgcatttgacatcaaagccttcgtacagaaaacaggttaaggtagagtgagatttttatcacacgttacaacattgtaggcttgaaaagtattggagtggtagggttctttaagagcctctttggtacgcaagttagataagacttattaactttgagacctaattgtataagatgataacatcaatatattatgcaatgtttggt

SEQ ID NO: 7962 - protein, 407 aa, Glycine max
  peptide (1)..(407): Ceres Seq. ID no. 14314016
  misc_feature (75)..(390): Pfam Name: Pfam Description:  Initiation factor 2 subunit family
  misc_feature (46)..(407): NCBI GI NO: 18396170 NR Description: translation initiation factor eIF-2B alpha subunit-related
  misc_feature (46)..(407): NCBI GI NO: 21593194 NR Description: putative translation initiation factor eIF-2B alpha subunit
  misc_feature (47)..(406): NCBI GI NO: 15216226 NR Description: CIG2 [Nicotiana tabacum]
  misc_feature (46)..(385): NCBI GI NO: 25315908 NR Description: hypothetical protein At2g05830
  misc_feature (45)..(404): NCBI GI NO: 12407304 NR Description: IDI2 [Hordeum vulgare subsp. vulgare]
  misc_feature (88)..(407): NCBI GI NO: 20466258 NR Description: putative translation initiation factor eIF-2B alpha subunit
  misc_feature (48)..(394): NCBI GI NO: 40740852 NR Description: hypothetical protein AN4290.2
  misc_feature (47)..(388): NCBI GI NO: 31242175 NR Description: ENSANGP00000023010 [Anopheles gambiae]
  misc_feature (47)..(388): NCBI GI NO: 19577378 NR Description: putative translation initiation factor
  misc_feature (90)..(388): NCBI GI NO: 31242173 NR Description: ENSANGP00000017411 [Anopheles gambiae]
IHCTQFLESSKVKLSWFWEPKPKKNAESVSESEGGMAFESNEVAATTLQAICYKRGSLQLLDQRKLPLETVYLEIRDSTDGWNAIREMVVRGAPAIAIAAALSLAVEVFNLDFNGSATDAVSLLQKKLEYLVTSRPTAVNLSDAATKLKEVISNAAATTSEGRSVFQVYIDAAEVMLEDDVASNRAIGSYGASIIQQQTEKQKLSVLTHCNTGSLATAGYGTALGVIRALHSAGVLKRAYCTETRPFNQGSRLTAFELVHEKIPGTLIADSAAAALMKAGHVDAVVVGADRVASNGDTANKIGTYSVALSAKFHNVPFYVAAPLTSIDLSLSSGQEIVIEERSPKELLNTHGGLGEQIAASGISVWNPAFDVTPANLISGIITEKGVITKTSAGDAFDIKAFVQKTG

SEQ ID NO: 7963 - protein, 372 aa, Glycine max
  peptide (1)..(372): Ceres Seq. ID no. 14314017
  misc_feature (40)..(355): Pfam Name: Pfam Description:  Initiation factor 2 subunit family
  misc_feature (11)..(372): NCBI GI NO: 18396170 NR Description: translation initiation factor eIF-2B alpha subunit-related
  misc_feature (11)..(372): NCBI GI NO: 21593194 NR Description: putative translation initiation factor eIF-2B alpha subunit
  misc_feature (12)..(371): NCBI GI NO: 15216226 NR Description: CIG2 [Nicotiana tabacum]
  misc_feature (11)..(350): NCBI GI NO: 25315908 NR Description: hypothetical protein At2g05830
  misc_feature (10)..(369): NCBI GI NO: 12407304 NR Description: IDI2 [Hordeum vulgare subsp. vulgare]
  misc_feature (53)..(372): NCBI GI NO: 20466258 NR Description: putative translation initiation factor eIF-2B alpha subunit
  misc_feature (13)..(359): NCBI GI NO: 40740852 NR Description: hypothetical protein AN4290.2
  misc_feature (12)..(353): NCBI GI NO: 31242175 NR Description: ENSANGP00000023010 [Anopheles gambiae]
  misc_feature (12)..(353): NCBI GI NO: 19577378 NR Description: putative translation initiation factor
  misc_feature (55)..(353): NCBI GI NO: 31242173 NR Description: ENSANGP00000017411 [Anopheles gambiae]
MAFESNEVAATTLQAICYKRGSLQLLDQRKLPLETVYLEIRDSTDGWNAIREMVVRGAPAIAIAAALSLAVEVFNLDFNGSATDAVSLLQKKLEYLVTSRPTAVNLSDAATKLKEVISNAAATTSEGRSVFQVYIDAAEVMLEDDVASNRAIGSYGASIIQQQTEKQKLSVLTHCNTGSLATAGYGTALGVIRALHSAGVLKRAYCTETRPFNQGSRLTAFELVHEKIPGTLIADSAAAALMKAGHVDAVVVGADRVASNGDTANKIGTYSVALSAKFHNVPFYVAAPLTSIDLSLSSGQEIVIEERSPKELLNTHGGLGEQIAASGISVWNPAFDVTPANLISGIITEKGVITKTSAGDAFDIKAFVQKTG

SEQ ID NO: 7964 - protein, 320 aa, Glycine max
  peptide (1)..(320): Ceres Seq. ID no. 14314018
  misc_feature (1)..(303): Pfam Name: Pfam Description:  Initiation factor 2 subunit family
  misc_feature (1)..(320): NCBI GI NO: 18396170 NR Description: translation initiation factor eIF-2B alpha subunit-related
  misc_feature (1)..(320): NCBI GI NO: 21593194 NR Description: putative translation initiation factor eIF-2B alpha subunit
  misc_feature (1)..(319): NCBI GI NO: 15216226 NR Description: CIG2 [Nicotiana tabacum]
  misc_feature (1)..(298): NCBI GI NO: 25315908 NR Description: hypothetical protein At2g05830
  misc_feature (1)..(317): NCBI GI NO: 12407304 NR Description: IDI2 [Hordeum vulgare subsp. vulgare]
  misc_feature (1)..(320): NCBI GI NO: 20466258 NR Description: putative translation initiation factor eIF-2B alpha subunit
  misc_feature (1)..(307): NCBI GI NO: 40740852 NR Description: hypothetical protein AN4290.2
  misc_feature (1)..(301): NCBI GI NO: 31242175 NR Description: ENSANGP00000023010 [Anopheles gambiae]
  misc_feature (1)..(301): NCBI GI NO: 19577378 NR Description: putative translation initiation factor
  misc_feature (3)..(301): NCBI GI NO: 31242173 NR Description: ENSANGP00000017411 [Anopheles gambiae]
MVVRGAPAIAIAAALSLAVEVFNLDFNGSATDAVSLLQKKLEYLVTSRPTAVNLSDAATKLKEVISNAAATTSEGRSVFQVYIDAAEVMLEDDVASNRAIGSYGASIIQQQTEKQKLSVLTHCNTGSLATAGYGTALGVIRALHSAGVLKRAYCTETRPFNQGSRLTAFELVHEKIPGTLIADSAAAALMKAGHVDAVVVGADRVASNGDTANKIGTYSVALSAKFHNVPFYVAAPLTSIDLSLSSGQEIVIEERSPKELLNTHGGLGEQIAASGISVWNPAFDVTPANLISGIITEKGVITKTSAGDAFDIKAFVQKTG

SEQ ID NO: 7965 - DNA, 1103 bp, Glycine max
  misc_feature (1)..(1103): Ceres Seq. ID no. 14306201
atttgttccattccgtgcgcggtgaatggtgatcttattgtatttgagacttgagttggaagtcatggcgattggtaatgagaatcagccacaacaatctgaaggcaaagtgtggaatttgttcaagcttccctttcgccattcaacttcaactcctcacaatcacaatcaagtttccacctccaattctgtttcttcctttgccaaatcgctcctcccctcaccacgtcgtcttaagcttgatccttccaacaagctctacttcccttatgagccgggcaagcagggtaggagtgccatcaggattaaaaacaccagcaaatccaacgtagctttcaagtttcaaacaaatgcacccaagagttgtttcatgcgccctcctgggggcattctggcaccgggcgagagtataattgcaactgtgttcaagtttatagaacatccattgaataatgaaaagccagaaaaaactggactcaaattcaaaatcacgagcttgaaggtcaaaggaccaattgattatgtccctgaaatgtttgatgagctgaaggatcaagtaacagtggagcagattttgcaggttgtttttcttgatccagagcgtaactgtcctgctttggaaaaactgaagcttcagctggttgaggctgatgctgctgttgaggcacgtaagagagccccagaagatgcaggtcctaagattctcggagaagggctcgtcgtagatgaatggaaagagaggagggaaagatacctggccaaacagcagggtgaagtggtagtggactctatatagctaagttttgagtaggaaattgtgttactgcgggaaggtgactttagggaaacaattatatttaatcgcaacgtttggcttagcgaaaattaaagtggtgaatgactagcgtgaagtgttcttttgagaaacttatgattagatgagaacatcctctattatgtacataagtgtcagtgtcattgcatttgggtttcctggaatgatattttgatggattgatgtaaaatggtagtttttgtaagatggatgatttgctgtcatggcatggtttcatggtaaacttcaattgttgagattttcatcc

SEQ ID NO: 7966 - protein, 256 aa, Glycine max
  peptide (1)..(256): Ceres Seq. ID no. 14306202
  misc_feature (48)..(256): NCBI GI NO: 18415696 NR Description: VAMP
  misc_feature (53)..(256): NCBI GI NO: 34394013 NR Description: putative 27k vesicle-associated membrane protein-associated protein
  misc_feature (48)..(256): NCBI GI NO: 7485721 NR Description: hypothetical protein F18E5
  misc_feature (55)..(256): NCBI GI NO: 18423592 NR Description: VAMP
  misc_feature (46)..(251): NCBI GI NO: 18412787 NR Description: VAMP
  misc_feature (46)..(251): NCBI GI NO: 21593103 NR Description: membrane associated protein-like protein
  misc_feature (55)..(236): NCBI GI NO: 8809582 NR Description: membrane associated protein [Arabidopsis thaliana]
  misc_feature (55)..(256): NCBI GI NO: 1800147 NR Description: membrane associated protein [Arabidopsis thaliana]
  misc_feature (46)..(251): NCBI GI NO: 25365874 NR Description: hypothetical protein AT4g05060
MVILLYLRLELEVMAIGNENQPQQSEGKVWNLFKLPFRHSTSTPHNHNQVSTSNSVSSFAKSLLPSPRRLKLDPSNKLYFPYEPGKQGRSAIRIKNTSKSNVAFKFQTNAPKSCFMRPPGGILAPGESIIATVFKFIEHPLNNEKPEKTGLKFKITSLKVKGPIDYVPEMFDELKDQVTVEQILQVVFLDPERNCPALEKLKLQLVEADAAVEARKRAPEDAGPKILGEGLVVDEWKERRERYLAKQQGEVVVDSI

SEQ ID NO: 7967 - protein, 243 aa, Glycine max
  peptide (1)..(243): Ceres Seq. ID no. 14306203
  misc_feature (35)..(243): NCBI GI NO: 18415696 NR Description: VAMP
  misc_feature (40)..(243): NCBI GI NO: 34394013 NR Description: putative 27k vesicle-associated membrane protein-associated protein
  misc_feature (35)..(243): NCBI GI NO: 7485721 NR Description: hypothetical protein F18E5
  misc_feature (42)..(243): NCBI GI NO: 18423592 NR Description: VAMP
  misc_feature (33)..(238): NCBI GI NO: 18412787 NR Description: VAMP
  misc_feature (33)..(238): NCBI GI NO: 21593103 NR Description: membrane associated protein-like protein
  misc_feature (42)..(223): NCBI GI NO: 8809582 NR Description: membrane associated protein [Arabidopsis thaliana]
  misc_feature (42)..(243): NCBI GI NO: 1800147 NR Description: membrane associated protein [Arabidopsis thaliana]
  misc_feature (33)..(238): NCBI GI NO: 25365874 NR Description: hypothetical protein AT4g05060
MAIGNENQPQQSEGKVWNLFKLPFRHSTSTPHNHNQVSTSNSVSSFAKSLLPSPRRLKLDPSNKLYFPYEPGKQGRSAIRIKNTSKSNVAFKFQTNAPKSCFMRPPGGILAPGESIIATVFKFIEHPLNNEKPEKTGLKFKITSLKVKGPIDYVPEMFDELKDQVTVEQILQVVFLDPERNCPALEKLKLQLVEADAAVEARKRAPEDAGPKILGEGLVVDEWKERRERYLAKQQGEVVVDSI

SEQ ID NO: 7968 - protein, 141 aa, Glycine max
  peptide (1)..(141): Ceres Seq. ID no. 14306204
  misc_feature (1)..(141): NCBI GI NO: 18415696 NR Description: VAMP
  misc_feature (1)..(141): NCBI GI NO: 34394013 NR Description: putative 27k vesicle-associated membrane protein-associated protein
  misc_feature (1)..(141): NCBI GI NO: 7485721 NR Description: hypothetical protein F18E5
  misc_feature (1)..(141): NCBI GI NO: 18423592 NR Description: VAMP
  misc_feature (1)..(136): NCBI GI NO: 18412787 NR Description: VAMP
  misc_feature (1)..(136): NCBI GI NO: 21593103 NR Description: membrane associated protein-like protein
  misc_feature (1)..(121): NCBI GI NO: 8809582 NR Description: membrane associated protein [Arabidopsis thaliana]
  misc_feature (1)..(141): NCBI GI NO: 1800147 NR Description: membrane associated protein [Arabidopsis thaliana]
  misc_feature (1)..(136): NCBI GI NO: 25365874 NR Description: hypothetical protein AT4g05060
MRPPGGILAPGESIIATVFKFIEHPLNNEKPEKTGLKFKITSLKVKGPIDYVPEMFDELKDQVTVEQILQVVFLDPERNCPALEKLKLQLVEADAAVEARKRAPEDAGPKILGEGLVVDEWKERRERYLAKQQGEVVVDSI

SEQ ID NO: 7969 - DNA, 945 bp, Glycine max
  misc_feature (1)..(945): Ceres Seq. ID no. 14314070
aaacacaacaactcatcatcctatattctcttcttggatcatcttggttaagctgcagatcagaatagaataataataaataaagataagatggagactcatttggttttcttgcttggtttgatcttcactctagttgccggcgttggagcccaagcccaaggcccatccacctctcctgcgcctcccacaccccaagcatctccacctcccgtccagtcttctccgccacctgttccctcttcacctccaccctctcagtctccaccaccagcttccactccccctccatccccactcagctctcctcctccttcctctcctccaccctcctcccctcctccttcttctccaccccccgcctctcctcctccttcttctccaccccccgcctctcctcctccttcttcccctcccccttcctctccccctcctttttcaccacctcctgccactcctccccccgccactcctccccccgcagttccaccaccctcattgaccccaacagttacacctctttcttctccacctgtctcttctccagctccgtctccttccaaggtgtttgctcctgcactctctccttcccttgctcccggtcccagcctctccaccatctctccctccggcgatgacagtggggctcaaaacttgtggtcctttcagaagatgattgggagcttagtattcggatgtgctttgctgtccatgttgttctagacatcgatctctgtcttcggactcgcagatttttctgccaattcatgttattttgctatttaccctataccttacctttatatattattttgtggatgtgatcgtgggagtttattactgtatttgaactatataaattgcttgcattcttgggagatttgaggggaggttttgtattcgagggcagttattttgtatgacattactattagtttatcgatc

SEQ ID NO: 7970 - protein, 210 aa, Glycine max
  peptide (1)..(210): Ceres Seq. ID no. 14314071
  misc_feature (26)..(172): Pfam Name: Pfam Description:  Formin Homology 2 Domain
  misc_feature (26)..(210): NCBI GI NO: 1084362 NR Description: extensin-like protein S3 - alfalfa
  misc_feature (6)..(209): NCBI GI NO: 7441828 NR Description: extensin-like cell wall protein
  misc_feature (6)..(209): NCBI GI NO: 7441829 NR Description: proline-rich cell wall protein - upland cotton
  misc_feature (4)..(188): NCBI GI NO: 1084362 NR Description: extensin-like protein S3 - alfalfa
  misc_feature (34)..(206): NCBI GI NO: 13265426 NR Description: At2g14890 [Arabidopsis thaliana]
  misc_feature (34)..(206): NCBI GI NO: 15226024 NR Description: arabinogalactan-protein (AGP9)
  misc_feature (20)..(179): NCBI GI NO: 6523547 NR Description: hydroxyproline-rich glycoprotein DZ-HRGP
  misc_feature (26)..(154): NCBI GI NO: 14253159 NR Description: VMP3 protein [Volvox carteri f. nagariensis]
  misc_feature (15)..(173): NCBI GI NO: 6523547 NR Description: hydroxyproline-rich glycoprotein DZ-HRGP
  misc_feature (26)..(179): NCBI GI NO: 6523547 NR Description: hydroxyproline-rich glycoprotein DZ-HRGP
METHLVFLLGLIFTLVAGVGAQAQGPSTSPAPPTPQASPPPVQSSPPPVPSSPPPSQSPPPASTPPPSPLSSPPPSSPPPSSPPPSSPPPASPPPSSPPPASPPPSSPPPSSPPPFSPPPATPPPATPPPAVPPPSLTPTVTPLSSPPVSSPAPSPSKVFAPALSPSLAPGPSLSTISPSGDDSGAQNLWSFQKMIGSLVFGCALLSMLF

SEQ ID NO: 7971 - DNA, 1335 bp, Glycine max
  misc_feature (1)..(1335): Ceres Seq. ID no. 15171228
aattctgcttcagaaatccctgcgtgaagaagaaatcactgtgtgtgattcaattgcatcggtttcttcaattccagcaccggtgcgtgcatctgatttatataaccttgtttgttcactcttatttttatgttatggctatttcatatttgaggtcagcatcataagcagttgttgtttcggaaacacaagatgaattctggtgggtacgctgttgaggttacgggtctctcgccaaaagccacggacaaggatgttcgtgacttctttgctttctccggtgtcattgagaatgttgaaattatcaggtctggtgattatgcttgtaccgcttatgtgacattcaaagatgcatatgctcaagaaactgcatgcttgctcagtggagccactattttagatcaacgtgtatgcataacacgctggggacactatgaagatgaatttgatttttggaaccagccttcgtatagtcatgaggatgagactgcttcaactacaccacaaagcaatcaatttgtttcctctgctggagaagcagttaccatggctcaagaagttgttaggaccatgctgtcaaagggatatgttctcagcaaggatgcactagctaaggctaaagactttgacgagtctcatcaggtttccgccactgcaacagcgaaggtttctgaactgagccagagaattggcctatcagataagatatctgcaggtattggagctgttaaatctgtggatcagagatataatgtctctgaaacaaccatggcggctgcatccacagcaggaagatcggtagcagcggctgcaaactctttggtaaatagcagctatttttcaaaaggagccttgtgggtgtcaggtgctctaacccgagcagctcaggttgcttctgatatgggtactcacagggataggcagtaaataaagcattgacatgattaaacactatcttttagatatgtctgcttctgctaaatagcttttgaaacttcagttagcaatattattatacttttacaatacataaatcctgtttggataattttttggataaacacttatagaagtaaggtaaaatgaattgagcttctctcgtaagttaaaatcaacttatgcacttaacttttataaaagatttttcatttaacttttctgaaggccgaagtacataagttgattttagtttatgagaaaatcacatttcattttactttcttgtaagtatttatagagaaatttatcttaacaggatcatagtgcatgtaattatgaataaatctagtgtatgcccagacaggattgaactatgaaacccgtgctatttctacc

SEQ ID NO: 7972 - protein, 244 aa, Glycine max
  peptide (1)..(244): Ceres Seq. ID no. 15171229
  misc_feature (8)..(76): Pfam Name: a.k.a. RRM, RBD, or RNP domain Pfam Description: RNA recognition motif.
  misc_feature (5)..(244): NCBI GI NO: 18394102 NR Description: RNA recognition motif (RRM)-containing protein
  misc_feature (5)..(244): NCBI GI NO: 21618045 NR Description: unknown [Arabidopsis thaliana]
  misc_feature (5)..(239): NCBI GI NO: 25518024 NR Description: F14L17.11 protein - Arabidopsis thaliana
  misc_feature (1)..(240): NCBI GI NO: 38344906 NR Description: OSJNBb0079B02.9
  misc_feature (5)..(238): NCBI GI NO: 6714467 NR Description: unknown protein [Arabidopsis thaliana]
  misc_feature (8)..(239): NCBI GI NO: 38347069 NR Description: OSJNBa0006A01.10
  misc_feature (8)..(238): NCBI GI NO: 18414951 NR Description: RNA recognition motif (RRM)-containing protein
  misc_feature (8)..(238): NCBI GI NO: 8809670 NR Description: gene_id:MSD23
  misc_feature (8)..(238): NCBI GI NO: 30695063 NR Description: RNA recognition motif (RRM)-containing protein
  misc_feature (8)..(238): NCBI GI NO: 7485085 NR Description: hypothetical protein - Arabidopsis thaliana
MNSGGYAVEVTGLSPKATDKDVRDFFAFSGVIENVEIIRSGDYACTAYVTFKDAYAQETACLLSGATILDQRVCITRWGHYEDEFDFWNQPSYSHEDETASTTPQSNQFVSSAGEAVTMAQEVVRTMLSKGYVLSKDALAKAKDFDESHQVSATATAKVSELSQRIGLSDKISAGIGAVKSVDQRYNVSETTMAAASTAGRSVAAAANSLVNSSYFSKGALWVSGALTRAAQVASDMGTHRDRQ

SEQ ID NO: 7973 - protein, 126 aa, Glycine max
  peptide (1)..(126): Ceres Seq. ID no. 15171230
  misc_feature (1)..(126): NCBI GI NO: 18394102 NR Description: RNA recognition motif (RRM)-containing protein
  misc_feature (1)..(126): NCBI GI NO: 21618045 NR Description: unknown [Arabidopsis thaliana]
  misc_feature (1)..(121): NCBI GI NO: 25518024 NR Description: F14L17.11 protein - Arabidopsis thaliana
  misc_feature (1)..(122): NCBI GI NO: 38344906 NR Description: OSJNBb0079B02.9
  misc_feature (1)..(120): NCBI GI NO: 6714467 NR Description: unknown protein [Arabidopsis thaliana]
  misc_feature (1)..(121): NCBI GI NO: 38347069 NR Description: OSJNBa0006A01.10
  misc_feature (1)..(120): NCBI GI NO: 18414951 NR Description: RNA recognition motif (RRM)-containing protein
  misc_feature (1)..(120): NCBI GI NO: 8809670 NR Description: gene_id:MSD23
  misc_feature (1)..(120): NCBI GI NO: 30695063 NR Description: RNA recognition motif (RRM)-containing protein
  misc_feature (1)..(120): NCBI GI NO: 7485085 NR Description: hypothetical protein - Arabidopsis thaliana
MAQEVVRTMLSKGYVLSKDALAKAKDFDESHQVSATATAKVSELSQRIGLSDKISAGIGAVKSVDQRYNVSETTMAAASTAGRSVAAAANSLVNSSYFSKGALWVSGALTRAAQVASDMGTHRDRQ

SEQ ID NO: 7974 - DNA, 1528 bp, Glycine max
  misc_feature (1)..(1528): Ceres Seq. ID no. 14315052
ttaccacttcccatcttcgcacacaacacagccatccctttctctcccttcttttgctctctgccctaaccagcctcaccagatcttttacctccatttccagtgcatcacaccttagcttcaagccatcacaagttgtagatacagttaatactcaatatggagctgagtactataaaagatgcttttgaccgtgttactaagaagcaaaagttatcttgttccaagactcaagaagcaattgatcagatcagacaggaaattgagagtgttttagacacactgcagtcagcgaataacactgaccatgaacttgattataaaactgtcctgaatgaacttaaggccagttttcttttaattgctccacttagtcaaatggaaggtacacagaaggagctaaatgtagcactcaccaagtatgggaagcttcttgagaaacatttcaaccctgatatatccaaggcttacagaaatatcgacattgatagacatacattaaaccaaataattgctaaccatttttatcaccagggcctttttgagataggggaccattttatgagtgtggttggagagcctgaatccgcagccattatgaaatttccgttcgtggaaatgtatcaaatacttgaagccatgcagaatcagaacctagagccagccctcaactgggcttccactaatggtgacaaacttgctcaaagtggatctgatattgtgttgaaacttcactcaatgcaatttgtgaaagtacttcaaaatggaagtagagaggaagctcttcattatgctcgaatgcacctttctccttttgctaccagtcacatgaccgatattcagaaacttatgggctgtcttctatggacgggaaagcttgatcgttctccttaccatgcattactatcaccatctaactgggataagttggctgaggaacttaaaaggcagttctgcaatcttttgggacagtcgtataatagtccattgagcgtgactgtagcagcaggggtccaggttttgccaccactcctcaaatttatgaatgtcatggcagggaagaagaatgaatggcagtctatgaaccagttaccggtgccggttgagttggaccgtgagttccagttccattctatttttgtttgtcctgtctccaaggaacaagcaaccgaggataaccctccgatgttaatgtcctgtggccatgtcctctgcaagcagtctatcttgaagatgtccaagaatagcacaaaagtgtttaagtgcccatattgtccctttgatattgatgcagcacagtgcaagcagctatatttctgatgttgatggatttgtatgaaactcctgtataaattcaatcctgtgttagcaataggtgtaaccacgtttgcaaaggcccatgccttgttgtgatctctgtgtatttcataaatttgttgtaaatagaaattctttttaatctggatatgactggcaagtccttcattatttgaataagttttgatacacttaaagctggtttttcccc

SEQ ID NO: 7975 - protein, 386 aa, Glycine max
  peptide (1)..(386): Ceres Seq. ID no. 14315053
  misc_feature (339)..(372): Pfam Name: RING finger Pfam Description: Zinc finger, C3HC4 type
  misc_feature (1)..(386): NCBI GI NO: 15235735 NR Description: expressed protein [Arabidopsis thaliana]
  misc_feature (1)..(386): NCBI GI NO: 18400050 NR Description: expressed protein [Arabidopsis thaliana]
  misc_feature (1)..(386): NCBI GI NO: 21593562 NR Description: unknown [Arabidopsis thaliana]
  misc_feature (5)..(386): NCBI GI NO: 15242463 NR Description: expressed protein [Arabidopsis thaliana]
  misc_feature (1)..(386): NCBI GI NO: 28829262 NR Description: similar to Arabidopsis thaliana (Mouse-ear cress)
  misc_feature (23)..(386): NCBI GI NO: 37590378 NR Description: Unknown (protein for MGC:73277) [Danio rerio]
  misc_feature (71)..(386): NCBI GI NO: 12232469 NR Description: hypothetical protein FLJ13910 [Homo sapiens]
  misc_feature (23)..(386): NCBI GI NO: 37595352 NR Description: hypothetical protein FLJ22318 [Danio rerio]
  misc_feature (71)..(386): NCBI GI NO: 10434433 NR Description: unnamed protein product [Homo sapiens]
  misc_feature (4)..(386): NCBI GI NO: 31240441 NR Description: ENSANGP00000021271 [Anopheles gambiae]
MELSTIKDAFDRVTKKQKLSCSKTQEAIDQIRQEIESVLDTLQSANNTDHELDYKTVLNELKASFLLIAPLSQMEGTQKELNVALTKYGKLLEKHFNPDISKAYRNIDIDRHTLNQIIANHFYHQGLFEIGDHFMSVVGEPESAAIMKFPFVEMYQILEAMQNQNLEPALNWASTNGDKLAQSGSDIVLKLHSMQFVKVLQNGSREEALHYARMHLSPFATSHMTDIQKLMGCLLWTGKLDRSPYHALLSPSNWDKLAEELKRQFCNLLGQSYNSPLSVTVAAGVQVLPPLLKFMNVMAGKKNEWQSMNQLPVPVELDREFQFHSIFVCPVSKEQATEDNPPMLMSCGHVLCKQSILKMSKNSTKVFKCPYCPFDIDAAQCKQLYF

SEQ ID NO: 7976 - protein, 313 aa, Glycine max
  peptide (1)..(313): Ceres Seq. ID no. 14315054
  misc_feature (266)..(299): Pfam Name: RING finger Pfam Description: Zinc finger, C3HC4 type
  misc_feature (1)..(313): NCBI GI NO: 15235735 NR Description: expressed protein [Arabidopsis thaliana]
  misc_feature (1)..(313): NCBI GI NO: 18400050 NR Description: expressed protein [Arabidopsis thaliana]
  misc_feature (1)..(313): NCBI GI NO: 21593562 NR Description: unknown [Arabidopsis thaliana]
  misc_feature (1)..(313): NCBI GI NO: 15242463 NR Description: expressed protein [Arabidopsis thaliana]
  misc_feature (1)..(313): NCBI GI NO: 28829262 NR Description: similar to Arabidopsis thaliana (Mouse-ear cress)
  misc_feature (1)..(313): NCBI GI NO: 37590378 NR Description: Unknown (protein for MGC:73277) [Danio rerio]
  misc_feature (1)..(313): NCBI GI NO: 12232469 NR Description: hypothetical protein FLJ13910 [Homo sapiens]
  misc_feature (1)..(313): NCBI GI NO: 37595352 NR Description: hypothetical protein FLJ22318 [Danio rerio]
  misc_feature (1)..(313): NCBI GI NO: 10434433 NR Description: unnamed protein product [Homo sapiens]
  misc_feature (1)..(313): NCBI GI NO: 31240441 NR Description: ENSANGP00000021271 [Anopheles gambiae]
MEGTQKELNVALTKYGKLLEKHFNPDISKAYRNIDIDRHTLNQIIANHFYHQGLFEIGDHFMSVVGEPESAAIMKFPFVEMYQILEAMQNQNLEPALNWASTNGDKLAQSGSDIVLKLHSMQFVKVLQNGSREEALHYARMHLSPFATSHMTDIQKLMGCLLWTGKLDRSPYHALLSPSNWDKLAEELKRQFCNLLGQSYNSPLSVTVAAGVQVLPPLLKFMNVMAGKKNEWQSMNQLPVPVELDREFQFHSIFVCPVSKEQATEDNPPMLMSCGHVLCKQSILKMSKNSTKVFKCPYCPFDIDAAQCKQLYF

SEQ ID NO: 7977 - protein, 252 aa, Glycine max
  peptide (1)..(252): Ceres Seq. ID no. 14315055
  misc_feature (205)..(238): Pfam Name: RING finger Pfam Description: Zinc finger, C3HC4 type
  misc_feature (1)..(252): NCBI GI NO: 15235735 NR Description: expressed protein [Arabidopsis thaliana]
  misc_feature (1)..(252): NCBI GI NO: 18400050 NR Description: expressed protein [Arabidopsis thaliana]
  misc_feature (1)..(252): NCBI GI NO: 21593562 NR Description: unknown [Arabidopsis thaliana]
  misc_feature (1)..(252): NCBI GI NO: 15242463 NR Description: expressed protein [Arabidopsis thaliana]
  misc_feature (1)..(252): NCBI GI NO: 28829262 NR Description: similar to Arabidopsis thaliana (Mouse-ear cress)
  misc_feature (1)..(252): NCBI GI NO: 37590378 NR Description: Unknown (protein for MGC:73277) [Danio rerio]
  misc_feature (1)..(252): NCBI GI NO: 12232469 NR Description: hypothetical protein FLJ13910 [Homo sapiens]
  misc_feature (1)..(252): NCBI GI NO: 37595352 NR Description: hypothetical protein FLJ22318 [Danio rerio]
  misc_feature (1)..(252): NCBI GI NO: 10434433 NR Description: unnamed protein product [Homo sapiens]
  misc_feature (1)..(252): NCBI GI NO: 31240441 NR Description: ENSANGP00000021271 [Anopheles gambiae]
MSVVGEPESAAIMKFPFVEMYQILEAMQNQNLEPALNWASTNGDKLAQSGSDIVLKLHSMQFVKVLQNGSREEALHYARMHLSPFATSHMTDIQKLMGCLLWTGKLDRSPYHALLSPSNWDKLAEELKRQFCNLLGQSYNSPLSVTVAAGVQVLPPLLKFMNVMAGKKNEWQSMNQLPVPVELDREFQFHSIFVCPVSKEQATEDNPPMLMSCGHVLCKQSILKMSKNSTKVFKCPYCPFDIDAAQCKQLYF

SEQ ID NO: 7978 - DNA, 1460 bp, Glycine max
  misc_feature (1)..(1460): Ceres Seq. ID no. 14314789
gaaagtgttgtgcgtgctacgcgcggaacctgtcgtttcgagttctacttgtacgttctaccacctttgagtatcttaaacaatctaccatacgtggatcaaaacaccattgccattggctctctttctttgccgtaccatttgaattgaatgtgattgcaattgcaaatccccccttcaattcaattactactttcacgacctaatctaacccttcgctctgctctgctctcacttcaccatattcacacccagatggaaactgtttgtctccactgtggcgacagaggctttccagagacattggttttttgcaccgaatgtatggcttatgcgctgcataggtactgtttaaaggggcttgtgaattttactgatgctgttacatggttttgcgaggattgtgcaacaaagcttggggtgccacctgctcttgaccaatctacacctatcgcatctgtaacaagagaaaattgcatacagggagtgaaaaaacacaataaacagcaaaaaaagaagattacaaagaagcagattgaaggaaaagctaacgctggcttagttgctaaaacaaagggtgtgttatctgctagtcacagttcatctgagcctgagcatcctcattgtagtaacagaggcgaagaagaacatgaggtgaaaaatgactgtggaccagttccaagggatgtagctaattttgatgtaggtgaagaagaaagtgtggcaagggatttagctaattctgatgtaagtttcaaatctgttccagtttctcaaggagctaccaatagtgattcaggttgtgtagaagtagatggtcatgtttatgcacagcctactattgatccaatctggaggggaagtatgtacttttgcaatggaacaattcgtactgtcagtggacttctggctcatatctccaatttagcgtgctcccaagttgcggaggagacaggacatttcccagaagtgcttcatgcagaatttcttcccagagataaggtgtgggctgaaagtttcaagaggggggatccaactgatcaggacattgctctttttttctttcctgacagtgaaggatctgaaaaggacttcgatgtgctggttgaagatatcatgatctgtaaacatgtcataagatttgtgggtaaaaatgcagagcttttaatttttccttctactgagcttccagtccaaaattggagatatgaagccaagtattatttgtggggtgtcttcagaaagaaagcaaacttaagaagagacaaatgatgcagtgtgcagagtttgacaaggctcttaggttggcataaccatagacgtagtctccatctaaaaatttgagcaatagtggttgtgtagctatgactctagtgcatagtactcctgtgtttatagtcactgatatgttaattaaacatatatatactgtagtgcatagtaccctttttgtgaaaaat

SEQ ID NO: 7979 - protein, 338 aa, Glycine max
  peptide (1)..(338): Ceres Seq. ID no. 14314790
  misc_feature (4)..(50): Pfam Name: Pfam Description:  PHD-finger
  misc_feature (154)..(337): NCBI GI NO: 11357809 NR Description: hypothetical protein F5E19_20 - Arabidopsisthaliana
  misc_feature (4)..(106): NCBI GI NO: 11357809 NR Description: hypothetical protein F5E19_20 - Arabidopsisthaliana
  misc_feature (154)..(337): NCBI GI NO: 30685968 NR Description: expressed protein [Arabidopsis thaliana]
  misc_feature (4)..(106): NCBI GI NO: 30685968 NR Description: expressed protein [Arabidopsis thaliana]
  misc_feature (192)..(331): NCBI GI NO: 15233015 NR Description: expressed protein [Arabidopsis thaliana]
  misc_feature (4)..(50): NCBI GI NO: 15233015 NR Description: expressed protein [Arabidopsis thaliana]
  misc_feature (192)..(328): NCBI GI NO: 7488990 NR Description: DNA binding protein E4/E8BP-1 - tomato
  misc_feature (79)..(274): NCBI GI NO: 30693717 NR Description: expressed protein [Arabidopsis thaliana]
  misc_feature (4)..(136): NCBI GI NO: 30693717 NR Description: expressed protein [Arabidopsis thaliana]
  misc_feature (4)..(136): NCBI GI NO: 25405141 NR Description: hypothetical protein F28H19.3
METVCLHCGDRGFPETLVFCTECMAYALHRYCLKGLVNFTDAVTWFCEDCATKLGVPPALDQSTPIASVTRENCIQGVKKHNKQQKKKITKKQIEGKANAGLVAKTKGVLSASHSSSEPEHPHCSNRGEEEHEVKNDCGPVPRDVANFDVGEEESVARDLANSDVSFKSVPVSQGATNSDSGCVEVDGHVYAQPTIDPIWRGSMYFCNGTIRTVSGLLAHISNLACSQVAEETGHFPEVLHAEFLPRDKVWAESFKRGDPTDQDIALFFFPDSEGSEKDFDVLVEDIMICKHVIRFVGKNAELLIFPSTELPVQNWRYEAKYYLWGVFRKKANLRRDK

SEQ ID NO: 7980 - protein, 315 aa, Glycine max
  peptide (1)..(315): Ceres Seq. ID no. 14314791
  misc_feature (131)..(314): NCBI GI NO: 11357809 NR Description: hypothetical protein F5E19_20 - Arabidopsisthaliana
  misc_feature (1)..(83): NCBI GI NO: 11357809 NR Description: hypothetical protein F5E19_20 - Arabidopsisthaliana
  misc_feature (131)..(314): NCBI GI NO: 30685968 NR Description: expressed protein [Arabidopsis thaliana]
  misc_feature (1)..(83): NCBI GI NO: 30685968 NR Description: expressed protein [Arabidopsis thaliana]
  misc_feature (169)..(308): NCBI GI NO: 15233015 NR Description: expressed protein [Arabidopsis thaliana]
  misc_feature (1)..(27): NCBI GI NO: 15233015 NR Description: expressed protein [Arabidopsis thaliana]
  misc_feature (169)..(305): NCBI GI NO: 7488990 NR Description: DNA binding protein E4/E8BP-1 - tomato
  misc_feature (56)..(251): NCBI GI NO: 30693717 NR Description: expressed protein [Arabidopsis thaliana]
  misc_feature (1)..(113): NCBI GI NO: 30693717 NR Description: expressed protein [Arabidopsis thaliana]
  misc_feature (1)..(113): NCBI GI NO: 25405141 NR Description: hypothetical protein F28H19.3
MAYALHRYCLKGLVNFTDAVTWFCEDCATKLGVPPALDQSTPIASVTRENCIQGVKKHNKQQKKKITKKQIEGKANAGLVAKTKGVLSASHSSSEPEHPHCSNRGEEEHEVKNDCGPVPRDVANFDVGEEESVARDLANSDVSFKSVPVSQGATNSDSGCVEVDGHVYAQPTIDPIWRGSMYFCNGTIRTVSGLLAHISNLACSQVAEETGHFPEVLHAEFLPRDKVWAESFKRGDPTDQDIALFFFPDSEGSEKDFDVLVEDIMICKHVIRFVGKNAELLIFPSTELPVQNWRYEAKYYLWGVFRKKANLRRDK

SEQ ID NO: 7981 - DNA, 1387 bp, Glycine max
  misc_feature (1)..(1387): Ceres Seq. ID no. 14314747
atctaaacattgacaaccttaataatttattctgtttgtggtctcactagctagaaacaacatcactacacacaaatggcacatactttatccactaatctggctcttaaccttcccacatcgaggtatgttcgtccctcgagaccaacccaggtgaagcccatgaaggtcatgatgggtgatgcaagagaaaagctagaacatgtccatgtgcctaaacacaacaagcaccaccagcccctccccaaaaacaaagttgctcctaccccacccgtaggtaattaattaagctcaatcactctttcacataaattattatatacattaaattctaattgagctattcaacttacaagtaaaattaataaaactcaattatgtttcagctaaaaatttgttttagatcttgttcacctttggatcgaccttgaatcatataatagtcctatgtccacgtataagttgaaattgttctaaacgatatattaatttctggcactctgtggatttgtatatgctatgttattgactaagtgcaaacttaattattcttcttcttaattttctagttagcactaaatatatgactatatactgtgtattaattcagttaacatggggaattgaataaacgcagggttgtgggatcgatttcctacggcaaggacagtgcaagagatgatggagacgatggagagaatgatggaggacccttttgcatttagcacacttgagtggccttcatcaccccttccaagtgagggagtgggagggtatcgaagaaggggaagggcaccatgggaaattaaagagtgtgagagtgaatacaagatgaggtttgatatgcctgggatgaacaaggaggatgtgaaggtgtgggtggaggagaagatgcttgtggtcaaggctgagaaggcacaaaagaagaagcaagagaatgagattgtggaattacaacaagaaaagcagcaagaagaggaggaatggtctgctaagagttatggtaggtatagcagtaggattgctttgcctgataatgtgcagtttgagaatattaaggcagaggttaaggatggtatgctttacataaccatacccaaggctaccagctactccaacatccttgatatccaagttcaatgattcattttgttttgaggtcttttcttagtttttttgttttggattttccacatgtctcttcctttggagacaatcctgttagaggtatgatcagatattaaatataaacatcttttttaacagagatttaaacattaatttatcactttatgaaagactaacctcttctcttagacctaattattggtcttttattagtttgatagacaactttcctctaaataaatagaaaatatgtgtagat

SEQ ID NO: 7982 - protein, 154 aa, Glycine max
  peptide (1)..(154): Ceres Seq. ID no. 14314748
  misc_feature (4)..(154): NCBI GI NO: 22530880 NR Description: small heat shock protein [Lycopersicon esculentum]
  misc_feature (32)..(154): NCBI GI NO: 22530884 NR Description: small heat shock protein [Lycopersicon esculentum]
  misc_feature (1)..(88): NCBI GI NO: 22530880 NR Description: small heat shock protein [Lycopersicon esculentum]
  misc_feature (1)..(88): NCBI GI NO: 22530884 NR Description: small heat shock protein [Lycopersicon esculentum]
  misc_feature (1)..(153): NCBI GI NO: 7441307 NR Description: heat shock protein 26a
  misc_feature (1)..(154): NCBI GI NO: 232278 NR Description: Small heat shock protein, chloroplast precursor
  misc_feature (1)..(153): NCBI GI NO: 2495334 NR Description: Small heat shock protein, chloroplast precursor
  misc_feature (1)..(153): NCBI GI NO: 7441305 NR Description: heat shock protein 20
  misc_feature (25)..(154): NCBI GI NO: 123558 NR Description: Small heat shock protein, chloroplast precursor
  misc_feature (1)..(154): NCBI GI NO: 4996284 NR Description: heat shock protein 26 [Oryza sativa]
MMETMERMMEDPFAFSTLEWPSSPLPSEGVGGYRRRGRAPWEIKECESEYKMRFDMPGMNKEDVKVWVEEKMLVVKAEKAQKKKQENEIVELQQEKQQEEEEWSAKSYGRYSSRIALPDNVQFENIKAEVKDGMLYITIPKATSYSNILDIQVQ

SEQ ID NO: 7983 - protein, 153 aa, Glycine max
  peptide (1)..(153): Ceres Seq. ID no. 14314749
  misc_feature (3)..(153): NCBI GI NO: 22530880 NR Description: small heat shock protein [Lycopersicon esculentum]
  misc_feature (31)..(153): NCBI GI NO: 22530884 NR Description: small heat shock protein [Lycopersicon esculentum]
  misc_feature (1)..(87): NCBI GI NO: 22530880 NR Description: small heat shock protein [Lycopersicon esculentum]
  misc_feature (1)..(87): NCBI GI NO: 22530884 NR Description: small heat shock protein [Lycopersicon esculentum]
  misc_feature (1)..(152): NCBI GI NO: 7441307 NR Description: heat shock protein 26a
  misc_feature (1)..(153): NCBI GI NO: 232278 NR Description: Small heat shock protein, chloroplast precursor
  misc_feature (1)..(152): NCBI GI NO: 2495334 NR Description: Small heat shock protein, chloroplast precursor
  misc_feature (1)..(152): NCBI GI NO: 7441305 NR Description: heat shock protein 20
  misc_feature (24)..(153): NCBI GI NO: 123558 NR Description: Small heat shock protein, chloroplast precursor
  misc_feature (1)..(153): NCBI GI NO: 4996284 NR Description: heat shock protein 26 [Oryza sativa]
METMERMMEDPFAFSTLEWPSSPLPSEGVGGYRRRGRAPWEIKECESEYKMRFDMPGMNKEDVKVWVEEKMLVVKAEKAQKKKQENEIVELQQEKQQEEEEWSAKSYGRYSSRIALPDNVQFENIKAEVKDGMLYITIPKATSYSNILDIQVQ

SEQ ID NO: 7984 - protein, 150 aa, Glycine max
  peptide (1)..(150): Ceres Seq. ID no. 14314750
  misc_feature (1)..(150): NCBI GI NO: 22530880 NR Description: small heat shock protein [Lycopersicon esculentum]
  misc_feature (28)..(150): NCBI GI NO: 22530884 NR Description: small heat shock protein [Lycopersicon esculentum]
  misc_feature (1)..(84): NCBI GI NO: 22530880 NR Description: small heat shock protein [Lycopersicon esculentum]
  misc_feature (1)..(84): NCBI GI NO: 22530884 NR Description: small heat shock protein [Lycopersicon esculentum]
  misc_feature (1)..(149): NCBI GI NO: 7441307 NR Description: heat shock protein 26a
  misc_feature (1)..(150): NCBI GI NO: 232278 NR Description: Small heat shock protein, chloroplast precursor
  misc_feature (1)..(149): NCBI GI NO: 2495334 NR Description: Small heat shock protein, chloroplast precursor
  misc_feature (1)..(149): NCBI GI NO: 7441305 NR Description: heat shock protein 20
  misc_feature (21)..(150): NCBI GI NO: 123558 NR Description: Small heat shock protein, chloroplast precursor
  misc_feature (1)..(150): NCBI GI NO: 4996284 NR Description: heat shock protein 26 [Oryza sativa]
MERMMEDPFAFSTLEWPSSPLPSEGVGGYRRRGRAPWEIKECESEYKMRFDMPGMNKEDVKVWVEEKMLVVKAEKAQKKKQENEIVELQQEKQQEEEEWSAKSYGRYSSRIALPDNVQFENIKAEVKDGMLYITIPKATSYSNILDIQVQ

SEQ ID NO: 7985 - DNA, 1310 bp, Glycine max
  misc_feature (1)..(1310): Ceres Seq. ID no. 14315042
accacccccctcattgcagcagtttttgagtttccttacattcttaaagaaaccactcgttgttctttaggatatttctcttttcattttcctcttttcttcaaatcccaaaggatatttgtctctaatatccaaccttcaagatcatggatgttgcgcatttcattttcgggatatttgggaatgcttctggtttgttcctcttcttggccccaatagtgacattctggaggatcgtttcgaacaaatccacagagaagttctcgggggttccttaccctatgacacttctcaattgtctcctttctgcttggtatggtttgccatttgtgtccccaaacaacttacttgtgacaattatcaatggcacaggagcaggaattgaaatcatatacgtctttatattcatctacttcgcaccaaagaaagagaagaccaagattattggccttttctccttcgtggtggcagtgttctctgttgttgttctggtgtcactgtttgctctgcagggcaatgcccgaaagctcttctgtggcttcgctgctgccatattttccatcgtcatgtatggttcacccctctcaattatgaggctagtgataaaaaccaagagcgtggagttcatgcccttcttcctctcactctttgtgttcctctgtggcacatcttggttcatctacgggctactaggccgtgacccatttgtggctgtacctaatggcgttggttctgcgttggggacagcacaactaatattgtattttatctaccgtgacaacaaaagtgatccaaagaagattccaagaacagaagaagaagctatggaaatgggcaccgctaataaaaatcccatatccaactcgaatggaatacaagagggacgcgtctagggacgcgtctagggacgcgtgttagcattaaaaagaacaagccgttatctttgtctctgtctctttctaagcattaagagcacatctttaatttggactatgcttacatctttgttgttgttttttttttcttttttctttttaaaaaatctgttgttgttgctatcatctttgtgactctgtttcctccacgatttgtagtttttgttttttttttcttttagttatgatagttgtactataagtttagccatattgaaacgagtttgtgttgtgtgaattttcttttcttttcttccttttcagtccatttgtcgagacacatccgagcgatatcttgtgtctggataaaatttaaaagagtaatgaatatgtgaatctttctatctttaatttacaatattcatatttttggtt

SEQ ID NO: 7986 - protein, 248 aa, Glycine max
  peptide (1)..(248): Ceres Seq. ID no. 14315043
  misc_feature (128)..(213): Pfam Name: Pfam Description:  MtN3/saliva family
  misc_feature (1)..(244): NCBI GI NO: 18394992 NR Description: nodulin MtN3 family protein [Arabidopsis thaliana]
  misc_feature (3)..(234): NCBI GI NO: 34907420 NR Description: P0018C10.36
  misc_feature (46)..(244): NCBI GI NO: 25518644 NR Description: hypothetical protein F24J8
  misc_feature (2)..(215): NCBI GI NO: 34146818 NR Description: At5g53190 [Arabidopsis thaliana]
  misc_feature (2)..(215): NCBI GI NO: 15238678 NR Description: nodulin MtN3 family protein [Arabidopsis thaliana]
  misc_feature (2)..(236): NCBI GI NO: 34912454 NR Description: P0681B11.31
  misc_feature (7)..(212): NCBI GI NO: 18400517 NR Description: nodulin MtN3 family protein [Arabidopsis thaliana]
  misc_feature (2)..(227): NCBI GI NO: 34912462 NR Description: MtN3-like protein
  misc_feature (1)..(227): NCBI GI NO: 27754697 NR Description: putative cytochrome c oxidoreductase
  misc_feature (1)..(233): NCBI GI NO: 18413388 NR Description: nodulin MtN3 family protein [Arabidopsis thaliana]
MDVAHFIFGIFGNASGLFLFLAPIVTFWRIVSNKSTEKFSGVPYPMTLLNCLLSAWYGLPFVSPNNLLVTIINGTGAGIEIIYVFIFIYFAPKKEKTKIIGLFSFVVAVFSVVVLVSLFALQGNARKLFCGFAAAIFSIVMYGSPLSIMRLVIKTKSVEFMPFFLSLFVFLCGTSWFIYGLLGRDPFVAVPNGVGSALGTAQLILYFIYRDNKSDPKKIPRTEEEAMEMGTANKNPISNSNGIQEGRV

SEQ ID NO: 7987 - protein, 203 aa, Glycine max
  peptide (1)..(203): Ceres Seq. ID no. 14315044
  misc_feature (83)..(168): Pfam Name: Pfam Description:  MtN3/saliva family
  misc_feature (1)..(199): NCBI GI NO: 18394992 NR Description: nodulin MtN3 family protein [Arabidopsis thaliana]
  misc_feature (1)..(189): NCBI GI NO: 34907420 NR Description: P0018C10.36
  misc_feature (1)..(199): NCBI GI NO: 25518644 NR Description: hypothetical protein F24J8
  misc_feature (1)..(170): NCBI GI NO: 34146818 NR Description: At5g53190 [Arabidopsis thaliana]
  misc_feature (1)..(170): NCBI GI NO: 15238678 NR Description: nodulin MtN3 family protein [Arabidopsis thaliana]
  misc_feature (1)..(191): NCBI GI NO: 34912454 NR Description: P0681B11.31
  misc_feature (1)..(167): NCBI GI NO: 18400517 NR Description: nodulin MtN3 family protein [Arabidopsis thaliana]
  misc_feature (1)..(182): NCBI GI NO: 34912462 NR Description: MtN3-like protein
  misc_feature (1)..(182): NCBI GI NO: 27754697 NR Description: putative cytochrome c oxidoreductase
  misc_feature (1)..(188): NCBI GI NO: 18413388 NR Description: nodulin MtN3 family protein [Arabidopsis thaliana]
MTLLNCLLSAWYGLPFVSPNNLLVTIINGTGAGIEIIYVFIFIYFAPKKEKTKIIGLFSFVVAVFSVVVLVSLFALQGNARKLFCGFAAAIFSIVMYGSPLSIMRLVIKTKSVEFMPFFLSLFVFLCGTSWFIYGLLGRDPFVAVPNGVGSALGTAQLILYFIYRDNKSDPKKIPRTEEEAMEMGTANKNPISNSNGIQEGRV

SEQ ID NO: 7988 - DNA, 1577 bp, Glycine max
  misc_feature (1)..(1577): Ceres Seq. ID no. 15169153
gatctatgttttcccaagtgacagaaaagaaggtttattcaatcttttggaggcctgagtgtcgtccccaatccatagcttggaattccagaaaggcttcagcttcagcttgctgctcccttctcaacttcaacaatttcgatagcacttaatgtcctgttattgtagggacatcagtattgctaatcatgatatggtcaaggctaagtaggagaactcatctcttgccataccttagggctttgcaaacagactcaattgaatccaggtgcctatctatcattcctaaaggatcaagttacaagttcattaatcctaataccagcttccaacacaatttctcttgtaatatacggctatcaaagtttaagcaagaattgagtacaaaaccattccatctgtgttaccgctcttcagctttggcttcacagtatgttggaaagtcatgttccatgcctggtttccgacacttctcttctcatgcatccaaagaacagaaatcacgaaagatgcttttatacttgacgggcttagtttttgctatggttgggtgcacatatgctgcagttcccctttacaggagattttgccaagcaactggctatgggggaactgttacccggcgtgagactgttgaagaaaagattgctcgacatgatagcaataatacagtcaccacaagggaaatcgtggtgcagttcaatgctgatattgctgatgggatgcaatggaagtttgttcccacacagagagaggttagggtcaagcctggtgaaagtgcccttgcattttatactgccgaaaacaaaagttctactccaataacaggtgtttctacgtataatgtcactcctatgaaggctgcagtgtacttcaataaaattcaatgcttctgctttgaggagcagcgacttcttcctggagagcagattgacatgcctgtattcttttatattgacccggaatttgagacggatcctaaaatgaatggtatcaataacattatattatcatataccttcttcaaggtttctgaggaataagaccaacttgaatgttcacatgagattcaaataacaagctccctccatttcaaaggacaaagatgcatagcacattgatgaagttaaagttttggttacctatggtggctgacataaaagacaaattcattttcttatttgtttcacacgtataaagaaggctgcctcttctgtatgcttgccaagttcttgaatattttcagcttcagcaaaactactagaaaacccatgtgatcaacttttgaaggttcaaggtaccatgccatgacatttggaattatgctgattttctggtgctcctaagttaatgcaagcagggatttggagtacctcttcaaattagccatttagatgaatgaataattttgcttttagaatttattgatagtaaaacttatctaagaactgtaaaaggttgagatatattcacaaaatggtaagtgacaatgacgtctacaatcaggggaaactagcatggtatgaatattggtgatagtttaacggggcatttatctttatacttttacaaaaccc

SEQ ID NO: 7989 - protein, 284 aa, Glycine max
  peptide (1)..(284): Ceres Seq. ID no. 15169154
  misc_feature (126)..(281): Pfam Name: Pfam Description:  Cytochrome c oxidase assembly protein  CtaG / Cox11
  misc_feature (85)..(284): NCBI GI NO: 15217755 NR Description: expressed protein [Arabidopsis thaliana]
  misc_feature (93)..(284): NCBI GI NO: 25310029 NR Description: hypothetical protein T6A9
  misc_feature (78)..(283): NCBI GI NO: 28301938 NR Description: putative cytochrome c oxidase assembly protein
  misc_feature (83)..(280): NCBI GI NO: 31205111 NR Description: ENSANGP00000022656 [Anopheles gambiae]
  misc_feature (73)..(283): NCBI GI NO: 24581944 NR Description: CG31648-PA [Drosophila melanogaster]
  misc_feature (104)..(283): NCBI GI NO: 11466506 NR Description: component involved in Haem biosynthesis
  misc_feature (97)..(280): NCBI GI NO: 39587698 NR Description: Hypothetical protein CBG01804
  misc_feature (5)..(280): NCBI GI NO: 19114191 NR Description: putative cytochrome c oxidase assembly protein
  misc_feature (97)..(283): NCBI GI NO: 4758034 NR Description: COX11 homolog
  misc_feature (5)..(280): NCBI GI NO: 13810231 NR Description: SPAPB8E5.01 [Schizosaccharomyces pombe]
MIWSRLSRRTHLLPYLRALQTDSIESRCLSIIPKGSSYKFINPNTSFQHNFSCNIRLSKFKQELSTKPFHLCYRSSALASQYVGKSCSMPGFRHFSSHASKEQKSRKMLLYLTGLVFAMVGCTYAAVPLYRRFCQATGYGGTVTRRETVEEKIARHDSNNTVTTREIVVQFNADIADGMQWKFVPTQREVRVKPGESALAFYTAENKSSTPITGVSTYNVTPMKAAVYFNKIQCFCFEEQRLLPGEQIDMPVFFYIDPEFETDPKMNGINNIILSYTFFKVSEE

SEQ ID NO: 7990 - protein, 196 aa, Glycine max
  peptide (1)..(196): Ceres Seq. ID no. 15169155
  misc_feature (38)..(193): Pfam Name: Pfam Description:  Cytochrome c oxidase assembly protein  CtaG / Cox11
  misc_feature (1)..(196): NCBI GI NO: 15217755 NR Description: expressed protein [Arabidopsis thaliana]
  misc_feature (5)..(196): NCBI GI NO: 25310029 NR Description: hypothetical protein T6A9
  misc_feature (1)..(195): NCBI GI NO: 28301938 NR Description: putative cytochrome c oxidase assembly protein
  misc_feature (1)..(192): NCBI GI NO: 31205111 NR Description: ENSANGP00000022656 [Anopheles gambiae]
  misc_feature (1)..(195): NCBI GI NO: 24581944 NR Description: CG31648-PA [Drosophila melanogaster]
  misc_feature (16)..(195): NCBI GI NO: 11466506 NR Description: component involved in Haem biosynthesis
  misc_feature (9)..(192): NCBI GI NO: 39587698 NR Description: Hypothetical protein CBG01804
  misc_feature (1)..(192): NCBI GI NO: 19114191 NR Description: putative cytochrome c oxidase assembly protein
  misc_feature (9)..(195): NCBI GI NO: 4758034 NR Description: COX11 homolog
  misc_feature (1)..(192): NCBI GI NO: 13810231 NR Description: SPAPB8E5.01 [Schizosaccharomyces pombe]
MPGFRHFSSHASKEQKSRKMLLYLTGLVFAMVGCTYAAVPLYRRFCQATGYGGTVTRRETVEEKIARHDSNNTVTTREIVVQFNADIADGMQWKFVPTQREVRVKPGESALAFYTAENKSSTPITGVSTYNVTPMKAAVYFNKIQCFCFEEQRLLPGEQIDMPVFFYIDPEFETDPKMNGINNIILSYTFFKVSEE

SEQ ID NO: 7991 - protein, 177 aa, Glycine max
  peptide (1)..(177): Ceres Seq. ID no. 15169156
  misc_feature (19)..(174): Pfam Name: Pfam Description:  Cytochrome c oxidase assembly protein  CtaG / Cox11
  misc_feature (1)..(177): NCBI GI NO: 15217755 NR Description: expressed protein [Arabidopsis thaliana]
  misc_feature (1)..(177): NCBI GI NO: 25310029 NR Description: hypothetical protein T6A9
  misc_feature (1)..(176): NCBI GI NO: 28301938 NR Description: putative cytochrome c oxidase assembly protein
  misc_feature (1)..(173): NCBI GI NO: 31205111 NR Description: ENSANGP00000022656 [Anopheles gambiae]
  misc_feature (1)..(176): NCBI GI NO: 24581944 NR Description: CG31648-PA [Drosophila melanogaster]
  misc_feature (1)..(176): NCBI GI NO: 11466506 NR Description: component involved in Haem biosynthesis
  misc_feature (1)..(173): NCBI GI NO: 39587698 NR Description: Hypothetical protein CBG01804
  misc_feature (1)..(173): NCBI GI NO: 19114191 NR Description: putative cytochrome c oxidase assembly protein
  misc_feature (1)..(176): NCBI GI NO: 4758034 NR Description: COX11 homolog
  misc_feature (1)..(173): NCBI GI NO: 13810231 NR Description: SPAPB8E5.01 [Schizosaccharomyces pombe]
MLLYLTGLVFAMVGCTYAAVPLYRRFCQATGYGGTVTRRETVEEKIARHDSNNTVTTREIVVQFNADIADGMQWKFVPTQREVRVKPGESALAFYTAENKSSTPITGVSTYNVTPMKAAVYFNKIQCFCFEEQRLLPGEQIDMPVFFYIDPEFETDPKMNGINNIILSYTFFKVSEE

SEQ ID NO: 7992 - DNA, 2330 bp, Glycine max
  misc_feature (1)..(2330): Ceres Seq. ID no. 13593967
cagctacgtaggccccccccccgacacactatcctcttaacaaaacacaaaccagtgttcagtgttcagtgttcagtgttcagtgttacacttcacacagacaagaatccaagacaacaagggaaaccagacacatcattaacacacgacacaaacatcctcactactcttccatcttcattaagttaagtccttgtgggtcagggagcattcaagcagtgaggcccaactaattaacctgtttctctttactggatataaggcaattaaaccatgcaaacaccaaagacaagaaatggatcctctgatgtgcctcagaaggtgtctccacgtgctgtacgccaactcaagcctactactctggacattgattctgcatcttctttaagtcaggctactaaatcatcaaaagaaagaagccccaaagtcactgaccgcagatcacccagaagcccagttattgagaggaagcgccctagcaaaatatctgagttggaatctcaaatttctcaactccaaaatgatttgaagaaggtgagggaccagtttatcttgtccgaatcatgcaagaagcaagctcagcaagaagctgaggagtccaaggagcaactattggccctatctgcaaaacctgaagagtcacaaaaacaagttctggatctttgtgctactggagaagctcgtgttcttgagctccagaaaattgtagaagaacgtgatatggcatgccgatctgagcttgaggcctccaaaaagcagctctcagttgagtctgcttccctggcatctgcagcgaatgaaattcagttgctcaaggcgcaacttgaattggttgctaattgtgagagcgtgcaatctcaacatgcagaatcagcagacatggagctactaaaccttaagcagaacttgtcagaaactctttctcttgtggacgccttgaaaaaccaagtaagggattgcaaagagtctgaagctcaggcccaagcattggtcaatgaaactacggtgcaacttgaggccgcaaaaggaactgttgagttcctaagggctgatgttgcaagagctgttgatggctacaactccgttgctttagagttagaccagtctaaagctcgggtgaactcactagaggcacttgttagcaaaattgagaaagaccccatcaataataaatgcatcccttctgaaaatgttgcagatgaccataaatctgagcaccaacctgaaatattgaaagagggagaggatcctaatcagctggaagcagaagttgtttttttgaagtccgaggttgaacaattgagatctgctatagagactgctgagactaaataccaagaggaacagattcgaagcatggtgcagatcaggaatgcatatgagttagtagagcagataaaatctgaatcaggtaagagggaatgtgagctagaggctgagttgaaaaagaagaaagctgatattgaagagttgaaggctaacctaatggacaaggaaactgagttgcaaggcattgtggaggagaatgacaacttgaacctaaagcttgaagagagcatgtcatccaaaaatgagcacaaactcaaaagggaaattaaaagactatcagaatgtgtggcagaactgaaggcggatatgatggacaaggagacaacactgcaaagcatatctgaagagaacgaaatgctgaaatcggaaatcaacaacagtggcaaagcgagagaggaagttgctgctgaagtagagggagccaaggcggcagaacacgaggctctcatgaaacttgggattgtgatggaggaagcagataagagcaacaagaaggctgcaagagtggccgagcagctggaagcggcacaagctgcaaacttggaaatggaagctgaactgagaagactgaaggtgcagtctgatcagtggaggaaggctgcagaggcagctgctgctatgatttcaacagggaacaacaatgggaggctcacagagagaactgtgtctttggataacaacaactatatgtgctcaccctatgctgaagacatggatgatgatttccagaggaagaaaaatggcaacatgctgaagaagattggagtcttgtggaagaagcctcaaaaatagttgtgatgatgtctgatttatgaagtgttctgaaattgtagtccaataaatagtgtgttcatgtcatgtttattactatgtcttttgcaattgtctgacccctacattaccctctgcactgcactgtaaatcctgcccctatctgaaactgtttgtgaactgtacttgaaacattggcgtttaattattgaaygaactaagctyttaac

SEQ ID NO: 7993 - protein, 615 aa, Glycine max
  peptide (1)..(615): Ceres Seq. ID no. 15221271
  misc_feature (70)..(571): Pfam Name: Pfam Description:  Myosin tail
  misc_feature (1)..(615): NCBI GI NO: 18076679 NR Description: P70 protein [Nicotiana tabacum]
  misc_feature (1)..(527): NCBI GI NO: 8885572 NR Description: myosin heavy chain-like [Arabidopsis thaliana]
  misc_feature (7)..(527): NCBI GI NO: 30697347 NR Description: expressed protein [Arabidopsis thaliana]
  misc_feature (37)..(615): NCBI GI NO: 15228082 NR Description: myosin heavy chain -related [Arabidopsis thaliana]
  misc_feature (42)..(615): NCBI GI NO: 8885572 NR Description: myosin heavy chain-like [Arabidopsis thaliana]
  misc_feature (49)..(615): NCBI GI NO: 30697347 NR Description: expressed protein [Arabidopsis thaliana]
  misc_feature (62)..(439): NCBI GI NO: 34908020 NR Description: P0460C04.20
  misc_feature (1)..(403): NCBI GI NO: 22331765 NR Description: expressed protein [Arabidopsis thaliana]
  misc_feature (1)..(403): NCBI GI NO: 11357801 NR Description: hypothetical protein F4P12
  misc_feature (1)..(403): NCBI GI NO: 17978993 NR Description: AT3g53350/F4P12_50 [Arabidopsis thaliana]
MQTPKTRNGSSDVPQKVSPRAVRQLKPTTLDIDSASSLSQATKSSKERSPKVTDRRSPRSPVIERKRPSKISELESQISQLQNDLKKVRDQFILSESCKKQAQQEAEESKEQLLALSAKPEESQKQVLDLCATGEARVLELQKIVEERDMACRSELEASKKQLSVESASLASAANEIQLLKAQLELVANCESVQSQHAESADMELLNLKQNLSETLSLVDALKNQVRDCKESEAQAQALVNETTVQLEAAKGTVEFLRADVARAVDGYNSVALELDQSKARVNSLEALVSKIEKDPINNKCIPSENVADDHKSEHQPEILKEGEDPNQLEAEVVFLKSEVEQLRSAIETAETKYQEEQIRSMVQIRNAYELVEQIKSESGKRECELEAELKKKKADIEELKANLMDKETELQGIVEENDNLNLKLEESMSSKNEHKLKREIKRLSECVAELKADMMDKETTLQSISEENEMLKSEINNSGKAREEVAAEVEGAKAAEHEALMKLGIVMEEADKSNKKAARVAEQLEAAQAANLEMEAELRRLKVQSDQWRKAAEAAAAMISTGNNNGRLTERTVSLDNNNYMCSPYAEDMDDDFQRKKNGNMLKKIGVLWKKPQK

SEQ ID NO: 7994 - protein, 466 aa, Glycine max
  peptide (1)..(466): Ceres Seq. ID no. 15221272
  misc_feature (1)..(422): Pfam Name: Pfam Description:  Myosin tail
  misc_feature (1)..(466): NCBI GI NO: 18076679 NR Description: P70 protein [Nicotiana tabacum]
  misc_feature (1)..(378): NCBI GI NO: 8885572 NR Description: myosin heavy chain-like [Arabidopsis thaliana]
  misc_feature (1)..(378): NCBI GI NO: 30697347 NR Description: expressed protein [Arabidopsis thaliana]
  misc_feature (1)..(466): NCBI GI NO: 15228082 NR Description: myosin heavy chain -related [Arabidopsis thaliana]
  misc_feature (1)..(466): NCBI GI NO: 8885572 NR Description: myosin heavy chain-like [Arabidopsis thaliana]
  misc_feature (1)..(466): NCBI GI NO: 30697347 NR Description: expressed protein [Arabidopsis thaliana]
  misc_feature (1)..(290): NCBI GI NO: 34908020 NR Description: P0460C04.20
  misc_feature (1)..(254): NCBI GI NO: 22331765 NR Description: expressed protein [Arabidopsis thaliana]
  misc_feature (1)..(254): NCBI GI NO: 11357801 NR Description: hypothetical protein F4P12
  misc_feature (1)..(254): NCBI GI NO: 17978993 NR Description: AT3g53350/F4P12_50 [Arabidopsis thaliana]
MACRSELEASKKQLSVESASLASAANEIQLLKAQLELVANCESVQSQHAESADMELLNLKQNLSETLSLVDALKNQVRDCKESEAQAQALVNETTVQLEAAKGTVEFLRADVARAVDGYNSVALELDQSKARVNSLEALVSKIEKDPINNKCIPSENVADDHKSEHQPEILKEGEDPNQLEAEVVFLKSEVEQLRSAIETAETKYQEEQIRSMVQIRNAYELVEQIKSESGKRECELEAELKKKKADIEELKANLMDKETELQGIVEENDNLNLKLEESMSSKNEHKLKREIKRLSECVAELKADMMDKETTLQSISEENEMLKSEINNSGKAREEVAAEVEGAKAAEHEALMKLGIVMEEADKSNKKAARVAEQLEAAQAANLEMEAELRRLKVQSDQWRKAAEAAAAMISTGNNNGRLTERTVSLDNNNYMCSPYAEDMDDDFQRKKNGNMLKKIGVLWKKPQK

SEQ ID NO: 7995 - protein, 413 aa, Glycine max
  peptide (1)..(413): Ceres Seq. ID no. 15221273
  misc_feature (1)..(369): Pfam Name: Pfam Description:  Myosin tail
  misc_feature (1)..(413): NCBI GI NO: 18076679 NR Description: P70 protein [Nicotiana tabacum]
  misc_feature (1)..(325): NCBI GI NO: 8885572 NR Description: myosin heavy chain-like [Arabidopsis thaliana]
  misc_feature (1)..(325): NCBI GI NO: 30697347 NR Description: expressed protein [Arabidopsis thaliana]
  misc_feature (1)..(413): NCBI GI NO: 15228082 NR Description: myosin heavy chain -related [Arabidopsis thaliana]
  misc_feature (1)..(413): NCBI GI NO: 8885572 NR Description: myosin heavy chain-like [Arabidopsis thaliana]
  misc_feature (1)..(413): NCBI GI NO: 30697347 NR Description: expressed protein [Arabidopsis thaliana]
  misc_feature (1)..(237): NCBI GI NO: 34908020 NR Description: P0460C04.20
  misc_feature (1)..(201): NCBI GI NO: 22331765 NR Description: expressed protein [Arabidopsis thaliana]
  misc_feature (1)..(201): NCBI GI NO: 11357801 NR Description: hypothetical protein F4P12
  misc_feature (1)..(201): NCBI GI NO: 17978993 NR Description: AT3g53350/F4P12_50 [Arabidopsis thaliana]
MELLNLKQNLSETLSLVDALKNQVRDCKESEAQAQALVNETTVQLEAAKGTVEFLRADVARAVDGYNSVALELDQSKARVNSLEALVSKIEKDPINNKCIPSENVADDHKSEHQPEILKEGEDPNQLEAEVVFLKSEVEQLRSAIETAETKYQEEQIRSMVQIRNAYELVEQIKSESGKRECELEAELKKKKADIEELKANLMDKETELQGIVEENDNLNLKLEESMSSKNEHKLKREIKRLSECVAELKADMMDKETTLQSISEENEMLKSEINNSGKAREEVAAEVEGAKAAEHEALMKLGIVMEEADKSNKKAARVAEQLEAAQAANLEMEAELRRLKVQSDQWRKAAEAAAAMISTGNNNGRLTERTVSLDNNNYMCSPYAEDMDDDFQRKKNGNMLKKIGVLWKKPQK

SEQ ID NO: 7996 - DNA, 1766 bp, Glycine max
  misc_feature (1)..(1766): Ceres Seq. ID no. 15175785
ggtatcttacttactgctgtctgctaaacttgattttttgtttactctttcttgcttccttcatatttatattatattattattttgcccacatttcttcttcaacgactacactctctctcaaccttcaaagcttcaaactcaaaagaaatggcatccgatcccgagcaacccgctcattcctctttcgcaaaggaagcaaggtcaggtggtgagattgggagtgcaatagagcctctgcttaatggggttcatgactctgaaagctattccgtctctgctgcaattctcccatttctcttcccagctttgggtggcctactatttggctatgatattggtgccacatcttctgcaactatttccattcagtcaccaacactaagtggagtatcttggtacaagttgtcttctgttgaaattggtcttcttactagtggatcattgtatggtgccttaattggctccttgttggccttcaatgttgctgacttcttaggtagaagaaaggagctgattggagctgcagtagtttatcttgttggagctcttgtaacagcattagctcctaattttcttgtattggtgcttgggagacttgtatttggcataggaattggactggcaatgcatgctgctccaatgtacattgcagagacagctccaacaccaatacgtggacaactaatatctctaaaagagttctttatagtacttgggatggttgcaggatatggaattggtagcttgttcgtcgaaaccgtatctgggtggcggtatatgtatggagttagtagtcctgtggcaataatcatgggagttggaatgtggtggctcccagcttctcctagatggttacttttacgtgctatacagggaaaaggggatgttcagaattcaaaagacatagcaattcgtagtttgtgtcagcttcgaggtcaagctttttatgattcagttcctcggcaagtagatgagattctggcagaactttcttatctaggtgaagaaaaagaagctacctttggagaactattccaaggaaaatgcttgaaagccctttggattggttcaggattggtcttgtttcagcagatcacagggcaaccaagtgtgctctactatgctggatcaatctttcagagtgcaggattctccggagcatctgatgcaacccgagtctctattctccttgggtttttcaagttgattatgactggagttgctgttgtcgttgttgataaacttggaaggaggcctttactacttgggggagtttcagggatagtgatctctttattctttctcggttcatattacattttcttggataattcaccagttgttgctgtaattggtctgctgttgtacgttggcagttatcagatttcctttggtccaattggttggttaatgatagcagagattttccccttgcgcctaagaggtcgaggactaagtatagctgtactcgtcaattttggtgcaaatgccctggtgacatttgctttttccccactgaaggcattattgggagctggaattttgttttacacattttgtgtaatagccgtggcatctcttgtattcatatactttgttataccagaaaccaaggggcttacactagaggagatcgaggccaaatgcctctagtcagtcaccttgttttacctctataaatatctgtttttagtactctgttgcaacttgtcttgaatattgtaatgacacatatattatattaataaaaatatgcaatgatg

SEQ ID NO: 7997 - protein, 501 aa, Glycine max
  peptide (1)..(501): Ceres Seq. ID no. 15175786
  misc_feature (48)..(500): Pfam Name: and other Pfam Description: Sugar
  misc_feature (1)..(501): NCBI GI NO: 30678759 NR Description: sugar transporter family [Arabidopsis thaliana]
  misc_feature (1)..(498): NCBI GI NO: 37537174 NR Description: putative sugar transporter protein
  misc_feature (13)..(501): NCBI GI NO: 9759246 NR Description: sugar transporter-like protein
  misc_feature (1)..(316): NCBI GI NO: 30686148 NR Description: sugar transporter family [Arabidopsis thaliana]
  misc_feature (422)..(501): NCBI GI NO: 30686148 NR Description: sugar transporter family [Arabidopsis thaliana]
  misc_feature (347)..(379): NCBI GI NO: 30686148 NR Description: sugar transporter family [Arabidopsis thaliana]
  misc_feature (1)..(316): NCBI GI NO: 15237892 NR Description: sugar transporter family [Arabidopsis thaliana]
  misc_feature (422)..(501): NCBI GI NO: 15237892 NR Description: sugar transporter family [Arabidopsis thaliana]
  misc_feature (347)..(379): NCBI GI NO: 15237892 NR Description: sugar transporter family [Arabidopsis thaliana]
  misc_feature (194)..(501): NCBI GI NO: 15237848 NR Description: sugar transporter family [Arabidopsis thaliana]
MASDPEQPAHSSFAKEARSGGEIGSAIEPLLNGVHDSESYSVSAAILPFLFPALGGLLFGYDIGATSSATISIQSPTLSGVSWYKLSSVEIGLLTSGSLYGALIGSLLAFNVADFLGRRKELIGAAVVYLVGALVTALAPNFLVLVLGRLVFGIGIGLAMHAAPMYIAETAPTPIRGQLISLKEFFIVLGMVAGYGIGSLFVETVSGWRYMYGVSSPVAIIMGVGMWWLPASPRWLLLRAIQGKGDVQNSKDIAIRSLCQLRGQAFYDSVPRQVDEILAELSYLGEEKEATFGELFQGKCLKALWIGSGLVLFQQITGQPSVLYYAGSIFQSAGFSGASDATRVSILLGFFKLIMTGVAVVVVDKLGRRPLLLGGVSGIVISLFFLGSYYIFLDNSPVVAVIGLLLYVGSYQISFGPIGWLMIAEIFPLRLRGRGLSIAVLVNFGANALVTFAFSPLKALLGAGILFYTFCVIAVASLVFIYFVIPETKGLTLEEIEAKCL

SEQ ID NO: 7998 - protein, 342 aa, Glycine max
  peptide (1)..(342): Ceres Seq. ID no. 15175787
  misc_feature (1)..(341): Pfam Name: and other Pfam Description: Sugar
  misc_feature (1)..(342): NCBI GI NO: 30678759 NR Description: sugar transporter family [Arabidopsis thaliana]
  misc_feature (1)..(339): NCBI GI NO: 37537174 NR Description: putative sugar transporter protein
  misc_feature (1)..(342): NCBI GI NO: 9759246 NR Description: sugar transporter-like protein
  misc_feature (1)..(157): NCBI GI NO: 30686148 NR Description: sugar transporter family [Arabidopsis thaliana]
  misc_feature (263)..(342): NCBI GI NO: 30686148 NR Description: sugar transporter family [Arabidopsis thaliana]
  misc_feature (188)..(220): NCBI GI NO: 30686148 NR Description: sugar transporter family [Arabidopsis thaliana]
  misc_feature (1)..(157): NCBI GI NO: 15237892 NR Description: sugar transporter family [Arabidopsis thaliana]
  misc_feature (263)..(342): NCBI GI NO: 15237892 NR Description: sugar transporter family [Arabidopsis thaliana]
  misc_feature (188)..(220): NCBI GI NO: 15237892 NR Description: sugar transporter family [Arabidopsis thaliana]
  misc_feature (35)..(342): NCBI GI NO: 15237848 NR Description: sugar transporter family [Arabidopsis thaliana]
MHAAPMYIAETAPTPIRGQLISLKEFFIVLGMVAGYGIGSLFVETVSGWRYMYGVSSPVAIIMGVGMWWLPASPRWLLLRAIQGKGDVQNSKDIAIRSLCQLRGQAFYDSVPRQVDEILAELSYLGEEKEATFGELFQGKCLKALWIGSGLVLFQQITGQPSVLYYAGSIFQSAGFSGASDATRVSILLGFFKLIMTGVAVVVVDKLGRRPLLLGGVSGIVISLFFLGSYYIFLDNSPVVAVIGLLLYVGSYQISFGPIGWLMIAEIFPLRLRGRGLSIAVLVNFGANALVTFAFSPLKALLGAGILFYTFCVIAVASLVFIYFVIPETKGLTLEEIEAKCL

SEQ ID NO: 7999 - protein, 337 aa, Glycine max
  peptide (1)..(337): Ceres Seq. ID no. 15175788
  misc_feature (1)..(336): Pfam Name: and other Pfam Description: Sugar
  misc_feature (1)..(337): NCBI GI NO: 30678759 NR Description: sugar transporter family [Arabidopsis thaliana]
  misc_feature (1)..(334): NCBI GI NO: 37537174 NR Description: putative sugar transporter protein
  misc_feature (1)..(337): NCBI GI NO: 9759246 NR Description: sugar transporter-like protein
  misc_feature (1)..(152): NCBI GI NO: 30686148 NR Description: sugar transporter family [Arabidopsis thaliana]
  misc_feature (258)..(337): NCBI GI NO: 30686148 NR Description: sugar transporter family [Arabidopsis thaliana]
  misc_feature (183)..(215): NCBI GI NO: 30686148 NR Description: sugar transporter family [Arabidopsis thaliana]
  misc_feature (1)..(152): NCBI GI NO: 15237892 NR Description: sugar transporter family [Arabidopsis thaliana]
  misc_feature (258)..(337): NCBI GI NO: 15237892 NR Description: sugar transporter family [Arabidopsis thaliana]
  misc_feature (183)..(215): NCBI GI NO: 15237892 NR Description: sugar transporter family [Arabidopsis thaliana]
  misc_feature (30)..(337): NCBI GI NO: 15237848 NR Description: sugar transporter family [Arabidopsis thaliana]
MYIAETAPTPIRGQLISLKEFFIVLGMVAGYGIGSLFVETVSGWRYMYGVSSPVAIIMGVGMWWLPASPRWLLLRAIQGKGDVQNSKDIAIRSLCQLRGQAFYDSVPRQVDEILAELSYLGEEKEATFGELFQGKCLKALWIGSGLVLFQQITGQPSVLYYAGSIFQSAGFSGASDATRVSILLGFFKLIMTGVAVVVVDKLGRRPLLLGGVSGIVISLFFLGSYYIFLDNSPVVAVIGLLLYVGSYQISFGPIGWLMIAEIFPLRLRGRGLSIAVLVNFGANALVTFAFSPLKALLGAGILFYTFCVIAVASLVFIYFVIPETKGLTLEEIEAKCL

SEQ ID NO: 8000 - DNA, 1110 bp, Glycine max
  misc_feature (1)..(1110): Ceres Seq. ID no. 15168436
cctatcaaatccaaacactgccttaagcctttgattcccaaatcctcccttcctctcccattgcacagtgatcgttgcgatccatgacgacaccaccgtcttcctcctcagcttcgcaatcgcagttcgcctattcaaacccctcctcctcctcctcctacttccccgttccctttcaccttcagcaacccgcaaccactcactacgctgcgccctacgtcgccgccccctccgtgcaaatccccgctcctccagtcgtcggccccgttgcgcccgcccctgtacccggcgtatactccgccgtgccgcaatatcaggcacagcagttatttgagagggatgcgcagataataacgccggaggctctcgagaatgtcaaggcagcgattgcaagcagcgacgtggagcacaaaaccgatgccaaaaagaaagcggttcctcgcaaagctgctggccacgcttgggaggatcctatccttgcagagtggccagaagatgattatcggctcttctgtggggatcttggtaacgaggtgaatgatgatgttctctcaaaagcattttcacgatttccttcctttaacatggcacgagttgtcagagacaagcggactggtaaaacaaaaggttatggatttgtgagctttgccaatccttctgaccttgctggtgctcttaaagaaatgaatggtaagtatgttggaaaccgtcctataaaactacgcaagagtaagtggagggagaggacagattatgaagcactggagaaacagaagaatcacattcaaaagaaaccgaaaatggcaaggaaaggtgtgctgcacaagtgacaggctggaatctgtgtaaatcaggttaactaagtagagaacactttacaaatgctatttcttttttccatctgaaaggtatttcccatgtaaccgaaaaaagcccccccaagacattcctttcccgtttgcaaaatactatagttgttattttaaagtgtatgatgtatgcccaataccaaaaaaccttatttatgtttacatttcaggaatttgtggcagtcgtttaatacagcatgaggaaggaactcagaaaatgtataaaatttgattgactggc

SEQ ID NO: 8001 - protein, 248 aa, Glycine max
  peptide (1)..(248): Ceres Seq. ID no. 15168437
  misc_feature (142)..(213): Pfam Name: a.k.a. RRM, RBD, or RNP domain Pfam Description: RNA recognition motif.
  misc_feature (1)..(248): NCBI GI NO: 15229308 NR Description: RNA recognition motif (RRM)-containing protein
  misc_feature (42)..(231): NCBI GI NO: 2098575 NR Description: F25451_2 [Homo sapiens]
  misc_feature (42)..(231): NCBI GI NO: 12804031 NR Description: Unknown (protein for MGC:10433) [Homo sapiens]
  misc_feature (42)..(231): NCBI GI NO: 21359951 NR Description: hypothetical protein MGC10433 [Homo sapiens]
  misc_feature (42)..(231): NCBI GI NO: 21594922 NR Description: hypothetical protein MGC10433 [Homo sapiens]
  misc_feature (42)..(231): NCBI GI NO: 34855705 NR Description: similar to RIKEN cDNA 3100004P22
  misc_feature (42)..(231): NCBI GI NO: 19526864 NR Description: RIKEN cDNA 3100004P22 [Mus musculus]
  misc_feature (42)..(235): NCBI GI NO: 21357051 NR Description: CG2931-PA [Drosophila melanogaster]
  misc_feature (1)..(237): NCBI GI NO: 17556216 NR Description: protein conserved like (3G242)
  misc_feature (1)..(237): NCBI GI NO: 39582665 NR Description: Hypothetical protein CBG21313
MTTPPSSSSASQSQFAYSNPSSSSSYFPVPFHLQQPATTHYAAPYVAAPSVQIPAPPVVGPVAPAPVPGVYSAVPQYQAQQLFERDAQIITPEALENVKAAIASSDVEHKTDAKKKAVPRKAAGHAWEDPILAEWPEDDYRLFCGDLGNEVNDDVLSKAFSRFPSFNMARVVRDKRTGKTKGYGFVSFANPSDLAGALKEMNGKYVGNRPIKLRKSKWRERTDYEALEKQKNHIQKKPKMARKGVLHK

SEQ ID NO: 8002 - DNA, 1321 bp, Glycine max
  misc_feature (1)..(1321): Ceres Seq. ID no. 15168549
ttttttgtcgtgagatgtttgttgacagctgctaccattctcctattgttttatgaattttggaaggaaaaatagtaataagagagagagatgagcgttgtaataggggttgggttggctcacatgtcccagtctctttccaactctactagtctaagtttgtaactcttgttgattccaaagttgcacaccacactcaacttaccgttccttttcctctcccataaaaccagcaagcaactcactcccacactcaccccagtcaagagagagaatgtcgaaggaagtgagccaagaaggcctgcagaggaaggactacgtagaccctcctccagcccctcttttcgaccttgccgagatcaagctctggtccttctacagagccctcatcgccgagttcattgcctcactcctcttcctctacgtcaccgtcgccaccatcatcggccacaagaaacagaccggaccatgcgacggcgttggccttctcggcatcgcatggtccttcggtggcatgatcttcgtcctcgtctactgcaccgccggcatttctggtggacacatcaaccctgcggtgacttttggcctgttcctggcccgcaaggtgtctctcattcgcgccgtgttctacatggtagcacagtgtcttggtgccatctgcggtgttgggttggtgaaggccttcatgaagcactcctacaactccctcggcggcggtgctaactccgtcagcgcaggctacaacaaaggcagtgctctgggtgctgagattatcggcactttcgtccttgtctacaccgttttctcagctaccgaccccaagagaagcgcgcgtgactcccatgtccccgtgttggccccattgcccattgggtttgccgttttcatggttcacttggccaccattcccatcaccggtaccgggatcaacccagccaggagcttgggtgcagctgttatctacaacaatggcaaagtttgggacgagcattggatattctgggttgggccattggtgggagctttggcggcggcggcataccaccagtacatccttagagcaggggctattaaggccttgggttcattcaggagcaaccctaccaactagttcccaagacaatgtcatcatcaccaattcgcctcttcttttctatttatttcttttgtttgtatgagagatcatcatgcccttgtgtatggggataattcgtctttttttcttcttccttccttttatctccccgcctgtctcatttgtccgttcgcttacacttctaaccaaaattcccgtgaacacaacccacagggtttgctgtcg

SEQ ID NO: 8003 - protein, 278 aa, Glycine max
  peptide (1)..(278): Ceres Seq. ID no. 15168550
  misc_feature (28)..(257): Pfam Name: Pfam Description:  Major intrinsic protein
  misc_feature (1)..(278): NCBI GI NO: 8071628 NR Description: putative aquaporin PIP2-2
  misc_feature (1)..(278): NCBI GI NO: 15227302 NR Description: putative plasma membrane intrinsic protein
  misc_feature (1)..(278): NCBI GI NO: 11119335 NR Description: aquaporin [Brassica oleracea]
  misc_feature (1)..(278): NCBI GI NO: 15236267 NR Description: aquaporin, putative [Arabidopsis thaliana]
  misc_feature (1)..(278): NCBI GI NO: 17940742 NR Description: aquaporin-like protein [Petunia x hybrida]
  misc_feature (1)..(278): NCBI GI NO: 1688296 NR Description: plasma membrane intrinsic protein PIP3
  misc_feature (1)..(278): NCBI GI NO: 2306917 NR Description: plasma membrane intrinsic protein
  misc_feature (1)..(278): NCBI GI NO: 7441276 NR Description: mipE protein - common ice plant
  misc_feature (1)..(278): NCBI GI NO: 1168480 NR Description: Aquaporin PIP-type
  misc_feature (1)..(278): NCBI GI NO: 7441266 NR Description: plasma membrane major intrinsic protein 2 - beet
MSKEVSQEGLQRKDYVDPPPAPLFDLAEIKLWSFYRALIAEFIASLLFLYVTVATIIGHKKQTGPCDGVGLLGIAWSFGGMIFVLVYCTAGISGGHINPAVTFGLFLARKVSLIRAVFYMVAQCLGAICGVGLVKAFMKHSYNSLGGGANSVSAGYNKGSALGAEIIGTFVLVYTVFSATDPKRSARDSHVPVLAPLPIGFAVFMVHLATIPITGTGINPARSLGAAVIYNNGKVWDEHWIFWVGPLVGALAAAAYHQYILRAGAIKALGSFRSNPTN

SEQ ID NO: 8004 - protein, 198 aa, Glycine max
  peptide (1)..(198): Ceres Seq. ID no. 15168551
  misc_feature (1)..(177): Pfam Name: Pfam Description:  Major intrinsic protein
  misc_feature (1)..(198): NCBI GI NO: 8071628 NR Description: putative aquaporin PIP2-2
  misc_feature (1)..(198): NCBI GI NO: 15227302 NR Description: putative plasma membrane intrinsic protein
  misc_feature (1)..(198): NCBI GI NO: 11119335 NR Description: aquaporin [Brassica oleracea]
  misc_feature (1)..(198): NCBI GI NO: 15236267 NR Description: aquaporin, putative [Arabidopsis thaliana]
  misc_feature (1)..(198): NCBI GI NO: 17940742 NR Description: aquaporin-like protein [Petunia x hybrida]
  misc_feature (1)..(198): NCBI GI NO: 1688296 NR Description: plasma membrane intrinsic protein PIP3
  misc_feature (1)..(198): NCBI GI NO: 2306917 NR Description: plasma membrane intrinsic protein
  misc_feature (1)..(198): NCBI GI NO: 7441276 NR Description: mipE protein - common ice plant
  misc_feature (1)..(198): NCBI GI NO: 1168480 NR Description: Aquaporin PIP-type
  misc_feature (1)..(198): NCBI GI NO: 7441266 NR Description: plasma membrane major intrinsic protein 2 - beet
MIFVLVYCTAGISGGHINPAVTFGLFLARKVSLIRAVFYMVAQCLGAICGVGLVKAFMKHSYNSLGGGANSVSAGYNKGSALGAEIIGTFVLVYTVFSATDPKRSARDSHVPVLAPLPIGFAVFMVHLATIPITGTGINPARSLGAAVIYNNGKVWDEHWIFWVGPLVGALAAAAYHQYILRAGAIKALGSFRSNPTN

SEQ ID NO: 8005 - protein, 159 aa, Glycine max
  peptide (1)..(159): Ceres Seq. ID no. 15168552
  misc_feature (1)..(138): Pfam Name: Pfam Description:  Major intrinsic protein
  misc_feature (1)..(159): NCBI GI NO: 8071628 NR Description: putative aquaporin PIP2-2
  misc_feature (1)..(159): NCBI GI NO: 15227302 NR Description: putative plasma membrane intrinsic protein
  misc_feature (1)..(159): NCBI GI NO: 11119335 NR Description: aquaporin [Brassica oleracea]
  misc_feature (1)..(159): NCBI GI NO: 15236267 NR Description: aquaporin, putative [Arabidopsis thaliana]
  misc_feature (1)..(159): NCBI GI NO: 17940742 NR Description: aquaporin-like protein [Petunia x hybrida]
  misc_feature (1)..(159): NCBI GI NO: 1688296 NR Description: plasma membrane intrinsic protein PIP3
  misc_feature (1)..(159): NCBI GI NO: 2306917 NR Description: plasma membrane intrinsic protein
  misc_feature (1)..(159): NCBI GI NO: 7441276 NR Description: mipE protein - common ice plant
  misc_feature (1)..(159): NCBI GI NO: 1168480 NR Description: Aquaporin PIP-type
  misc_feature (1)..(159): NCBI GI NO: 7441266 NR Description: plasma membrane major intrinsic protein 2 - beet
MVAQCLGAICGVGLVKAFMKHSYNSLGGGANSVSAGYNKGSALGAEIIGTFVLVYTVFSATDPKRSARDSHVPVLAPLPIGFAVFMVHLATIPITGTGINPARSLGAAVIYNNGKVWDEHWIFWVGPLVGALAAAAYHQYILRAGAIKALGSFRSNPTN

SEQ ID NO: 8006 - DNA, 1764 bp, Glycine max
  misc_feature (1)..(1764): Ceres Seq. ID no. 15168405
atttttctttttctattctttgcttcagtggccttaccagtgtgttgctcactgagaaaccaccaattttcagcatgacaaagataagtcctgaagttgaaatcaggatgccaatggaggcatttccaccagtttcagctgatgtgagctttatttctaatagttttccgaaatacaaactggatgttgataatcaagttctggaagagccagttgaggataacctgggtccttctttgaaggatgttattgaacaagaagctttcaatttgtcagaccaacacaagcgtatctcagttcgtgaccttgccagtaaatttgacaagaacttggctgcagctgctaagttgtctaatgaggcaaagctgagagaggtggcatctttggagggacatgttcttttgaaaaagctaagagatgcattagaaaatttaagaggacgttttgcaggaataaacaaagaggatgtggagaaagctatctctatggtggaagctttagcagttaagttaactcaaaacgaaggtgaattgattcaagagaagtttgaagtgaagaagcttgtaaactttctcaaacaggcttctgaagatgctaaaaagttggttaatcaagagaagtcttttgcttgtgccgaaattgaaagtgctagagctgtggtgctgagaattggggaggcgcttgaagaacaagaaaaagcttcccaagcttctaaaccacaggatgtggatggactaattgaagaagttcaagaagctagaagaatcaaattgttgcatcagccaagcaaggtgatggccatggaatatgaactacgtgctcttagggatcaaattcgagagaaatctatattttcaattaagcttcagaaagagctaaccatgagcaagagggatgaggaaaataaatctcgtttatacatgttagatggttctgaagctttgggttcatatctgcgagtccagccttgctcagctgaagtgccacaggtttcgaaatgttcatttcagtggtatcgcttgtcttctgaaggcagctggagggaagttatttcaggtgccaacaaaacaatatatgctcctgacccctctgatgttgggagaatcttacaagtagatattgtctcaaatgggaaaaaacttaccctaacaactgatcccattcaaactgtttcaggacttggaagccatgtggagacacttctacgaaaatctaataccgattttaatgtagttatttctcaaatgaatggaaaagatcactcttcacattctactcattcatttaatgtggggagaatgaggataaagctatgcagaggttggattacaaaagcaagagagatttactccccatcaatgcagctatgtggagttagaagtgatatcgctaatgcagcgaaggcgttgttttggcaagcaagaaagggcctctcatttgtattaacctttgaatcagagagagacagaaatgcagccattatggttgccaggaaatatgctcttgattgcaatgtcgtgctcgctgggccagatgatctagtgtaggagcaaaatttaactgactgagtttttccatcaaacgtgagatttatcagattcttggtgtgagtatacatgtgtgcttgttttgttaaagatatgatttcatctttgtgattgggtttcactaattgagttgcattgttttaggcatgttttttatttgcctaatcatgttgtaccaaactcaactttttataattattagttcatttgttcaaag

SEQ ID NO: 8007 - protein, 514 aa, Glycine max
  peptide (1)..(514): Ceres Seq. ID no. 15168406
  misc_feature (120)..(253): Pfam Name: Pfam Description:  Transcription factor AP-2
  misc_feature (25)..(512): NCBI GI NO: 30694458 NR Description: expressed protein [Arabidopsis thaliana]
  misc_feature (25)..(509): NCBI GI NO: 11358381 NR Description: hypothetical protein T5P19
  misc_feature (25)..(512): NCBI GI NO: 15225786 NR Description: expressed protein [Arabidopsis thaliana]
  misc_feature (25)..(514): NCBI GI NO: 34909052 NR Description: P0034E02.39
  misc_feature (25)..(455): NCBI GI NO: 7487240 NR Description: hypothetical protein At2g40820
  misc_feature (25)..(455): NCBI GI NO: 30688418 NR Description: proline-rich protein family [Arabidopsis thaliana]
  misc_feature (452)..(505): NCBI GI NO: 7487240 NR Description: hypothetical protein At2g40820
  misc_feature (452)..(505): NCBI GI NO: 30688418 NR Description: proline-rich protein family [Arabidopsis thaliana]
  misc_feature (49)..(512): NCBI GI NO: 33146645 NR Description: hypothetical protein
  misc_feature (49)..(361): NCBI GI NO: 34904752 NR Description: hypothetical protein~similar to Arabidopsisthaliana chromosome 2
FSFSILCFSGLTSVLLTEKPPIFSMTKISPEVEIRMPMEAFPPVSADVSFISNSFPKYKLDVDNQVLEEPVEDNLGPSLKDVIEQEAFNLSDQHKRISVRDLASKFDKNLAAAAKLSNEAKLREVASLEGHVLLKKLRDALENLRGRFAGINKEDVEKAISMVEALAVKLTQNEGELIQEKFEVKKLVNFLKQASEDAKKLVNQEKSFACAEIESARAVVLRIGEALEEQEKASQASKPQDVDGLIEEVQEARRIKLLHQPSKVMAMEYELRALRDQIREKSIFSIKLQKELTMSKRDEENKSRLYMLDGSEALGSYLRVQPCSAEVPQVSKCSFQWYRLSSEGSWREVISGANKTIYAPDPSDVGRILQVDIVSNGKKLTLTTDPIQTVSGLGSHVETLLRKSNTDFNVVISQMNGKDHSSHSTHSFNVGRMRIKLCRGWITKAREIYSPSMQLCGVRSDIANAAKALFWQARKGLSFVLTFESERDRNAAIMVARKYALDCNVVLAGPDDLV

SEQ ID NO: 8008 - protein, 490 aa, Glycine max
  peptide (1)..(490): Ceres Seq. ID no. 15168407
  misc_feature (96)..(229): Pfam Name: Pfam Description:  Transcription factor AP-2
  misc_feature (1)..(488): NCBI GI NO: 30694458 NR Description: expressed protein [Arabidopsis thaliana]
  misc_feature (1)..(485): NCBI GI NO: 11358381 NR Description: hypothetical protein T5P19
  misc_feature (1)..(488): NCBI GI NO: 15225786 NR Description: expressed protein [Arabidopsis thaliana]
  misc_feature (1)..(490): NCBI GI NO: 34909052 NR Description: P0034E02.39
  misc_feature (1)..(431): NCBI GI NO: 7487240 NR Description: hypothetical protein At2g40820
  misc_feature (1)..(431): NCBI GI NO: 30688418 NR Description: proline-rich protein family [Arabidopsis thaliana]
  misc_feature (428)..(481): NCBI GI NO: 7487240 NR Description: hypothetical protein At2g40820
  misc_feature (428)..(481): NCBI GI NO: 30688418 NR Description: proline-rich protein family [Arabidopsis thaliana]
  misc_feature (25)..(488): NCBI GI NO: 33146645 NR Description: hypothetical protein
  misc_feature (25)..(337): NCBI GI NO: 34904752 NR Description: hypothetical protein~similar to Arabidopsisthaliana chromosome 2
MTKISPEVEIRMPMEAFPPVSADVSFISNSFPKYKLDVDNQVLEEPVEDNLGPSLKDVIEQEAFNLSDQHKRISVRDLASKFDKNLAAAAKLSNEAKLREVASLEGHVLLKKLRDALENLRGRFAGINKEDVEKAISMVEALAVKLTQNEGELIQEKFEVKKLVNFLKQASEDAKKLVNQEKSFACAEIESARAVVLRIGEALEEQEKASQASKPQDVDGLIEEVQEARRIKLLHQPSKVMAMEYELRALRDQIREKSIFSIKLQKELTMSKRDEENKSRLYMLDGSEALGSYLRVQPCSAEVPQVSKCSFQWYRLSSEGSWREVISGANKTIYAPDPSDVGRILQVDIVSNGKKLTLTTDPIQTVSGLGSHVETLLRKSNTDFNVVISQMNGKDHSSHSTHSFNVGRMRIKLCRGWITKAREIYSPSMQLCGVRSDIANAAKALFWQARKGLSFVLTFESERDRNAAIMVARKYALDCNVVLAGPDDLV

SEQ ID NO: 8009 - protein, 479 aa, Glycine max
  peptide (1)..(479): Ceres Seq. ID no. 15168408
  misc_feature (85)..(218): Pfam Name: Pfam Description:  Transcription factor AP-2
  misc_feature (1)..(477): NCBI GI NO: 30694458 NR Description: expressed protein [Arabidopsis thaliana]
  misc_feature (1)..(474): NCBI GI NO: 11358381 NR Description: hypothetical protein T5P19
  misc_feature (1)..(477): NCBI GI NO: 15225786 NR Description: expressed protein [Arabidopsis thaliana]
  misc_feature (1)..(479): NCBI GI NO: 34909052 NR Description: P0034E02.39
  misc_feature (1)..(420): NCBI GI NO: 7487240 NR Description: hypothetical protein At2g40820
  misc_feature (1)..(420): NCBI GI NO: 30688418 NR Description: proline-rich protein family [Arabidopsis thaliana]
  misc_feature (417)..(470): NCBI GI NO: 7487240 NR Description: hypothetical protein At2g40820
  misc_feature (417)..(470): NCBI GI NO: 30688418 NR Description: proline-rich protein family [Arabidopsis thaliana]
  misc_feature (14)..(477): NCBI GI NO: 33146645 NR Description: hypothetical protein
  misc_feature (14)..(326): NCBI GI NO: 34904752 NR Description: hypothetical protein~similar to Arabidopsisthaliana chromosome 2
MPMEAFPPVSADVSFISNSFPKYKLDVDNQVLEEPVEDNLGPSLKDVIEQEAFNLSDQHKRISVRDLASKFDKNLAAAAKLSNEAKLREVASLEGHVLLKKLRDALENLRGRFAGINKEDVEKAISMVEALAVKLTQNEGELIQEKFEVKKLVNFLKQASEDAKKLVNQEKSFACAEIESARAVVLRIGEALEEQEKASQASKPQDVDGLIEEVQEARRIKLLHQPSKVMAMEYELRALRDQIREKSIFSIKLQKELTMSKRDEENKSRLYMLDGSEALGSYLRVQPCSAEVPQVSKCSFQWYRLSSEGSWREVISGANKTIYAPDPSDVGRILQVDIVSNGKKLTLTTDPIQTVSGLGSHVETLLRKSNTDFNVVISQMNGKDHSSHSTHSFNVGRMRIKLCRGWITKAREIYSPSMQLCGVRSDIANAAKALFWQARKGLSFVLTFESERDRNAAIMVARKYALDCNVVLAGPDDLV

SEQ ID NO: 8010 - DNA, 1680 bp, Glycine max
  misc_feature (1)..(1680): Ceres Seq. ID no. 14312196
aaaaattcagagagaactgtccaccctttttcgtttttctccttattacagaccccccttaattgatggtgctctgtatcccctttttcttctgcaagaactacaccaactaaaacctccttcttctttttttttttttttttttggaggctggtgtgtgtttttctttttcttcttcttcttcttccaatccttaaggaaaaaaactaaagaaaaaaaagtgagccatgtcaggcttgtataatcccaacttctctcctgctagagcagcttctcctcagattaggagcaatccagaagtggacagtcagtacctatcagagttgctggcagaacatcagaagcttggacccttcatgcaagtgcttcccatatgcagccgcctcctaaatcaagaaatattaagggtttctggaatgttgtccaatcaaggttttggtgacttcgatagactgcgacatagaagccctagtcctatggcttcttcaaaccttatgtccaatgtcagtgggactgggttgggtggatggaatagtctccagcaagagagattatgtggaccccctggaatgacgatggactggcaaagtgctcctgcaagtcctagttcgttcactgttaagagaatcttgcgcttggaaattccagtagatacatatcccaatttcaattttgttggaagacttctgggccctagaggcaattctttgaaacgggtagaagctacaactggttgtcgtgtgtatattagaggaaaaggatcgataaaggatccagacaaggaagagaaattacgaggaagaccaggttatgagcatctcaatgaaccactgcacattttgattgaggctgaattacctgctaatgttgttgacataaggctcaggcaggctcaggaaattattgaagaactgctcaagcctgtggatgaatcacaggactatatcaagaggcagcagttgcgtgaactcgccatgctgaattcaaatttcagagaagagagtcccgggcccagtggtagtgtgtccccattcaactctagtggaatgaaacgtgcaaagacgggtcgctgaaagttgtccttgattgttggtgtagatgatgagtatcgtggtcctccagctattgattgctgggaatatcttccagtacatgtctcattcaatgcaagctataaaagaataggctaacaattcttgctggttagcactctggtggtttttccttcccctttgtccctacctttttctttttgaacagacaggagacaaagctggaatgaagaatttttaaaagagaacaattatatagttggggtattgagaataggtttgttcaaaccaaccctttttttttctcccttgcaaacttaatacattcattggatttattcatgcgtcagttactttttgagaagtgtggaatatatacatatgatggttggtggtgatgaagttttaggtcctatgacaatgcagtgtttattggcatgtgacattgtcaaagtctcatggtattttaatatttattataagttagcataggctggattctttttagttgtttgtcacaggcatttgtattctcttcggaggactatgcactgtagttggaatgatgcatgccagataaacttcttaccatgtaccattaaagaacaaatgtggtatttgtttatat

SEQ ID NO: 8011 - protein, 281 aa, Glycine max
  peptide (1)..(281): Ceres Seq. ID no. 14312197
  misc_feature (136)..(191): Pfam Name: Pfam Description:  KH domain
  misc_feature (1)..(280): NCBI GI NO: 15224909 NR Description: KH domain protein [Arabidopsis thaliana]
  misc_feature (1)..(281): NCBI GI NO: 40645104 NR Description: hypothetical protein [Nicotiana tabacum]
  misc_feature (1)..(281): NCBI GI NO: 12322716 NR Description: unknown protein; 28504-31237
  misc_feature (1)..(281): NCBI GI NO: 30680583 NR Description: KH domain protein [Arabidopsis thaliana]
  misc_feature (3)..(278): NCBI GI NO: 34900448 NR Description: contains EST C27129
  misc_feature (1)..(278): NCBI GI NO: 34909270 NR Description: P0454H12.18
  misc_feature (6)..(279): NCBI GI NO: 15236738 NR Description: KH domain protein [Arabidopsis thaliana]
  misc_feature (6)..(279): NCBI GI NO: 20268733 NR Description: unknown protein [Arabidopsis thaliana]
  misc_feature (6)..(279): NCBI GI NO: 15241136 NR Description: KH domain protein [Arabidopsis thaliana]
  misc_feature (28)..(279): NCBI GI NO: 19424087 NR Description: putative RNA-binding protein
MSGLYNPNFSPARAASPQIRSNPEVDSQYLSELLAEHQKLGPFMQVLPICSRLLNQEILRVSGMLSNQGFGDFDRLRHRSPSPMASSNLMSNVSGTGLGGWNSLQQERLCGPPGMTMDWQSAPASPSSFTVKRILRLEIPVDTYPNFNFVGRLLGPRGNSLKRVEATTGCRVYIRGKGSIKDPDKEEKLRGRPGYEHLNEPLHILIEAELPANVVDIRLRQAQEIIEELLKPVDESQDYIKRQQLRELAMLNSNFREESPGPSGSVSPFNSSGMKRAKTGR

SEQ ID NO: 8012 - protein, 238 aa, Glycine max
  peptide (1)..(238): Ceres Seq. ID no. 14312198
  misc_feature (93)..(148): Pfam Name: Pfam Description:  KH domain
  misc_feature (1)..(237): NCBI GI NO: 15224909 NR Description: KH domain protein [Arabidopsis thaliana]
  misc_feature (1)..(238): NCBI GI NO: 40645104 NR Description: hypothetical protein [Nicotiana tabacum]
  misc_feature (1)..(238): NCBI GI NO: 12322716 NR Description: unknown protein; 28504-31237
  misc_feature (1)..(238): NCBI GI NO: 30680583 NR Description: KH domain protein [Arabidopsis thaliana]
  misc_feature (1)..(235): NCBI GI NO: 34900448 NR Description: contains EST C27129
  misc_feature (1)..(235): NCBI GI NO: 34909270 NR Description: P0454H12.18
  misc_feature (1)..(236): NCBI GI NO: 15236738 NR Description: KH domain protein [Arabidopsis thaliana]
  misc_feature (1)..(236): NCBI GI NO: 20268733 NR Description: unknown protein [Arabidopsis thaliana]
  misc_feature (1)..(236): NCBI GI NO: 15241136 NR Description: KH domain protein [Arabidopsis thaliana]
  misc_feature (1)..(236): NCBI GI NO: 19424087 NR Description: putative RNA-binding protein
MQVLPICSRLLNQEILRVSGMLSNQGFGDFDRLRHRSPSPMASSNLMSNVSGTGLGGWNSLQQERLCGPPGMTMDWQSAPASPSSFTVKRILRLEIPVDTYPNFNFVGRLLGPRGNSLKRVEATTGCRVYIRGKGSIKDPDKEEKLRGRPGYEHLNEPLHILIEAELPANVVDIRLRQAQEIIEELLKPVDESQDYIKRQQLRELAMLNSNFREESPGPSGSVSPFNSSGMKRAKTGR

SEQ ID NO: 8013 - protein, 218 aa, Glycine max
  peptide (1)..(218): Ceres Seq. ID no. 14312199
  misc_feature (73)..(128): Pfam Name: Pfam Description:  KH domain
  misc_feature (1)..(217): NCBI GI NO: 15224909 NR Description: KH domain protein [Arabidopsis thaliana]
  misc_feature (1)..(218): NCBI GI NO: 40645104 NR Description: hypothetical protein [Nicotiana tabacum]
  misc_feature (1)..(218): NCBI GI NO: 12322716 NR Description: unknown protein; 28504-31237
  misc_feature (1)..(218): NCBI GI NO: 30680583 NR Description: KH domain protein [Arabidopsis thaliana]
  misc_feature (1)..(215): NCBI GI NO: 34900448 NR Description: contains EST C27129
  misc_feature (1)..(215): NCBI GI NO: 34909270 NR Description: P0454H12.18
  misc_feature (1)..(216): NCBI GI NO: 15236738 NR Description: KH domain protein [Arabidopsis thaliana]
  misc_feature (1)..(216): NCBI GI NO: 20268733 NR Description: unknown protein [Arabidopsis thaliana]
  misc_feature (1)..(216): NCBI GI NO: 15241136 NR Description: KH domain protein [Arabidopsis thaliana]
  misc_feature (1)..(216): NCBI GI NO: 19424087 NR Description: putative RNA-binding protein
MLSNQGFGDFDRLRHRSPSPMASSNLMSNVSGTGLGGWNSLQQERLCGPPGMTMDWQSAPASPSSFTVKRILRLEIPVDTYPNFNFVGRLLGPRGNSLKRVEATTGCRVYIRGKGSIKDPDKEEKLRGRPGYEHLNEPLHILIEAELPANVVDIRLRQAQEIIEELLKPVDESQDYIKRQQLRELAMLNSNFREESPGPSGSVSPFNSSGMKRAKTGR

SEQ ID NO: 8014 - DNA, 1339 bp, Glycine max
  misc_feature (1)..(1339): Ceres Seq. ID no. 14315455
agaatattattcactgtactttatccctttctgtgagggaattatggtaattgatatcgaggttttgactcatggattctgatcgccccagaaaaccttccaaaaatttagttcactctcgcttcttccttttcggcttctattgctgggattgggagttcttaaccgctctcctcctttttagttgttccccttaatcttgttccttcatatttttatttttttttcttattagatcagattgaacaaaagggttgctctttattttttaatcttgggggaataatagaaatagaaataagaaaagattagtgaggttgaaatgttgcaacaacgatcggtgccggcaccgttcttgacgaagacgtatcagttggtggaggatccggggacggacgaggtaatatcgtggggtgaaagtgggaacacttttgtggtgtggaagcatgcggattttgcaaaggatttgcttccaaaatatttcaagcacaacaacttctccagctttgttcgacagctcaacacctatggatttcgaaaaattgtgccagacaaatgggaattcgcgaacgaacacttcaagcgagggcagaaggagcttctctcggagatcaaacgccgcaagaccgtgcctcagtcgtcgacacattccccggatgccggaaaacccggcgccgaaggcaactctccgtcgaaccccggcggctgcgacgacgcgggctccacctcaacctcgtcctcgtcctccggttccaagaaccagggatcggtggaaacaaacacaacgccttctcaccagttatcgagcgagaacgagaaactgaagaaggataacgaaacgctgagttgcgagctggcacgtgcgaggaagcagtgcgatgagctcgtggcttttctcagggaccgtctgatggtgggtcccgatcagatcgatcgcatcatgcggcaaggaagttgcggatctgaaaacgcggtaggtgaaggcggtggtggaggacactgtttgaaactgtttggtgtttggttaaaaggggatacactaacagacaaaagaaacaaccacaagagaggccgcgaagaccaaatgggcttcggtgggcctcgcctcaaggagtcaaagcccgttgttgactttagtaggaataggatgatgatgattaatgaaaaaggaaaaggctaagcggtaatcatgtttgggtaaaaagaccaaatgcgctagcctatgcttcctaaacatgttgaggctgtgtaatttttaatgtacgtaggtaaatgcctctatgaatattgattgggaaattaaacaggttttaataatcaatgtatggccttttatgtc

SEQ ID NO: 8015 - protein, 285 aa, Glycine max
  peptide (1)..(285): Ceres Seq. ID no. 14315456
  misc_feature (8)..(206): Pfam Name: Pfam Description:  HSF-type DNA-binding
  misc_feature (2)..(278): NCBI GI NO: 2129831 NR Description: heat shock transcription factor HSF34 - soybean
  misc_feature (2)..(284): NCBI GI NO: 5821136 NR Description: heat shock factor [Nicotiana tabacum]
  misc_feature (2)..(266): NCBI GI NO: 123684 NR Description: HEAT SHOCK FACTOR PROTEIN HSF24
  misc_feature (4)..(271): NCBI GI NO: 15234583 NR Description: heat shock transcription factor 4 (HSF4)
  misc_feature (4)..(271): NCBI GI NO: 2129612 NR Description: heat shock transcription factor HSF4
  misc_feature (1)..(215): NCBI GI NO: 30697614 NR Description: heat shock transcription factor 6 (HSF6)
  misc_feature (5)..(102): NCBI GI NO: 2129832 NR Description: heat shock transcription factor HSF5 - soybean
  misc_feature (116)..(200): NCBI GI NO: 2129832 NR Description: heat shock transcription factor HSF5 - soybean
  misc_feature (3)..(216): NCBI GI NO: 33591098 NR Description: heat shock factor RHSF2
  misc_feature (1)..(200): NCBI GI NO: 15220101 NR Description: heat shock transcription factor family
MLQQRSVPAPFLTKTYQLVEDPGTDEVISWGESGNTFVVWKHADFAKDLLPKYFKHNNFSSFVRQLNTYGFRKIVPDKWEFANEHFKRGQKELLSEIKRRKTVPQSSTHSPDAGKPGAEGNSPSNPGGCDDAGSTSTSSSSSGSKNQGSVETNTTPSHQLSSENEKLKKDNETLSCELARARKQCDELVAFLRDRLMVGPDQIDRIMRQGSCGSENAVGEGGGGGHCLKLFGVWLKGDTLTDKRNNHKRGREDQMGFGGPRLKESKPVVDFSRNRMMMINEKGKG

SEQ ID NO: 8016 - DNA, 1419 bp, Glycine max
  misc_feature (1)..(1419): Ceres Seq. ID no. 14315481
gaggtacccctactactacttagagaaagtgaaagtgaaagtgaagtgcaacactgcagatgcagttgcaggggaatcagttaaaccgtatttaattttcacaacctccaactccaccaacttacccaatattctttactttcttcctccgtcttcttccctttcaaaccctagaaacagcaaaatcccccttttgatgcaaatgggatcactccaccaactctagagccacacccttcaagatttagctcatgcccacttcaattatggctccattttccacttccccccacttcacagccttcaccttcctcatcttgttcctcaaaacacaagcttttgatccactctctttcttttccttcacggattttgagaaagatccaaattttaagtcaagtgtggggctttatggcaatgcaaaagttgtcaataatggttctgaggttcttctttctgggaatggtgggagagtcatatacaagaagcccgtcaagcttgttcatggtggagcaagggaattggtctcattttcaacttactttgggttttcaatgtccttggatagtgagaagagtggcttggcttttgttatggttcctagtggtgttgaaggtgaggtttttggtaatagttcatatgggctttcttttggattgaaggaaagggaatttaaggttgtcggtgttcagtttagtgcttatggtaggaatgggggttctggtagttgtattgtgtccattaatgttggtagttctgttcctgttaaaacaatcaatgcctcatctgtcattatgggtctaaaaagtgaggggaaattgcatgcttggattgattatgaggcgagttcaaagcgcttagaagttaggttgaatcaatatggtcaatcaaggccagttgatccattgctttggcattcaatggacttatcaaatgtttggggtactgaagagatgtttgcaggctttagcacagtgaaagagaataatacttctcaaacatgctttctctattcatggagctttattgtgaggcattttccacattggatgcattctgagcctctgaatccaaaggtccttgctaagaagactgaaactccagcagtgaaatccagaagtgattgccttttgagggttcttgctgcaatgatatttggtgctggatgtggagcattgacagcattcattgtgctttatttgtggaccatctttggtaataaacgaccggtggtgccggaggagtatgctatgcagcctgtagattttgagtacaagaaagtgagcattgttgtagataaaacaaccatcatagatgctaaggagtagatctacagttggatgcttgcattgtaaatcagtgtttcttgtattcaggttttgctttgttgtagtttgataaagaactgttttatttacc

SEQ ID NO: 8017 - protein, 358 aa, Glycine max
  peptide (1)..(358): Ceres Seq. ID no. 14315482
  misc_feature (6)..(350): NCBI GI NO: 15240888 NR Description: lectin - like protein [Arabidopsis thaliana]
  misc_feature (6)..(350): NCBI GI NO: 21593676 NR Description: lectin-like protein [Arabidopsis thaliana]
  misc_feature (6)..(335): NCBI GI NO: 22330926 NR Description: lectin -related protein [Arabidopsis thaliana]
  misc_feature (46)..(337): NCBI GI NO: 5923683 NR Description: putative lectin [Arabidopsis thaliana]
  misc_feature (34)..(358): NCBI GI NO: 15232413 NR Description: expressed protein [Arabidopsis thaliana]
  misc_feature (1)..(258): NCBI GI NO: 15242646 NR Description: receptor like protein kinase
  misc_feature (47)..(258): NCBI GI NO: 8778564 NR Description: F22G5.19 [Arabidopsis thaliana]
MPTSIMAPFSTSPHFTAFTFLILFLKTQAFDPLSFFSFTDFEKDPNFKSSVGLYGNAKVVNNGSEVLLSGNGGRVIYKKPVKLVHGGARELVSFSTYFGFSMSLDSEKSGLAFVMVPSGVEGEVFGNSSYGLSFGLKEREFKVVGVQFSAYGRNGGSGSCIVSINVGSSVPVKTINASSVIMGLKSEGKLHAWIDYEASSKRLEVRLNQYGQSRPVDPLLWHSMDLSNVWGTEEMFAGFSTVKENNTSQTCFLYSWSFIVRHFPHWMHSEPLNPKVLAKKTETPAVKSRSDCLLRVLAAMIFGAGCGALTAFIVLYLWTIFGNKRPVVPEEYAMQPVDFEYKKVSIVVDKTTIIDAKE

SEQ ID NO: 8018 - protein, 353 aa, Glycine max
  peptide (1)..(353): Ceres Seq. ID no. 14315483
  misc_feature (1)..(345): NCBI GI NO: 15240888 NR Description: lectin - like protein [Arabidopsis thaliana]
  misc_feature (1)..(345): NCBI GI NO: 21593676 NR Description: lectin-like protein [Arabidopsis thaliana]
  misc_feature (1)..(330): NCBI GI NO: 22330926 NR Description: lectin -related protein [Arabidopsis thaliana]
  misc_feature (41)..(332): NCBI GI NO: 5923683 NR Description: putative lectin [Arabidopsis thaliana]
  misc_feature (29)..(353): NCBI GI NO: 15232413 NR Description: expressed protein [Arabidopsis thaliana]
  misc_feature (1)..(253): NCBI GI NO: 15242646 NR Description: receptor like protein kinase
  misc_feature (42)..(253): NCBI GI NO: 8778564 NR Description: F22G5.19 [Arabidopsis thaliana]
MAPFSTSPHFTAFTFLILFLKTQAFDPLSFFSFTDFEKDPNFKSSVGLYGNAKVVNNGSEVLLSGNGGRVIYKKPVKLVHGGARELVSFSTYFGFSMSLDSEKSGLAFVMVPSGVEGEVFGNSSYGLSFGLKEREFKVVGVQFSAYGRNGGSGSCIVSINVGSSVPVKTINASSVIMGLKSEGKLHAWIDYEASSKRLEVRLNQYGQSRPVDPLLWHSMDLSNVWGTEEMFAGFSTVKENNTSQTCFLYSWSFIVRHFPHWMHSEPLNPKVLAKKTETPAVKSRSDCLLRVLAAMIFGAGCGALTAFIVLYLWTIFGNKRPVVPEEYAMQPVDFEYKKVSIVVDKTTIIDAKE

SEQ ID NO: 8019 - protein, 257 aa, Glycine max
  peptide (1)..(257): Ceres Seq. ID no. 14315484
  misc_feature (1)..(249): NCBI GI NO: 15240888 NR Description: lectin - like protein [Arabidopsis thaliana]
  misc_feature (1)..(249): NCBI GI NO: 21593676 NR Description: lectin-like protein [Arabidopsis thaliana]
  misc_feature (1)..(234): NCBI GI NO: 22330926 NR Description: lectin -related protein [Arabidopsis thaliana]
  misc_feature (1)..(236): NCBI GI NO: 5923683 NR Description: putative lectin [Arabidopsis thaliana]
  misc_feature (1)..(257): NCBI GI NO: 15232413 NR Description: expressed protein [Arabidopsis thaliana]
  misc_feature (1)..(157): NCBI GI NO: 15242646 NR Description: receptor like protein kinase
  misc_feature (1)..(157): NCBI GI NO: 8778564 NR Description: F22G5.19 [Arabidopsis thaliana]
MSLDSEKSGLAFVMVPSGVEGEVFGNSSYGLSFGLKEREFKVVGVQFSAYGRNGGSGSCIVSINVGSSVPVKTINASSVIMGLKSEGKLHAWIDYEASSKRLEVRLNQYGQSRPVDPLLWHSMDLSNVWGTEEMFAGFSTVKENNTSQTCFLYSWSFIVRHFPHWMHSEPLNPKVLAKKTETPAVKSRSDCLLRVLAAMIFGAGCGALTAFIVLYLWTIFGNKRPVVPEEYAMQPVDFEYKKVSIVVDKTTIIDAKE

SEQ ID NO: 8020 - DNA, 1433 bp, Glycine max
  misc_feature (1)..(1433): Ceres Seq. ID no. 15175767
atgatgataataaagcagtgaatgatgactcttccttcattgtcctctctattcttcttcttcttccctaactctctctgcaataacaacaccatcaacaaccccttcaagccggcctaaaccccattacccaaaactttttcttttttctttccttcaacactctctattggatcatcacatattcaatttcattctcttcaaaaattccccttcaaaaaaatttaaaattaaaaaaaagtgctctttttgtgaattttgagccatttgccaccgacagatttcgatcttctccgtgccaaagttgtaatcttttcgaattttggcgaggtgggtcgatctgatttcgctcgaataattgcgggttcgattttgatctgaaaaaggaaaagagaaaaaaagattgggttatttctgattcaagattttgtccttttttgaaatggtctatttccatagctcaatctctctctgcaagttcgttgatcaatcatctttcatggcgaattcaatttgttctgcggatttcggttcgaaatcgagacaaatcaatcaccttcagaagaatcggagaacccctagttcatcatcatcatcatcatcatcatcgaattcccttcagattccaccctgtgatcgatctcgatcggcaatggttgatgttgtgatgttcattgctgttgtttgtgcctgtggctttttgttcttcccttatgtagagtttttggtgacaaagtgttacgaggttattaagggtgttgtgtttttgattaaggaggaggtttctgtggcaccttggatctatatttccatagggttgagtgttgtgtttgctgcattggccacgtgggctgtggtggcttgcaccactaggaagtgtgggaatcccagttgcaagggtctgaggaaggctgctgagtttgacattcagttggagactgaggattgtgtgaagaatttggcttctgcgtcgtcgaatgtagcgaaagatggtggtggtggaacgaagaagggtctctttgaattgcctcgtgatcaccatagggagctggaggctgagctcaagaagatggcaccaccaaatggaagggctgtgctcgtgctccgggcgaggtgtggatgttctgttggtaggttagaggttccaggaccaaggaagcatcttcgaaagatcaacaagaagtagcagcaatcctgttcgagccgagtaggacacaggagaggacacccttttgagttattggatggaattaaggaaagggatggtaattggatcaaatagaaaatttgtacttcttgtcctatgttcattgatctagtaggaaattagaatgtctttgaataagccccttggcaataagttgtaaggaactatgggccatacagtttagttggttatacctggaaatataaaaaaagaacatttttatttt

SEQ ID NO: 8021 - protein, 247 aa, Glycine max
  peptide (1)..(247): Ceres Seq. ID no. 15175768
  misc_feature (1)..(246): NCBI GI NO: 22326823 NR Description: expressed protein [Arabidopsis thaliana]
  misc_feature (41)..(246): NCBI GI NO: 18395728 NR Description: expressed protein [Arabidopsis thaliana]
  misc_feature (33)..(239): NCBI GI NO: 11288897 NR Description: hypothetical protein F8M21
  misc_feature (41)..(224): NCBI GI NO: 6714471 NR Description: unknown protein [Arabidopsis thaliana]
  misc_feature (42)..(247): NCBI GI NO: 15230653 NR Description: expressed protein [Arabidopsis thaliana]
  misc_feature (127)..(247): NCBI GI NO: 15239636 NR Description: pentatricopeptide (PPR) repeat-containing protein
MVYFHSSISLCKFVDQSSFMANSICSADFGSKSRQINHLQKNRRTPSSSSSSSSSSNSLQIPPCDRSRSAMVDVVMFIAVVCACGFLFFPYVEFLVTKCYEVIKGVVFLIKEEVSVAPWIYISIGLSVVFAALATWAVVACTTRKCGNPSCKGLRKAAEFDIQLETEDCVKNLASASSNVAKDGGGGTKKGLFELPRDHHRELEAELKKMAPPNGRAVLVLRARCGCSVGRLEVPGPRKHLRKINKK

SEQ ID NO: 8022 - protein, 228 aa, Glycine max
  peptide (1)..(228): Ceres Seq. ID no. 15175769
  misc_feature (1)..(227): NCBI GI NO: 22326823 NR Description: expressed protein [Arabidopsis thaliana]
  misc_feature (22)..(227): NCBI GI NO: 18395728 NR Description: expressed protein [Arabidopsis thaliana]
  misc_feature (14)..(220): NCBI GI NO: 11288897 NR Description: hypothetical protein F8M21
  misc_feature (22)..(205): NCBI GI NO: 6714471 NR Description: unknown protein [Arabidopsis thaliana]
  misc_feature (23)..(228): NCBI GI NO: 15230653 NR Description: expressed protein [Arabidopsis thaliana]
  misc_feature (108)..(228): NCBI GI NO: 15239636 NR Description: pentatricopeptide (PPR) repeat-containing protein
MANSICSADFGSKSRQINHLQKNRRTPSSSSSSSSSSNSLQIPPCDRSRSAMVDVVMFIAVVCACGFLFFPYVEFLVTKCYEVIKGVVFLIKEEVSVAPWIYISIGLSVVFAALATWAVVACTTRKCGNPSCKGLRKAAEFDIQLETEDCVKNLASASSNVAKDGGGGTKKGLFELPRDHHRELEAELKKMAPPNGRAVLVLRARCGCSVGRLEVPGPRKHLRKINKK

SEQ ID NO: 8023 - protein, 177 aa, Glycine max
  peptide (1)..(177): Ceres Seq. ID no. 15175770
  misc_feature (1)..(176): NCBI GI NO: 22326823 NR Description: expressed protein [Arabidopsis thaliana]
  misc_feature (1)..(176): NCBI GI NO: 18395728 NR Description: expressed protein [Arabidopsis thaliana]
  misc_feature (1)..(169): NCBI GI NO: 11288897 NR Description: hypothetical protein F8M21
  misc_feature (1)..(154): NCBI GI NO: 6714471 NR Description: unknown protein [Arabidopsis thaliana]
  misc_feature (1)..(177): NCBI GI NO: 15230653 NR Description: expressed protein [Arabidopsis thaliana]
  misc_feature (57)..(177): NCBI GI NO: 15239636 NR Description: pentatricopeptide (PPR) repeat-containing protein
MVDVVMFIAVVCACGFLFFPYVEFLVTKCYEVIKGVVFLIKEEVSVAPWIYISIGLSVVFAALATWAVVACTTRKCGNPSCKGLRKAAEFDIQLETEDCVKNLASASSNVAKDGGGGTKKGLFELPRDHHRELEAELKKMAPPNGRAVLVLRARCGCSVGRLEVPGPRKHLRKINKK

SEQ ID NO: 8024 - DNA, 1366 bp, Glycine max
  misc_feature (1)..(1366): Ceres Seq. ID no. 14315911
gttggaacttggaggaacttgtgtctgtgtccctttttacagagtcatgactatggctggagctttgagtctctcccaattcccagttcgtgggtctgtttctttgcccaaaagaagaatacccagaagaagcttttgcattaggggcatgtcagaaatctcttccactttttctgtgagcacccaacaagaagaaccaacttctaatgcttcgtcagtgacaattgcacctccccccaacttcaagccccctgagcctaaacgctttgcaatcagacctgacaagaccagtgaagtatttggagctttgcttcctttgctctttcgctttgctaccggagttttcgtttctgggtattctttttcaattgtttctaaggatgaaattcctccagatgaatatgctttggaacttaatggcgttaccataaaagaaacagcaaaattaggccctcgcccagagaagcctattgagatatatgaatttgagagctgtccattttgccgaaaggttagagaaattgttgccattttggaccttgatgttcttttctatccttgtccaagaaatggcccaaatttccgtcaaaaggttctagagatgggtggcaaactgcagttcccctacatggttgacccaaacacaggcgcttcaatgtatgaatcagatgacataattcggtatttggttgacaaatatggtgatggaaacgttcctctatctttatcacttggatttttaacgaccctaactgctggtcttggtatgcttagtcgtatttcaaaggggactacttatactccagcgaagttccctccaaagccacttaaattatgggcatatgaggggtctcctttctgcaaacttgtacgtgaagtacttgtggaattggagctgccacacttgcttgtctgttgtgctaggggtagcccaaagagaaatatactatatcagaaaactggaactttccaggcaccttttttggaagatccaaacactgggatagaaatgtttgaaagtgcagaaatcatagagtatctaagagcaacatacgctcttcagtaagtgatgcctatgataggaagaggcttgtgagggtttttaagtaaatgtaattgctaatggttctaacagggttacatcaaattttctctatatagaaatttcaaatagtggaatcaagtgcctcaatattcagcaatggtttgaggtggataaaaatttcggttgcaaaatgggaatctgtttcattcttcttttcttctttattattgttattattatttgggactcttttcattcattattactgcacctacaactctgcaataataactacataatacattaatgcccttgaaaatg

SEQ ID NO: 8025 - protein, 354 aa, Glycine max
  peptide (1)..(354): Ceres Seq. ID no. 14315912
  misc_feature (157)..(229): Pfam Name: Pfam Description:  Glutathione S-transferase, N-terminal domain
  misc_feature (18)..(352): NCBI GI NO: 18414386 NR Description: auxin-regulated protein [Arabidopsis thaliana]
  misc_feature (18)..(352): NCBI GI NO: 21593275 NR Description: unknown [Arabidopsis thaliana]
  misc_feature (18)..(352): NCBI GI NO: 11282317 NR Description: hypothetical protein F8F6
  misc_feature (153)..(352): NCBI GI NO: 18413285 NR Description: expressed protein [Arabidopsis thaliana]
  misc_feature (153)..(352): NCBI GI NO: 21593568 NR Description: unknown [Arabidopsis thaliana]
  misc_feature (153)..(352): NCBI GI NO: 7487730 NR Description: hypothetical protein T5L19
  misc_feature (147)..(269): NCBI GI NO: 15488040 NR Description: unknown [Photobacterium profundum]
LELGGTCVCVPFYRVMTMAGALSLSQFPVRGSVSLPKRRIPRRSFCIRGMSEISSTFSVSTQQEEPTSNASSVTIAPPPNFKPPEPKRFAIRPDKTSEVFGALLPLLFRFATGVFVSGYSFSIVSKDEIPPDEYALELNGVTIKETAKLGPRPEKPIEIYEFESCPFCRKVREIVAILDLDVLFYPCPRNGPNFRQKVLEMGGKLQFPYMVDPNTGASMYESDDIIRYLVDKYGDGNVPLSLSLGFLTTLTAGLGMLSRISKGTTYTPAKFPPKPLKLWAYEGSPFCKLVREVLVELELPHLLVCCARGSPKRNILYQKTGTFQAPFLEDPNTGIEMFESAEIIEYLRATYALQ

SEQ ID NO: 8026 - protein, 339 aa, Glycine max
  peptide (1)..(339): Ceres Seq. ID no. 14315913
  misc_feature (142)..(214): Pfam Name: Pfam Description:  Glutathione S-transferase, N-terminal domain
  misc_feature (3)..(337): NCBI GI NO: 18414386 NR Description: auxin-regulated protein [Arabidopsis thaliana]
  misc_feature (3)..(337): NCBI GI NO: 21593275 NR Description: unknown [Arabidopsis thaliana]
  misc_feature (3)..(337): NCBI GI NO: 11282317 NR Description: hypothetical protein F8F6
  misc_feature (138)..(337): NCBI GI NO: 18413285 NR Description: expressed protein [Arabidopsis thaliana]
  misc_feature (138)..(337): NCBI GI NO: 21593568 NR Description: unknown [Arabidopsis thaliana]
  misc_feature (138)..(337): NCBI GI NO: 7487730 NR Description: hypothetical protein T5L19
  misc_feature (132)..(254): NCBI GI NO: 15488040 NR Description: unknown [Photobacterium profundum]
MTMAGALSLSQFPVRGSVSLPKRRIPRRSFCIRGMSEISSTFSVSTQQEEPTSNASSVTIAPPPNFKPPEPKRFAIRPDKTSEVFGALLPLLFRFATGVFVSGYSFSIVSKDEIPPDEYALELNGVTIKETAKLGPRPEKPIEIYEFESCPFCRKVREIVAILDLDVLFYPCPRNGPNFRQKVLEMGGKLQFPYMVDPNTGASMYESDDIIRYLVDKYGDGNVPLSLSLGFLTTLTAGLGMLSRISKGTTYTPAKFPPKPLKLWAYEGSPFCKLVREVLVELELPHLLVCCARGSPKRNILYQKTGTFQAPFLEDPNTGIEMFESAEIIEYLRATYALQ

SEQ ID NO: 8027 - protein, 337 aa, Glycine max
  peptide (1)..(337): Ceres Seq. ID no. 14315914
  misc_feature (140)..(212): Pfam Name: Pfam Description:  Glutathione S-transferase, N-terminal domain
  misc_feature (1)..(335): NCBI GI NO: 18414386 NR Description: auxin-regulated protein [Arabidopsis thaliana]
  misc_feature (1)..(335): NCBI GI NO: 21593275 NR Description: unknown [Arabidopsis thaliana]
  misc_feature (1)..(335): NCBI GI NO: 11282317 NR Description: hypothetical protein F8F6
  misc_feature (136)..(335): NCBI GI NO: 18413285 NR Description: expressed protein [Arabidopsis thaliana]
  misc_feature (136)..(335): NCBI GI NO: 21593568 NR Description: unknown [Arabidopsis thaliana]
  misc_feature (136)..(335): NCBI GI NO: 7487730 NR Description: hypothetical protein T5L19
  misc_feature (130)..(252): NCBI GI NO: 15488040 NR Description: unknown [Photobacterium profundum]
MAGALSLSQFPVRGSVSLPKRRIPRRSFCIRGMSEISSTFSVSTQQEEPTSNASSVTIAPPPNFKPPEPKRFAIRPDKTSEVFGALLPLLFRFATGVFVSGYSFSIVSKDEIPPDEYALELNGVTIKETAKLGPRPEKPIEIYEFESCPFCRKVREIVAILDLDVLFYPCPRNGPNFRQKVLEMGGKLQFPYMVDPNTGASMYESDDIIRYLVDKYGDGNVPLSLSLGFLTTLTAGLGMLSRISKGTTYTPAKFPPKPLKLWAYEGSPFCKLVREVLVELELPHLLVCCARGSPKRNILYQKTGTFQAPFLEDPNTGIEMFESAEIIEYLRATYALQ

SEQ ID NO: 8028 - DNA, 1470 bp, Glycine max
  misc_feature (1)..(1470): Ceres Seq. ID no. 14312140
aaacggatgccattgctgcaccccgtgaaagctctatccctctctttctttgttttccgtggaaaccaacctatcttcctttgttattttcattctgataaaacaaacatattttcttccacctttttccatctttgcaaaggggataaagggttgctagttgctaccatttatggttttattccgccatttggaggaaccttatgctcttaaaacaaataaaacccaaagggttctcttgaaaaacaccagaactttcatctaatcaaaacacgtgttggccaaaaacatcaccttctctttattatcgcatgcaagagcttttttagatgctcctttgtgttcaagattgagagaaaacataacctgggtatgatatgactacgagcatgccccgttaatgtttcaacggtttttgtttctttggttcattttcagacacccccatattcttcttctcaattgaaaaccttggtttttgaatctcccctgttttcctttgtgtgcttcaagttctttttgtctttttctagaaacctatgtcgtctgtgccggcacgaacagggcgacaaagacagcgttatgaggacaatttgcgccttgtctctggatgtattccctatagatggacaaaggacaacacagatcaaatgggggaaacccgggagataatagaagtacttatggtttcttcaccaaaacgtgatgaccttgtattcccaaagggtggatgggaggatgatgagactgttacagaagctgcttgccgcgaggctttagaggaagcaggagttaaaggaatactaagagaaattccactaggaatatgggagttcagaagcaaaaccagtcaagacttatgtagcgtggaaggaggctgcagaggatacatgtttgccttggaggtgactgaagaacttgagacatggccagagcagaaaaaccacgctcgccaatggttaaacataaaagatgcattcaaactcagccgatatgactggatgtgtaatgcacttgaggcatttttgagagtaatggcagaagacagaaagcctgagaaccaagaccagaatgtggaacttgaacccccttcaattgtagaagatatgccagaatgccaaagtatgtcacctaactgctataagagatcctctactatgcagcaccatggtatgcctcctaaagccaatcttctgtcacgtgctactcgagaaatagccatccactttggttattgacattatcaggaggacacttttgaaatatgcttatgtaatggatcaacattgtgcaataactccttaaaattgtgaaagaaaaaactatgaagttattatggcttggatgcacaatccatcaacttcattgttgtaggctctttctttctttctttccaatgtgaccatgatgtaaaatgtggtggtgaaagtctcaagtgtatatgatcttaacagttgtttgcttcacccc

SEQ ID NO: 8029 - protein, 232 aa, Glycine max
  peptide (1)..(232): Ceres Seq. ID no. 14312141
  misc_feature (20)..(165): Pfam Name: Pfam Description:  NUDIX domain
  misc_feature (1)..(205): NCBI GI NO: 25518008 NR Description: F13K23.14 protein - Arabidopsis thaliana
  misc_feature (1)..(179): NCBI GI NO: 18391450 NR Description: MutT/nudix family protein [Arabidopsis thaliana]
  misc_feature (1)..(169): NCBI GI NO: 15231598 NR Description: MutT/nudix family protein [Arabidopsis thaliana]
  misc_feature (1)..(164): NCBI GI NO: 18399682 NR Description: MutT/nudix family protein [Arabidopsis thaliana]
  misc_feature (1)..(180): NCBI GI NO: 38175436 NR Description: MutT-like protein
  misc_feature (1)..(180): NCBI GI NO: 34900054 NR Description: MutT-like protein~contains ESTsAU085960
  misc_feature (1)..(174): NCBI GI NO: 15221055 NR Description: MutT/nudix family protein [Arabidopsis thaliana]
  misc_feature (1)..(181): NCBI GI NO: 15223919 NR Description: MutT/nudix family protein [Arabidopsis thaliana]
  misc_feature (1)..(182): NCBI GI NO: 18379275 NR Description: MutT/nudix family protein [Arabidopsis thaliana]
  misc_feature (1)..(182): NCBI GI NO: 21595695 NR Description: unknown [Arabidopsis thaliana]
MSSVPARTGRQRQRYEDNLRLVSGCIPYRWTKDNTDQMGETREIIEVLMVSSPKRDDLVFPKGGWEDDETVTEAACREALEEAGVKGILREIPLGIWEFRSKTSQDLCSVEGGCRGYMFALEVTEELETWPEQKNHARQWLNIKDAFKLSRYDWMCNALEAFLRVMAEDRKPENQDQNVELEPPSIVEDMPECQSMSPNCYKRSSTMQHHGMPPKANLLSRATREIAIHFGY

SEQ ID NO: 8030 - protein, 195 aa, Glycine max
  peptide (1)..(195): Ceres Seq. ID no. 14312142
  misc_feature (1)..(128): Pfam Name: Pfam Description:  NUDIX domain
  misc_feature (1)..(168): NCBI GI NO: 25518008 NR Description: F13K23.14 protein - Arabidopsis thaliana
  misc_feature (1)..(142): NCBI GI NO: 18391450 NR Description: MutT/nudix family protein [Arabidopsis thaliana]
  misc_feature (1)..(132): NCBI GI NO: 15231598 NR Description: MutT/nudix family protein [Arabidopsis thaliana]
  misc_feature (1)..(127): NCBI GI NO: 18399682 NR Description: MutT/nudix family protein [Arabidopsis thaliana]
  misc_feature (1)..(143): NCBI GI NO: 38175436 NR Description: MutT-like protein
  misc_feature (1)..(143): NCBI GI NO: 34900054 NR Description: MutT-like protein~contains ESTsAU085960
  misc_feature (1)..(137): NCBI GI NO: 15221055 NR Description: MutT/nudix family protein [Arabidopsis thaliana]
  misc_feature (1)..(144): NCBI GI NO: 15223919 NR Description: MutT/nudix family protein [Arabidopsis thaliana]
  misc_feature (1)..(145): NCBI GI NO: 18379275 NR Description: MutT/nudix family protein [Arabidopsis thaliana]
  misc_feature (1)..(145): NCBI GI NO: 21595695 NR Description: unknown [Arabidopsis thaliana]
MGETREIIEVLMVSSPKRDDLVFPKGGWEDDETVTEAACREALEEAGVKGILREIPLGIWEFRSKTSQDLCSVEGGCRGYMFALEVTEELETWPEQKNHARQWLNIKDAFKLSRYDWMCNALEAFLRVMAEDRKPENQDQNVELEPPSIVEDMPECQSMSPNCYKRSSTMQHHGMPPKANLLSRATREIAIHFGY

SEQ ID NO: 8031 - protein, 184 aa, Glycine max
  peptide (1)..(184): Ceres Seq. ID no. 14312143
  misc_feature (1)..(117): Pfam Name: Pfam Description:  NUDIX domain
  misc_feature (1)..(157): NCBI GI NO: 25518008 NR Description: F13K23.14 protein - Arabidopsis thaliana
  misc_feature (1)..(131): NCBI GI NO: 18391450 NR Description: MutT/nudix family protein [Arabidopsis thaliana]
  misc_feature (1)..(121): NCBI GI NO: 15231598 NR Description: MutT/nudix family protein [Arabidopsis thaliana]
  misc_feature (1)..(116): NCBI GI NO: 18399682 NR Description: MutT/nudix family protein [Arabidopsis thaliana]
  misc_feature (1)..(132): NCBI GI NO: 38175436 NR Description: MutT-like protein
  misc_feature (1)..(132): NCBI GI NO: 34900054 NR Description: MutT-like protein~contains ESTsAU085960
  misc_feature (1)..(126): NCBI GI NO: 15221055 NR Description: MutT/nudix family protein [Arabidopsis thaliana]
  misc_feature (1)..(133): NCBI GI NO: 15223919 NR Description: MutT/nudix family protein [Arabidopsis thaliana]
  misc_feature (1)..(134): NCBI GI NO: 18379275 NR Description: MutT/nudix family protein [Arabidopsis thaliana]
  misc_feature (1)..(134): NCBI GI NO: 21595695 NR Description: unknown [Arabidopsis thaliana]
MVSSPKRDDLVFPKGGWEDDETVTEAACREALEEAGVKGILREIPLGIWEFRSKTSQDLCSVEGGCRGYMFALEVTEELETWPEQKNHARQWLNIKDAFKLSRYDWMCNALEAFLRVMAEDRKPENQDQNVELEPPSIVEDMPECQSMSPNCYKRSSTMQHHGMPPKANLLSRATREIAIHFGY

SEQ ID NO: 8032 - DNA, 839 bp, Glycine max
  misc_feature (1)..(839): Ceres Seq. ID no. 14315444
atcattgagaagcttggatgatgactgggatgatgaaaaggcaagtcccatgactcccatccacatgggggctgctaacagtaataacagcattgaagaggttgaatctgatgacaatgtcgaagcaatggaatctgatgacaatgttcaagcaatggagtctgatgacaaagtccaagcaatggaatccgatgacaatgtccaagcagcagaatctgatgacaatggccaagctgtggaatatgatcaaggaaactgggaaataggttttaatggtgcccccagcagatggagtagggatttggtaggaggaattagcgatgaggatgaggatgaggatgcggaagcttctgaagatgacaatgacaatggcattggcattgaaaacaatgaggaggaggattcagaggcagatgctatgagtgaggagggttcagatggtactgcaaacagaattgtaaatgaagaaagctcagactcggatgtctctgaagattcttctgattagaacattgcttttttaagggaaaggatcctcgagtaacatttattttctcaaaaacttaataatggaagaaatggagagaaaaggaaacagaggatcttttctcgttttttaaggctgcgttacattttttccccctatactgcagccagctttacaacgtacctgagctccaaagtcatggcaaggcttcatagttcatactagttttatggttgagtagattaatagtgtataataggatatataaacccgcccattgcgtggattcttaaaaaaaaaataaaaaaaattaatatcattatacaatcaataattcaagaaaacaattcac

SEQ ID NO: 8033 - protein, 168 aa, Glycine max
  peptide (1)..(168): Ceres Seq. ID no. 14315445
  misc_feature (27)..(168): Pfam Name: Pfam Description:  Chromadorea ALT protein
  misc_feature (27)..(168): NCBI GI NO: 23613490 NR Description: hypothetical protein [Plasmodium falciparum 3D7]
  misc_feature (10)..(168): NCBI GI NO: 23613490 NR Description: hypothetical protein [Plasmodium falciparum 3D7]
  misc_feature (10)..(168): NCBI GI NO: 23613490 NR Description: hypothetical protein [Plasmodium falciparum 3D7]
  misc_feature (8)..(168): NCBI GI NO: 19923672 NR Description: dentin sailophosphoprotein
  misc_feature (3)..(165): NCBI GI NO: 23042413 NR Description: hypothetical protein
  misc_feature (4)..(168): NCBI GI NO: 4322670 NR Description: dentin phosphoryn [Homo sapiens]
SLRSLDDDWDDEKASPMTPIHMGAANSNNSIEEVESDDNVEAMESDDNVQAMESDDKVQAMESDDNVQAAESDDNGQAVEYDQGNWEIGFNGAPSRWSRDLVGGISDEDEDEDAEASEDDNDNGIGIENNEEEDSEADAMSEEGSDGTANRIVNEESSDSDVSEDSSD

SEQ ID NO: 8034 - protein, 152 aa, Glycine max
  peptide (1)..(152): Ceres Seq. ID no. 14315446
  misc_feature (11)..(152): Pfam Name: Pfam Description:  Chromadorea ALT protein
  misc_feature (11)..(152): NCBI GI NO: 23613490 NR Description: hypothetical protein [Plasmodium falciparum 3D7]
  misc_feature (1)..(152): NCBI GI NO: 23613490 NR Description: hypothetical protein [Plasmodium falciparum 3D7]
  misc_feature (1)..(152): NCBI GI NO: 23613490 NR Description: hypothetical protein [Plasmodium falciparum 3D7]
  misc_feature (1)..(152): NCBI GI NO: 19923672 NR Description: dentin sailophosphoprotein
  misc_feature (1)..(149): NCBI GI NO: 23042413 NR Description: hypothetical protein
  misc_feature (1)..(152): NCBI GI NO: 4322670 NR Description: dentin phosphoryn [Homo sapiens]
MTPIHMGAANSNNSIEEVESDDNVEAMESDDNVQAMESDDKVQAMESDDNVQAAESDDNGQAVEYDQGNWEIGFNGAPSRWSRDLVGGISDEDEDEDAEASEDDNDNGIGIENNEEEDSEADAMSEEGSDGTANRIVNEESSDSDVSEDSSD

SEQ ID NO: 8035 - protein, 147 aa, Glycine max
  peptide (1)..(147): Ceres Seq. ID no. 14315447
  misc_feature (6)..(147): Pfam Name: Pfam Description:  Chromadorea ALT protein
  misc_feature (6)..(147): NCBI GI NO: 23613490 NR Description: hypothetical protein [Plasmodium falciparum 3D7]
  misc_feature (1)..(147): NCBI GI NO: 23613490 NR Description: hypothetical protein [Plasmodium falciparum 3D7]
  misc_feature (1)..(147): NCBI GI NO: 23613490 NR Description: hypothetical protein [Plasmodium falciparum 3D7]
  misc_feature (1)..(147): NCBI GI NO: 19923672 NR Description: dentin sailophosphoprotein
  misc_feature (1)..(144): NCBI GI NO: 23042413 NR Description: hypothetical protein
  misc_feature (1)..(147): NCBI GI NO: 4322670 NR Description: dentin phosphoryn [Homo sapiens]
MGAANSNNSIEEVESDDNVEAMESDDNVQAMESDDKVQAMESDDNVQAAESDDNGQAVEYDQGNWEIGFNGAPSRWSRDLVGGISDEDEDEDAEASEDDNDNGIGIENNEEEDSEADAMSEEGSDGTANRIVNEESSDSDVSEDSSD

SEQ ID NO: 8036 - DNA, 1560 bp, Glycine max
  misc_feature (1)..(1560): Ceres Seq. ID no. 15179926
atatacactcgttcatatataattctctctgatcttattatttcctttcaagtctcttaatttctctatatttcaaaaactcaaaccctaaaatgaacgacttgttctccggctccttctcccgcaccaatgaccaagtctcgccggaccaccaccatgtgatcgagatggcggccaccgcatcgccaacggccgagggaagcgtgaatctcgaaaagttctttcaagaagttgagcaggtaaaagaggagctgaaggagctagagcgtctccatgaaaatctgcgtgggtcccacgagaaaagcaagatccttcacagcgccaaagctgtgaaggaacttcgcttacgcatggacagtgacgtgacacttgctctaaagaatgcaaagctcgttaaggttcggcttgaggcactggaccggtccaaccagaccagtcaaagcttgcctggttcgggacctggttcgtcctcagaccggaccagaacgtccgttgtgagcggactgaggaagaagctgaaggactcgatggacagcttcaacagcctcagacaaaagatatcgtcagagtatagggaaaccgtgcagcgtagatattatactgtcaccggagagaaccctgatgacaaaaccattgatctccttatttctacgggtgagagtgaaacattcttgcagaaggcgatccagcagcaaggtagagccagtgtgatggacacgatccaagagattcaagagaggcacgacacagtcaaggaaatagagagaaacctaaacgagctccaccaagtgttcttggacatggccgtgctggtgcagtcccagggcgaacaactggacgacatcgagagccacgtggcgcgcgccaattcgtacgtgcggggtggggtccagcagttgcacgtggcaaggaagcaccagaagaacacccgaaagtggacatgcatagccatcatactgctcattattatcatcttgattatagtcctccctatagttctaagaaattgattgatcacatattctaattggttcaaggtggtggctgccaagaaattggactagttcaaacttcaaagattattagtcaggtcaattcatgctgcctagaccattgcattagaaaaatatataccttggcttttgtaatcagttttgttttcttctttttggtcgcatcatgtgttgattagtttacattttccacgtacccatttgtacatgtttgaagattgagacattttggtttggtttggtttctagaagcctatgtatggacacggtgcttgcatgtaccgtttagaattattactttactaccgggaagagaactcattgaagcggttttattctagctagctagggagagaaacgctaagccagggtgatgttcatggtggtacattcttttgcaaatatgtatttaattttaagcagttctatatgggtgaactactataggcattgcaggagttacttcaattgctttgcgtgtttatgccattgcatgtacaaaagaattgcacctttttcactagcatattgataacattgctttcac

SEQ ID NO: 8037 - protein, 305 aa, Glycine max
  peptide (1)..(305): Ceres Seq. ID no. 15179927
  misc_feature (39)..(146): Pfam Name: Pfam Description:  Syntaxin
  misc_feature (1)..(301): NCBI GI NO: 4206787 NR Description: syntaxin-related protein Nt-syr1
  misc_feature (1)..(302): NCBI GI NO: 15229865 NR Description: syntaxin of plants SYP121 [Arabidopsis thaliana]
  misc_feature (1)..(299): NCBI GI NO: 11358871 NR Description: syntaxin synt4 [imported] - Arabidopsis thaliana
  misc_feature (1)..(299): NCBI GI NO: 15231205 NR Description: syntaxin of plants SYP122 [Arabidopsis thaliana]
  misc_feature (1)..(302): NCBI GI NO: 15220328 NR Description: syntaxin of plants SYP125 [Arabidopsis thaliana]
  misc_feature (1)..(300): NCBI GI NO: 15219900 NR Description: syntaxin of plants SYP124 [Arabidopsis thaliana]
  misc_feature (1)..(302): NCBI GI NO: 15236285 NR Description: syntaxin of plants SYP123 [Arabidopsis thaliana]
  misc_feature (1)..(301): NCBI GI NO: 28974542 NR Description: knolle [Antirrhinum majus]
  misc_feature (1)..(301): NCBI GI NO: 29788865 NR Description: putative cytokinesis-specific syntaxin-relatedprotein
  misc_feature (1)..(301): NCBI GI NO: 5912543 NR Description: Knolle [Capsicum annuum]
MNDLFSGSFSRTNDQVSPDHHHVIEMAATASPTAEGSVNLEKFFQEVEQVKEELKELERLHENLRGSHEKSKILHSAKAVKELRLRMDSDVTLALKNAKLVKVRLEALDRSNQTSQSLPGSGPGSSSDRTRTSVVSGLRKKLKDSMDSFNSLRQKISSEYRETVQRRYYTVTGENPDDKTIDLLISTGESETFLQKAIQQQGRASVMDTIQEIQERHDTVKEIERNLNELHQVFLDMAVLVQSQGEQLDDIESHVARANSYVRGGVQQLHVARKHQKNTRKWTCIAIILLIIIILIIVLPIVLRN

SEQ ID NO: 8038 - protein, 280 aa, Glycine max
  peptide (1)..(280): Ceres Seq. ID no. 15179928
  misc_feature (14)..(121): Pfam Name: Pfam Description:  Syntaxin
  misc_feature (1)..(276): NCBI GI NO: 4206787 NR Description: syntaxin-related protein Nt-syr1
  misc_feature (1)..(277): NCBI GI NO: 15229865 NR Description: syntaxin of plants SYP121 [Arabidopsis thaliana]
  misc_feature (1)..(274): NCBI GI NO: 11358871 NR Description: syntaxin synt4 [imported] - Arabidopsis thaliana
  misc_feature (1)..(274): NCBI GI NO: 15231205 NR Description: syntaxin of plants SYP122 [Arabidopsis thaliana]
  misc_feature (1)..(277): NCBI GI NO: 15220328 NR Description: syntaxin of plants SYP125 [Arabidopsis thaliana]
  misc_feature (1)..(275): NCBI GI NO: 15219900 NR Description: syntaxin of plants SYP124 [Arabidopsis thaliana]
  misc_feature (1)..(277): NCBI GI NO: 15236285 NR Description: syntaxin of plants SYP123 [Arabidopsis thaliana]
  misc_feature (1)..(276): NCBI GI NO: 28974542 NR Description: knolle [Antirrhinum majus]
  misc_feature (1)..(276): NCBI GI NO: 29788865 NR Description: putative cytokinesis-specific syntaxin-relatedprotein
  misc_feature (1)..(276): NCBI GI NO: 5912543 NR Description: Knolle [Capsicum annuum]
MAATASPTAEGSVNLEKFFQEVEQVKEELKELERLHENLRGSHEKSKILHSAKAVKELRLRMDSDVTLALKNAKLVKVRLEALDRSNQTSQSLPGSGPGSSSDRTRTSVVSGLRKKLKDSMDSFNSLRQKISSEYRETVQRRYYTVTGENPDDKTIDLLISTGESETFLQKAIQQQGRASVMDTIQEIQERHDTVKEIERNLNELHQVFLDMAVLVQSQGEQLDDIESHVARANSYVRGGVQQLHVARKHQKNTRKWTCIAIILLIIIILIIVLPIVLRN

SEQ ID NO: 8039 - protein, 219 aa, Glycine max
  peptide (1)..(219): Ceres Seq. ID no. 15179929
  misc_feature (1)..(60): Pfam Name: Pfam Description:  Syntaxin
  misc_feature (1)..(215): NCBI GI NO: 4206787 NR Description: syntaxin-related protein Nt-syr1
  misc_feature (1)..(216): NCBI GI NO: 15229865 NR Description: syntaxin of plants SYP121 [Arabidopsis thaliana]
  misc_feature (1)..(213): NCBI GI NO: 11358871 NR Description: syntaxin synt4 [imported] - Arabidopsis thaliana
  misc_feature (1)..(213): NCBI GI NO: 15231205 NR Description: syntaxin of plants SYP122 [Arabidopsis thaliana]
  misc_feature (1)..(216): NCBI GI NO: 15220328 NR Description: syntaxin of plants SYP125 [Arabidopsis thaliana]
  misc_feature (1)..(214): NCBI GI NO: 15219900 NR Description: syntaxin of plants SYP124 [Arabidopsis thaliana]
  misc_feature (1)..(216): NCBI GI NO: 15236285 NR Description: syntaxin of plants SYP123 [Arabidopsis thaliana]
  misc_feature (1)..(215): NCBI GI NO: 28974542 NR Description: knolle [Antirrhinum majus]
  misc_feature (1)..(215): NCBI GI NO: 29788865 NR Description: putative cytokinesis-specific syntaxin-relatedprotein
  misc_feature (1)..(215): NCBI GI NO: 5912543 NR Description: Knolle [Capsicum annuum]
MDSDVTLALKNAKLVKVRLEALDRSNQTSQSLPGSGPGSSSDRTRTSVVSGLRKKLKDSMDSFNSLRQKISSEYRETVQRRYYTVTGENPDDKTIDLLISTGESETFLQKAIQQQGRASVMDTIQEIQERHDTVKEIERNLNELHQVFLDMAVLVQSQGEQLDDIESHVARANSYVRGGVQQLHVARKHQKNTRKWTCIAIILLIIIILIIVLPIVLRN

SEQ ID NO: 8040 - DNA, 1647 bp, Glycine max
  misc_feature (1)..(1647): Ceres Seq. ID no. 14315457
cttgtgttttatggtgtcgtagcctcctccaaaaacagagaagcaccatctcctaacactgctcaaaagcgaaggatggaggttgttttggcgtcgtcgtccgtcgacggcggaatagggtgctgggaccttcacaccggcgcggagcagctccgctacaaatcttgcacctccccttctcatggcctcgtctctgtcgctgctcgcttcatcgcttcgtcgcagcttcgagaagatcaatcagcccctggctctgttctcttctggtcctggtccaagcctcaagttgaagtgaagagttttcctgctgaacaaattaaacctcttgctactaatcacccgggaacctttatagctgctggagctccgtctggtgacatttacttgtgggaggttgaaacgggtaggttgcttaagaagtggcatgctcattttagggcggtttcttgcttggtgttttccgaagatgactcgctgctggtatctggttctgaagatggatccgtaagagtttggtctctcttcatgatatttgatgatttgcgaaatcagcaagcaagtagtctttatgagtatagtttttcagagcacaccctgactgtgactgatgttgttattggtaatggagggtgcaatgcgattatcgtgtcagcttcaaaggatcggacttgtaaggtatggagcttatctaggggaatgctactaagaaatatagtattcccttcaataattaattgcattgcattggatccagccgaacatgtcttttatgctggcagtgaagatggaaagatatttatcgcagcacttaacactgaaagcatcgccactaataattatgggatgcatatcatcagttctttttctaaccacagcaaccaagttacttgcttagcatatggctcaagtgagaatttgttaatatctgggtcagaggatggaatggttcgtgtttggaatgcgagaactcgtaacattgtccgcatgtttaaacattctaaaggacctgtaaataacattctcgttgttagacgagaaaatgactccagtaatcacatatcttctaatgtacaagcatcatcaagaaagcagggatctaatttaccccctccattggaaaaatatgcaaattcaatagatgacgactcagatatgaagactatgatcagccttgggggtggcaggaaatctgtggatccttcatacatcagttctcatgtgatatctaattacattaaggaacttcagcatcaaggttcagctgctgcttctgaaatggagatggagaaactaaaacatgattaccaaaagtcagtgcaaatggctaaccagttgaagaaaatgaatgaaaaattgcatcaattttgtgtaaaggagctgttggatggtagtcaagctagaaccttgggtgaaaatgacaattaagacatttttttttctcttgccagtcacttttctattttgtaggtaaaatgtgtaggatctctggcatcagtagattcccttctgcgagtttgcaattcttcaatgctgctattatattatttttgttgcccctcgtcccctttctctcggtgtgttttgctgctgaatgttgtaaaaagaattttcatcttttgtggatacgataaaagaattgatttctac

SEQ ID NO: 8041 - protein, 449 aa, Glycine max
  peptide (1)..(449): Ceres Seq. ID no. 14315458
  misc_feature (111)..(148): Pfam Name: Pfam Description:  WD domain, G-beta repeat
  misc_feature (1)..(434): NCBI GI NO: 15229101 NR Description: transducin / WD-40 repeat protein family
  misc_feature (1)..(434): NCBI GI NO: 21592898 NR Description: unknown [Arabidopsis thaliana]
  misc_feature (2)..(266): NCBI GI NO: 33354207 NR Description: transducin / WD-40 repeat protein family -likeprotein
  misc_feature (1)..(381): NCBI GI NO: 20128895 NR Description: CG14805-PA [Drosophila melanogaster]
  misc_feature (1)..(381): NCBI GI NO: 20151747 NR Description: RE49866p [Drosophila melanogaster]
  misc_feature (1)..(317): NCBI GI NO: 34862331 NR Description: similar to WD-repeat protein 18
  misc_feature (1)..(318): NCBI GI NO: 33859749 NR Description: WD repeat domain 18 [Homo sapiens]
  misc_feature (107)..(266): NCBI GI NO: 34897604 NR Description: G-protein beta family-like protein
  misc_feature (1)..(318): NCBI GI NO: 3025445 NR Description: R32184_1 [Homo sapiens]
  misc_feature (1)..(242): NCBI GI NO: 7511885 NR Description: hypothetical protein 63B12
MEVVLASSSVDGGIGCWDLHTGAEQLRYKSCTSPSHGLVSVAARFIASSQLREDQSAPGSVLFWSWSKPQVEVKSFPAEQIKPLATNHPGTFIAAGAPSGDIYLWEVETGRLLKKWHAHFRAVSCLVFSEDDSLLVSGSEDGSVRVWSLFMIFDDLRNQQASSLYEYSFSEHTLTVTDVVIGNGGCNAIIVSASKDRTCKVWSLSRGMLLRNIVFPSIINCIALDPAEHVFYAGSEDGKIFIAALNTESIATNNYGMHIISSFSNHSNQVTCLAYGSSENLLISGSEDGMVRVWNARTRNIVRMFKHSKGPVNNILVVRRENDSSNHISSNVQASSRKQGSNLPPPLEKYANSIDDDSDMKTMISLGGGRKSVDPSYISSHVISNYIKELQHQGSAAASEMEMEKLKHDYQKSVQMANQLKKMNEKLHQFCVKELLDGSQARTLGENDN

SEQ ID NO: 8042 - protein, 299 aa, Glycine max
  peptide (1)..(299): Ceres Seq. ID no. 14315459
  misc_feature (1)..(284): NCBI GI NO: 15229101 NR Description: transducin / WD-40 repeat protein family
  misc_feature (1)..(284): NCBI GI NO: 21592898 NR Description: unknown [Arabidopsis thaliana]
  misc_feature (1)..(116): NCBI GI NO: 33354207 NR Description: transducin / WD-40 repeat protein family -likeprotein
  misc_feature (1)..(231): NCBI GI NO: 20128895 NR Description: CG14805-PA [Drosophila melanogaster]
  misc_feature (1)..(231): NCBI GI NO: 20151747 NR Description: RE49866p [Drosophila melanogaster]
  misc_feature (1)..(167): NCBI GI NO: 34862331 NR Description: similar to WD-repeat protein 18
  misc_feature (1)..(168): NCBI GI NO: 33859749 NR Description: WD repeat domain 18 [Homo sapiens]
  misc_feature (1)..(116): NCBI GI NO: 34897604 NR Description: G-protein beta family-like protein
  misc_feature (1)..(168): NCBI GI NO: 3025445 NR Description: R32184_1 [Homo sapiens]
  misc_feature (1)..(92): NCBI GI NO: 7511885 NR Description: hypothetical protein 63B12
MIFDDLRNQQASSLYEYSFSEHTLTVTDVVIGNGGCNAIIVSASKDRTCKVWSLSRGMLLRNIVFPSIINCIALDPAEHVFYAGSEDGKIFIAALNTESIATNNYGMHIISSFSNHSNQVTCLAYGSSENLLISGSEDGMVRVWNARTRNIVRMFKHSKGPVNNILVVRRENDSSNHISSNVQASSRKQGSNLPPPLEKYANSIDDDSDMKTMISLGGGRKSVDPSYISSHVISNYIKELQHQGSAAASEMEMEKLKHDYQKSVQMANQLKKMNEKLHQFCVKELLDGSQARTLGENDN

SEQ ID NO: 8043 - protein, 474 aa, Glycine max
  peptide (1)..(474): Ceres Seq. ID no. 14315460
  misc_feature (136)..(173): Pfam Name: Pfam Description:  WD domain, G-beta repeat
  misc_feature (26)..(459): NCBI GI NO: 15229101 NR Description: transducin / WD-40 repeat protein family
  misc_feature (26)..(459): NCBI GI NO: 21592898 NR Description: unknown [Arabidopsis thaliana]
  misc_feature (27)..(291): NCBI GI NO: 33354207 NR Description: transducin / WD-40 repeat protein family -likeprotein
  misc_feature (26)..(406): NCBI GI NO: 20128895 NR Description: CG14805-PA [Drosophila melanogaster]
  misc_feature (26)..(406): NCBI GI NO: 20151747 NR Description: RE49866p [Drosophila melanogaster]
  misc_feature (26)..(342): NCBI GI NO: 34862331 NR Description: similar to WD-repeat protein 18
  misc_feature (26)..(343): NCBI GI NO: 33859749 NR Description: WD repeat domain 18 [Homo sapiens]
  misc_feature (132)..(291): NCBI GI NO: 34897604 NR Description: G-protein beta family-like protein
  misc_feature (26)..(343): NCBI GI NO: 3025445 NR Description: R32184_1 [Homo sapiens]
  misc_feature (26)..(267): NCBI GI NO: 7511885 NR Description: hypothetical protein 63B12
LVFYGVVASSKNREAPSPNTAQKRRMEVVLASSSVDGGIGCWDLHTGAEQLRYKSCTSPSHGLVSVAARFIASSQLREDQSAPGSVLFWSWSKPQVEVKSFPAEQIKPLATNHPGTFIAAGAPSGDIYLWEVETGRLLKKWHAHFRAVSCLVFSEDDSLLVSGSEDGSVRVWSLFMIFDDLRNQQASSLYEYSFSEHTLTVTDVVIGNGGCNAIIVSASKDRTCKVWSLSRGMLLRNIVFPSIINCIALDPAEHVFYAGSEDGKIFIAALNTESIATNNYGMHIISSFSNHSNQVTCLAYGSSENLLISGSEDGMVRVWNARTRNIVRMFKHSKGPVNNILVVRRENDSSNHISSNVQASSRKQGSNLPPPLEKYANSIDDDSDMKTMISLGGGRKSVDPSYISSHVISNYIKELQHQGSAAASEMEMEKLKHDYQKSVQMANQLKKMNEKLHQFCVKELLDGSQARTLGENDN

SEQ ID NO: 8044 - DNA, 1689 bp, Glycine max
  misc_feature (1)..(1689): Ceres Seq. ID no. 14315021
aacatacacttcttctattgcgacccatttttccaatccacaatcgtgggagtgagcgaacaactacaaagggatattagatactattgtgagtgagtgcgtgcgattcattgtgtttgtgtagtagtgactttgggttgggtttcgtctcaactcaacaaacgtcgtcgttctgcatttcccaaccttcctccaatggcttctgcttccttaatcaactcgttgacttgttcttcgcgtgctcccactcagcactgttccactttcacccgcaccaccgccgccacgtcactgagacaatttaacagccactgtcggagaccactcgcgacgaggatctcgccgccttccaccgttgtctgcaaagctgtctccgttaagccccaaaccgaaatcgaaggtctcaacattgctgaagatgtcacccagctcatagggaaaacgccaatggtttacctgaacaatatcgtgaagggttctgtggccaatattgctgccaagcttgagattatggagccctgttgtagtgtaaaggacaggattggttttagtatgataaatgatgctgagcagagaggagctataacacctgggaagagtatattggtggaacctactagcggcaacaccggaattggtcttgcctttatagcagcttcaagaggttataaactcattttgacaatgcctgcttcaatgagtttagaaagacgagttctcttgaaagcatttggggccgagcttgttttgactgatgcagcaaagggcatgaatggagcagttcaaaaagctgaagaaattttaaaaagtacccccaatgcatacatgcttcaacaatttgataatccttcaaatcctaagattcattatgagacaactggcccagagatatgggaagatacaagaggaaagatagatattttagttgcaggaattggaactggtggaactgtttctggagttggccaattcctaaaacaacaaaatccaaaaatacaggttattggtgtagagcctctggaaagcaacatacttactggcggaaagccaggacctcacaaaattcagggtattggggctggttttgtgcccaggaatttggatcaagatgtgcttgatgaagttatagcgatatcaagtgatgaagcagttgaaactgcaaagcaattagcactccaggaaggcttgctggtgggaatttcttcaggagctgctgctgcagctgctttgaaggttggaaagaggcctgagaatgcaggcaagcttattggggttgtcttcccaagctttggtgaaagatatttgtctactattcttttccagtcaattcgggaagaatgcgagaaaatgcaacctgagccatgaattgactttgcttgttaatgtttcatactcattctccacgagtatctgtatgtaaatgacagtgtgacatgtccatgttatgtccgtgtttctcatttttgacactcaagaaattagataactgtgtaaaggtcattgacttgacttacagcacagatcaatggcccttgattgaataagttttttttccttctctctttgggctaaaacttttagatgtagtaggaattactggcattgctcttctttttgtatggcagcgtaagaaatttctgtctaatgttcgctattaaaaaataattgatgaaacagtttatctgttgc

SEQ ID NO: 8045 - protein, 389 aa, Glycine max
  peptide (1)..(389): Ceres Seq. ID no. 14315022
  misc_feature (76)..(365): Pfam Name: Pfam Description:  Pyridoxal-phosphate dependent enzyme
  misc_feature (47)..(388): NCBI GI NO: 12081919 NR Description: plastidic cysteine synthase 1 [Solanum tuberosum]
  misc_feature (47)..(388): NCBI GI NO: 11131628 NR Description: Cysteine synthase, chloroplast precursor
  misc_feature (1)..(388): NCBI GI NO: 22331875 NR Description: cysteine synthase, mitochondrial
  misc_feature (1)..(388): NCBI GI NO: 30695056 NR Description: cysteine synthase, mitochondrial
  misc_feature (1)..(388): NCBI GI NO: 12643295 NR Description: CYSTEINE SYNTHASE, MITOCHONDRIAL PRECURSOR
  misc_feature (2)..(388): NCBI GI NO: 15224351 NR Description: cysteine synthase, chloroplast
  misc_feature (6)..(388): NCBI GI NO: 25291707 NR Description: cysteine synthase (EC 4
  misc_feature (52)..(388): NCBI GI NO: 303902 NR Description: cysteine synthase [Spinacia oleracea]
  misc_feature (52)..(388): NCBI GI NO: 12644209 NR Description: CYSTEINE SYNTHASE, CHLOROPLAST PRECURSOR
  misc_feature (2)..(388): NCBI GI NO: 572517 NR Description: cysteine synthase [Arabidopsis thaliana]
MASASLINSLTCSSRAPTQHCSTFTRTTAATSLRQFNSHCRRPLATRISPPSTVVCKAVSVKPQTEIEGLNIAEDVTQLIGKTPMVYLNNIVKGSVANIAAKLEIMEPCCSVKDRIGFSMINDAEQRGAITPGKSILVEPTSGNTGIGLAFIAASRGYKLILTMPASMSLERRVLLKAFGAELVLTDAAKGMNGAVQKAEEILKSTPNAYMLQQFDNPSNPKIHYETTGPEIWEDTRGKIDILVAGIGTGGTVSGVGQFLKQQNPKIQVIGVEPLESNILTGGKPGPHKIQGIGAGFVPRNLDQDVLDEVIAISSDEAVETAKQLALQEGLLVGISSGAAAAAALKVGKRPENAGKLIGVVFPSFGERYLSTILFQSIREECEKMQPEP

SEQ ID NO: 8046 - protein, 305 aa, Glycine max
  peptide (1)..(305): Ceres Seq. ID no. 14315023
  misc_feature (1)..(281): Pfam Name: Pfam Description:  Pyridoxal-phosphate dependent enzyme
  misc_feature (1)..(304): NCBI GI NO: 12081919 NR Description: plastidic cysteine synthase 1 [Solanum tuberosum]
  misc_feature (1)..(304): NCBI GI NO: 11131628 NR Description: Cysteine synthase, chloroplast precursor
  misc_feature (1)..(304): NCBI GI NO: 22331875 NR Description: cysteine synthase, mitochondrial
  misc_feature (1)..(304): NCBI GI NO: 30695056 NR Description: cysteine synthase, mitochondrial
  misc_feature (1)..(304): NCBI GI NO: 12643295 NR Description: CYSTEINE SYNTHASE, MITOCHONDRIAL PRECURSOR
  misc_feature (1)..(304): NCBI GI NO: 15224351 NR Description: cysteine synthase, chloroplast
  misc_feature (1)..(304): NCBI GI NO: 25291707 NR Description: cysteine synthase (EC 4
  misc_feature (1)..(304): NCBI GI NO: 303902 NR Description: cysteine synthase [Spinacia oleracea]
  misc_feature (1)..(304): NCBI GI NO: 12644209 NR Description: CYSTEINE SYNTHASE, CHLOROPLAST PRECURSOR
  misc_feature (1)..(304): NCBI GI NO: 572517 NR Description: cysteine synthase [Arabidopsis thaliana]
MVYLNNIVKGSVANIAAKLEIMEPCCSVKDRIGFSMINDAEQRGAITPGKSILVEPTSGNTGIGLAFIAASRGYKLILTMPASMSLERRVLLKAFGAELVLTDAAKGMNGAVQKAEEILKSTPNAYMLQQFDNPSNPKIHYETTGPEIWEDTRGKIDILVAGIGTGGTVSGVGQFLKQQNPKIQVIGVEPLESNILTGGKPGPHKIQGIGAGFVPRNLDQDVLDEVIAISSDEAVETAKQLALQEGLLVGISSGAAAAAALKVGKRPENAGKLIGVVFPSFGERYLSTILFQSIREECEKMQPEP

SEQ ID NO: 8047 - protein, 284 aa, Glycine max
  peptide (1)..(284): Ceres Seq. ID no. 14315024
  misc_feature (1)..(260): Pfam Name: Pfam Description:  Pyridoxal-phosphate dependent enzyme
  misc_feature (1)..(283): NCBI GI NO: 12081919 NR Description: plastidic cysteine synthase 1 [Solanum tuberosum]
  misc_feature (1)..(283): NCBI GI NO: 11131628 NR Description: Cysteine synthase, chloroplast precursor
  misc_feature (1)..(283): NCBI GI NO: 22331875 NR Description: cysteine synthase, mitochondrial
  misc_feature (1)..(283): NCBI GI NO: 30695056 NR Description: cysteine synthase, mitochondrial
  misc_feature (1)..(283): NCBI GI NO: 12643295 NR Description: CYSTEINE SYNTHASE, MITOCHONDRIAL PRECURSOR
  misc_feature (1)..(283): NCBI GI NO: 15224351 NR Description: cysteine synthase, chloroplast
  misc_feature (1)..(283): NCBI GI NO: 25291707 NR Description: cysteine synthase (EC 4
  misc_feature (1)..(283): NCBI GI NO: 303902 NR Description: cysteine synthase [Spinacia oleracea]
  misc_feature (1)..(283): NCBI GI NO: 12644209 NR Description: CYSTEINE SYNTHASE, CHLOROPLAST PRECURSOR
  misc_feature (1)..(283): NCBI GI NO: 572517 NR Description: cysteine synthase [Arabidopsis thaliana]
MEPCCSVKDRIGFSMINDAEQRGAITPGKSILVEPTSGNTGIGLAFIAASRGYKLILTMPASMSLERRVLLKAFGAELVLTDAAKGMNGAVQKAEEILKSTPNAYMLQQFDNPSNPKIHYETTGPEIWEDTRGKIDILVAGIGTGGTVSGVGQFLKQQNPKIQVIGVEPLESNILTGGKPGPHKIQGIGAGFVPRNLDQDVLDEVIAISSDEAVETAKQLALQEGLLVGISSGAAAAAALKVGKRPENAGKLIGVVFPSFGERYLSTILFQSIREECEKMQPEP

SEQ ID NO: 8048 - DNA, 1589 bp, Glycine max
  misc_feature (1)..(1589): Ceres Seq. ID no. 15168513
gttacatttcttaccctctttgactctctctagtgtcatcaaatgggtacccccggaaatgatgaaccaggtacccagaccccacaaaacacaaaaagttctccccttttcagatacaattcacccttcattcagatcgttttaattgggttggtctgtttctgttgcccgggaatgttcaacgccctctccggcatgggtggcggtggccaagtcaacgcaaccgcctccaacaacgccctcaccgccctctacaccaccttcgccatcttcggcatcctcggcggcggcatctacaacattctcggaccccacctcaccctcttcgcaggttgctccacctacgtcctctacgcaggctccttcctctactacaaccactaccagcaccagttcttcgccatcgtcgccggcgccatcctcggcgtcggcgcagggctcctctgggccgcgcagggcgccatcatgacctcctaccctccggagaatcggaaaggcacttacatttccatcttctggagcatcttcaacatggggggtgtcatcggtggcctaattcccttcattctcaattacaatcgcggtgactcagctgtcactgtcaacgacggaacctacataggattcatggtatttatggccgttggggctgttctgtcgttgaccattttacccgctagcaaggttgttcgcgacgatgggactcggtgtactaaaatgttgtactccaatgcggcaactgaatccgttgaaattctcaagcttttctacaactggaagatgcttctcattattcccgctgcttggtctagtaattttttttatacctaccagtttaaccatgttaataagccgcagttcaatttgaggactagagggttcaacaatgtgttctattggggggcgcagatggtgggttcggttgggattgggtatgtgatggatttcagctttaggagcaggaggaagagaggggttgtggggattggtgtggttgctcttcttgcttctgctatttggggtggtgcacttgcgaatcagattaagcatgaccccggggtgatcttggatttcaaggactccggttctcgctatgctgggccttttgttttgtatttcagttttgggttgcttgatgccgtgttccaaagcatggtctattgggttatcggtgccctggccaatgattctgagattcttagcaggtatgctgggttctataaaggcatacaaagtgcaggggcagcagtggcttggcaaattgataaccataatgtgtccgctatggctcagttgattgtgaattgggtgctcactactgtgagctatccgttgttgttgattttggttgttttggctgtgaaagaaggagacaacaggggagaagaggaacctgtcaaagaggttgctggctttgcccactgatattgttttgttacctgtaaaaatcaactgcatattttgtctttatttctgttatcttgtttttcattgttaccattgtcatcacatataaaagtctgaaatggatgaagatttatctgtatgagttcatgcgtcggagaatattaaaggcaacaaattaatgc

SEQ ID NO: 8049 - protein, 460 aa, Glycine max
  peptide (1)..(460): Ceres Seq. ID no. 15168514
  misc_feature (26)..(176): Pfam Name: DUF895 Pfam Description: Eukaryotic protein of unknown function
  misc_feature (15)..(445): NCBI GI NO: 18394560 NR Description: expressed protein [Arabidopsis thaliana]
  misc_feature (15)..(445): NCBI GI NO: 21536696 NR Description: unknown [Arabidopsis thaliana]
  misc_feature (25)..(408): NCBI GI NO: 32419955 NR Description: hypothetical protein [Neurospora crassa]
  misc_feature (25)..(455): NCBI GI NO: 38110995 NR Description: hypothetical protein MG06605.4
  misc_feature (15)..(453): NCBI GI NO: 40745401 NR Description: hypothetical protein AN1427.2
  misc_feature (25)..(424): NCBI GI NO: 19115917 NR Description: hypothetical protein [Schizosaccharomyces pombe]
  misc_feature (1)..(456): NCBI GI NO: 40740559 NR Description: hypothetical protein AN8127.2
  misc_feature (31)..(450): NCBI GI NO: 19114809 NR Description: hypothetical protein [Schizosaccharomyces pombe]
  misc_feature (3)..(442): NCBI GI NO: 40743917 NR Description: hypothetical protein AN2699.2
  misc_feature (6)..(460): NCBI GI NO: 40745511 NR Description: hypothetical protein AN2562.2
MGTPGNDEPGTQTPQNTKSSPLFRYNSPFIQIVLIGLVCFCCPGMFNALSGMGGGGQVNATASNNALTALYTTFAIFGILGGGIYNILGPHLTLFAGCSTYVLYAGSFLYYNHYQHQFFAIVAGAILGVGAGLLWAAQGAIMTSYPPENRKGTYISIFWSIFNMGGVIGGLIPFILNYNRGDSAVTVNDGTYIGFMVFMAVGAVLSLTILPASKVVRDDGTRCTKMLYSNAATESVEILKLFYNWKMLLIIPAAWSSNFFYTYQFNHVNKPQFNLRTRGFNNVFYWGAQMVGSVGIGYVMDFSFRSRRKRGVVGIGVVALLASAIWGGALANQIKHDPGVILDFKDSGSRYAGPFVLYFSFGLLDAVFQSMVYWVIGALANDSEILSRYAGFYKGIQSAGAAVAWQIDNHNVSAMAQLIVNWVLTTVSYPLLLILVVLAVKEGDNRGEEEPVKEVAGFAH

SEQ ID NO: 8050 - protein, 416 aa, Glycine max
  peptide (1)..(416): Ceres Seq. ID no. 15168515
  misc_feature (1)..(132): Pfam Name: DUF895 Pfam Description: Eukaryotic protein of unknown function
  misc_feature (1)..(401): NCBI GI NO: 18394560 NR Description: expressed protein [Arabidopsis thaliana]
  misc_feature (1)..(401): NCBI GI NO: 21536696 NR Description: unknown [Arabidopsis thaliana]
  misc_feature (1)..(364): NCBI GI NO: 32419955 NR Description: hypothetical protein [Neurospora crassa]
  misc_feature (1)..(411): NCBI GI NO: 38110995 NR Description: hypothetical protein MG06605.4
  misc_feature (1)..(409): NCBI GI NO: 40745401 NR Description: hypothetical protein AN1427.2
  misc_feature (1)..(380): NCBI GI NO: 19115917 NR Description: hypothetical protein [Schizosaccharomyces pombe]
  misc_feature (1)..(412): NCBI GI NO: 40740559 NR Description: hypothetical protein AN8127.2
  misc_feature (1)..(406): NCBI GI NO: 19114809 NR Description: hypothetical protein [Schizosaccharomyces pombe]
  misc_feature (1)..(398): NCBI GI NO: 40743917 NR Description: hypothetical protein AN2699.2
  misc_feature (1)..(416): NCBI GI NO: 40745511 NR Description: hypothetical protein AN2562.2
MFNALSGMGGGGQVNATASNNALTALYTTFAIFGILGGGIYNILGPHLTLFAGCSTYVLYAGSFLYYNHYQHQFFAIVAGAILGVGAGLLWAAQGAIMTSYPPENRKGTYISIFWSIFNMGGVIGGLIPFILNYNRGDSAVTVNDGTYIGFMVFMAVGAVLSLTILPASKVVRDDGTRCTKMLYSNAATESVEILKLFYNWKMLLIIPAAWSSNFFYTYQFNHVNKPQFNLRTRGFNNVFYWGAQMVGSVGIGYVMDFSFRSRRKRGVVGIGVVALLASAIWGGALANQIKHDPGVILDFKDSGSRYAGPFVLYFSFGLLDAVFQSMVYWVIGALANDSEILSRYAGFYKGIQSAGAAVAWQIDNHNVSAMAQLIVNWVLTTVSYPLLLILVVLAVKEGDNRGEEEPVKEVAGFAH

SEQ ID NO: 8051 - protein, 409 aa, Glycine max
  peptide (1)..(409): Ceres Seq. ID no. 15168516
  misc_feature (1)..(125): Pfam Name: DUF895 Pfam Description: Eukaryotic protein of unknown function
  misc_feature (1)..(394): NCBI GI NO: 18394560 NR Description: expressed protein [Arabidopsis thaliana]
  misc_feature (1)..(394): NCBI GI NO: 21536696 NR Description: unknown [Arabidopsis thaliana]
  misc_feature (1)..(357): NCBI GI NO: 32419955 NR Description: hypothetical protein [Neurospora crassa]
  misc_feature (1)..(404): NCBI GI NO: 38110995 NR Description: hypothetical protein MG06605.4
  misc_feature (1)..(402): NCBI GI NO: 40745401 NR Description: hypothetical protein AN1427.2
  misc_feature (1)..(373): NCBI GI NO: 19115917 NR Description: hypothetical protein [Schizosaccharomyces pombe]
  misc_feature (1)..(405): NCBI GI NO: 40740559 NR Description: hypothetical protein AN8127.2
  misc_feature (1)..(399): NCBI GI NO: 19114809 NR Description: hypothetical protein [Schizosaccharomyces pombe]
  misc_feature (1)..(391): NCBI GI NO: 40743917 NR Description: hypothetical protein AN2699.2
  misc_feature (1)..(409): NCBI GI NO: 40745511 NR Description: hypothetical protein AN2562.2
MGGGGQVNATASNNALTALYTTFAIFGILGGGIYNILGPHLTLFAGCSTYVLYAGSFLYYNHYQHQFFAIVAGAILGVGAGLLWAAQGAIMTSYPPENRKGTYISIFWSIFNMGGVIGGLIPFILNYNRGDSAVTVNDGTYIGFMVFMAVGAVLSLTILPASKVVRDDGTRCTKMLYSNAATESVEILKLFYNWKMLLIIPAAWSSNFFYTYQFNHVNKPQFNLRTRGFNNVFYWGAQMVGSVGIGYVMDFSFRSRRKRGVVGIGVVALLASAIWGGALANQIKHDPGVILDFKDSGSRYAGPFVLYFSFGLLDAVFQSMVYWVIGALANDSEILSRYAGFYKGIQSAGAAVAWQIDNHNVSAMAQLIVNWVLTTVSYPLLLILVVLAVKEGDNRGEEEPVKEVAGFAH

SEQ ID NO: 8052 - DNA, 1485 bp, Glycine max
  misc_feature (1)..(1485): Ceres Seq. ID no. 14315491
gagagagagagagagaacttcactcactcactcatgggctgcgtctcctcaaaacacatcaagaaagacctcaagcaagaagaagaagtcactgtcaccaatggcggcggttacgtgaaccacgtggtatccctgacttcctccacctatggagcactaatgctggacaaggagaaggagcaacttcaacttcaacccaccgtcgaagaagaatccaaaacatcccctcctcggattcgcgaagaacccgaagtcatcaacgcttgggaactcatggagggtctcgaagagggagtgcccatttcaaataaccccatgaaaagccccaagtccacacctttccttcgcggattcatctccaccgacccaaaacccaaaattacccccttcaaattccttaaccaattcgggtcccccaagagtctcaggaagttcacagggaaagagaacaaagttcaagttcaaccacccaatgctggtgttagacgcttggactacaatttcagcccaaagggtattctcaaaccctccaatttttgttctcctctaaaagggtctccgattcgtgctcgaaggaacagtttcgggaccgacattaagcgaaggagtcctagtcctctgttcgatccagagcttctcgcctcttacgaaaaggaactctccgaagaggaagaacagatcaagagaatggtgtgggccacccccaagacccgaagagtcagaaaacctttggattcacaaactttcattaagacgtttgaggaaaaattgccccctggaggagaaaactgcgttgtcatttacaccaccacgttacgggggatcagaaaaacgtttgaggagtgcaacaaggtaaggtccattgtcgagtcctattgcgtgcacgtggtggagcgtgacgtgtcaatggattcggggtttaaggaggagttgcggaagctgatggggaccaaacaagttaaggttccggttgtgttcgtgaaaggaaggttggttgggggtgctgaggaaattgtgaagttggaagaagagggaaaattgggtgttctctttgaagggattccccacaaggctttgggggagtgtgaagggtgtggtggtgtgaggtttgtaatgtgcgtggagtgtaatggaagttgtaaggttttggatcatgagaatcacaagaagactctgaggtgtggccagtgtaatgagaatggattgattcagtgtcctatgtgtcgttgaggttgctgaaaatggagtgttggtttgggttttgggatggtttgtttctgttattgatttgtaggaagagagggacagaacaggcatgatgtgcatgtggtccgttgttaatttgtcatgttccttagtgtagggttctaaagcgtgttttagttccctttttgttgtttgattctgtagtttgtcatgtattttgggacactggttgttccttctctagtctaatttaatttgcactatcactagcttcttttt

SEQ ID NO: 8053 - protein, 409 aa, Glycine max
  peptide (1)..(409): Ceres Seq. ID no. 14315492
  misc_feature (265)..(350): Pfam Name: Pfam Description:  Glutaredoxin
  misc_feature (12)..(408): NCBI GI NO: 15237554 NR Description: expressed protein [Arabidopsis thaliana]
  misc_feature (55)..(408): NCBI GI NO: 38346321 NR Description: OJ000126_13.3
  misc_feature (181)..(408): NCBI GI NO: 15235179 NR Description: hypothetical protein [Arabidopsis thaliana]
  misc_feature (235)..(408): NCBI GI NO: 15223291 NR Description: expressed protein [Arabidopsis thaliana]
  misc_feature (253)..(408): NCBI GI NO: 15240974 NR Description: expressed protein [Arabidopsis thaliana]
  misc_feature (253)..(408): NCBI GI NO: 26451045 NR Description: unknown protein [Arabidopsis thaliana]
  misc_feature (253)..(408): NCBI GI NO: 15240060 NR Description: hypothetical protein [Arabidopsis thaliana]
  misc_feature (250)..(408): NCBI GI NO: 34899868 NR Description: OJ1714_H10.16
  misc_feature (241)..(408): NCBI GI NO: 15217659 NR Description: peptide transporter -related
  misc_feature (241)..(408): NCBI GI NO: 17381052 NR Description: putative peptide transporter protein
ERERENFTHSLMGCVSSKHIKKDLKQEEEVTVTNGGGYVNHVVSLTSSTYGALMLDKEKEQLQLQPTVEEESKTSPPRIREEPEVINAWELMEGLEEGVPISNNPMKSPKSTPFLRGFISTDPKPKITPFKFLNQFGSPKSLRKFTGKENKVQVQPPNAGVRRLDYNFSPKGILKPSNFCSPLKGSPIRARRNSFGTDIKRRSPSPLFDPELLASYEKELSEEEEQIKRMVWATPKTRRVRKPLDSQTFIKTFEEKLPPGGENCVVIYTTTLRGIRKTFEECNKVRSIVESYCVHVVERDVSMDSGFKEELRKLMGTKQVKVPVVFVKGRLVGGAEEIVKLEEEGKLGVLFEGIPHKALGECEGCGGVRFVMCVECNGSCKVLDHENHKKTLRCGQCNENGLIQCPMCR

SEQ ID NO: 8054 - protein, 398 aa, Glycine max
  peptide (1)..(398): Ceres Seq. ID no. 14315493
  misc_feature (254)..(339): Pfam Name: Pfam Description:  Glutaredoxin
  misc_feature (1)..(397): NCBI GI NO: 15237554 NR Description: expressed protein [Arabidopsis thaliana]
  misc_feature (44)..(397): NCBI GI NO: 38346321 NR Description: OJ000126_13.3
  misc_feature (170)..(397): NCBI GI NO: 15235179 NR Description: hypothetical protein [Arabidopsis thaliana]
  misc_feature (224)..(397): NCBI GI NO: 15223291 NR Description: expressed protein [Arabidopsis thaliana]
  misc_feature (242)..(397): NCBI GI NO: 15240974 NR Description: expressed protein [Arabidopsis thaliana]
  misc_feature (242)..(397): NCBI GI NO: 26451045 NR Description: unknown protein [Arabidopsis thaliana]
  misc_feature (242)..(397): NCBI GI NO: 15240060 NR Description: hypothetical protein [Arabidopsis thaliana]
  misc_feature (239)..(397): NCBI GI NO: 34899868 NR Description: OJ1714_H10.16
  misc_feature (230)..(397): NCBI GI NO: 15217659 NR Description: peptide transporter -related
  misc_feature (230)..(397): NCBI GI NO: 17381052 NR Description: putative peptide transporter protein
MGCVSSKHIKKDLKQEEEVTVTNGGGYVNHVVSLTSSTYGALMLDKEKEQLQLQPTVEEESKTSPPRIREEPEVINAWELMEGLEEGVPISNNPMKSPKSTPFLRGFISTDPKPKITPFKFLNQFGSPKSLRKFTGKENKVQVQPPNAGVRRLDYNFSPKGILKPSNFCSPLKGSPIRARRNSFGTDIKRRSPSPLFDPELLASYEKELSEEEEQIKRMVWATPKTRRVRKPLDSQTFIKTFEEKLPPGGENCVVIYTTTLRGIRKTFEECNKVRSIVESYCVHVVERDVSMDSGFKEELRKLMGTKQVKVPVVFVKGRLVGGAEEIVKLEEEGKLGVLFEGIPHKALGECEGCGGVRFVMCVECNGSCKVLDHENHKKTLRCGQCNENGLIQCPMCR

SEQ ID NO: 8055 - protein, 356 aa, Glycine max
  peptide (1)..(356): Ceres Seq. ID no. 14315494
  misc_feature (212)..(297): Pfam Name: Pfam Description:  Glutaredoxin
  misc_feature (1)..(355): NCBI GI NO: 15237554 NR Description: expressed protein [Arabidopsis thaliana]
  misc_feature (2)..(355): NCBI GI NO: 38346321 NR Description: OJ000126_13.3
  misc_feature (128)..(355): NCBI GI NO: 15235179 NR Description: hypothetical protein [Arabidopsis thaliana]
  misc_feature (182)..(355): NCBI GI NO: 15223291 NR Description: expressed protein [Arabidopsis thaliana]
  misc_feature (200)..(355): NCBI GI NO: 15240974 NR Description: expressed protein [Arabidopsis thaliana]
  misc_feature (200)..(355): NCBI GI NO: 26451045 NR Description: unknown protein [Arabidopsis thaliana]
  misc_feature (200)..(355): NCBI GI NO: 15240060 NR Description: hypothetical protein [Arabidopsis thaliana]
  misc_feature (197)..(355): NCBI GI NO: 34899868 NR Description: OJ1714_H10.16
  misc_feature (188)..(355): NCBI GI NO: 15217659 NR Description: peptide transporter -related
  misc_feature (188)..(355): NCBI GI NO: 17381052 NR Description: putative peptide transporter protein
MLDKEKEQLQLQPTVEEESKTSPPRIREEPEVINAWELMEGLEEGVPISNNPMKSPKSTPFLRGFISTDPKPKITPFKFLNQFGSPKSLRKFTGKENKVQVQPPNAGVRRLDYNFSPKGILKPSNFCSPLKGSPIRARRNSFGTDIKRRSPSPLFDPELLASYEKELSEEEEQIKRMVWATPKTRRVRKPLDSQTFIKTFEEKLPPGGENCVVIYTTTLRGIRKTFEECNKVRSIVESYCVHVVERDVSMDSGFKEELRKLMGTKQVKVPVVFVKGRLVGGAEEIVKLEEEGKLGVLFEGIPHKALGECEGCGGVRFVMCVECNGSCKVLDHENHKKTLRCGQCNENGLIQCPMCR

SEQ ID NO: 8056 - DNA, 1358 bp, Glycine max
  misc_feature (1)..(1358): Ceres Seq. ID no. 14312893
gttcgttccctctcaaccaaaaccaaccacttcatgttatcattgctatgacccttcaagcttttcatggctctgcatgttgtttccgttcccaccttcttcacttttcttcttccaccgcttcatctccaccattccttgcttcgaggaggttccaatcatgcccttcaacaagaaaatctctcaagttgaattgcagttcaagtggcaataatggtgaccaagattaccttctggatgctccagtttctgttggagatggattctctttcagtggagggaagtattcagatggccctagtccaagtgatgaatggtttaagcaagggaaaaaggttaaagcctattcaatacctggcactggtgaaaaggcaaaagatccaatttttggacttgctatgggttccggttctcaagctactggcgatcgtttcagatggttttgtgttgaaagcggaagtgctgataatccttcagtgatattaatccatggtttcccttcacaggcatattcttaccgcaaagttcttccagtactctccaaggactatcacgtcatagcctttgactggctaggatttgggttttctgacaagcctcaacccagatatgggtttgactacacactggatgagtatgtctcatcattggagtcacttattgatgaactggctgctactaaagtctcacttgttgtccagggatatttttcgcctgttgtagccaagtatgccagcattcaccaggaaaaagtcagaaacttaatactccttaatccgcctctaacagcccaacatgccaagcttccaccaacattgtccatattcagcaactttctactaggtgaaatattttcacaggatccattaagggccagtgacaaagctctaacaagctgtggcccctataaaatgaaagaagaagatgcaatggtctatcgaagaccctatcttacatctggttcctctggctttgctctaaatgcaattagcaggaacatgaacaaagacctcaagagatatgtggaggatatgcaaacaatactgaaggacaaaaattggaaagttcaaaccacaatatgttggggccaaagagaccgctggttgagctatgatggagtggaggatttctgcaaggattccaatcataaactcattgatgttcctacggctggtcatcatgtgcaggaagattgtggcgaagaagttggacaacttattcgtgggataataagcaaaaggaccaagatataggatattttctcattgcttcttgagatgctgaacaaatttttttgttacatggattcctatcttttccttggtctctatccttccaataaatcttgattcaattcc

SEQ ID NO: 8057 - protein, 416 aa, Glycine max
  peptide (1)..(416): Ceres Seq. ID no. 14312894
  misc_feature (183)..(412): Pfam Name: Pfam Description:  alpha/beta hydrolase fold
  misc_feature (28)..(412): NCBI GI NO: 18413878 NR Description: hydrolase, alpha/beta fold family
  misc_feature (28)..(412): NCBI GI NO: 21537159 NR Description: hydrolase-like protein [Arabidopsis thaliana]
  misc_feature (28)..(286): NCBI GI NO: 7487267 NR Description: hypothetical protein T20K18
  misc_feature (338)..(388): NCBI GI NO: 7487267 NR Description: hypothetical protein T20K18
  misc_feature (136)..(410): NCBI GI NO: 38344893 NR Description: OSJNBa0033G05.17
  misc_feature (32)..(407): NCBI GI NO: 22330196 NR Description: hydrolase, alpha/beta fold family
  misc_feature (142)..(402): NCBI GI NO: 23130266 NR Description: hypothetical protein [Nostoc punctiforme]
  misc_feature (32)..(407): NCBI GI NO: 25405562 NR Description: hypothetical protein F6D8.27
  misc_feature (146)..(406): NCBI GI NO: 23041852 NR Description: hypothetical protein
  misc_feature (140)..(396): NCBI GI NO: 17228848 NR Description: putative hydrolase [Nostoc sp. PCC 7120]
SFPLNQNQPLHVIIAMTLQAFHGSACCFRSHLLHFSSSTASSPPFLASRRFQSCPSTRKSLKLNCSSSGNNGDQDYLLDAPVSVGDGFSFSGGKYSDGPSPSDEWFKQGKKVKAYSIPGTGEKAKDPIFGLAMGSGSQATGDRFRWFCVESGSADNPSVILIHGFPSQAYSYRKVLPVLSKDYHVIAFDWLGFGFSDKPQPRYGFDYTLDEYVSSLESLIDELAATKVSLVVQGYFSPVVAKYASIHQEKVRNLILLNPPLTAQHAKLPPTLSIFSNFLLGEIFSQDPLRASDKALTSCGPYKMKEEDAMVYRRPYLTSGSSGFALNAISRNMNKDLKRYVEDMQTILKDKNWKVQTTICWGQRDRWLSYDGVEDFCKDSNHKLIDVPTAGHHVQEDCGEEVGQLIRGIISKRTKI

SEQ ID NO: 8058 - protein, 401 aa, Glycine max
  peptide (1)..(401): Ceres Seq. ID no. 14312895
  misc_feature (168)..(397): Pfam Name: Pfam Description:  alpha/beta hydrolase fold
  misc_feature (13)..(397): NCBI GI NO: 18413878 NR Description: hydrolase, alpha/beta fold family
  misc_feature (13)..(397): NCBI GI NO: 21537159 NR Description: hydrolase-like protein [Arabidopsis thaliana]
  misc_feature (13)..(271): NCBI GI NO: 7487267 NR Description: hypothetical protein T20K18
  misc_feature (323)..(373): NCBI GI NO: 7487267 NR Description: hypothetical protein T20K18
  misc_feature (121)..(395): NCBI GI NO: 38344893 NR Description: OSJNBa0033G05.17
  misc_feature (17)..(392): NCBI GI NO: 22330196 NR Description: hydrolase, alpha/beta fold family
  misc_feature (127)..(387): NCBI GI NO: 23130266 NR Description: hypothetical protein [Nostoc punctiforme]
  misc_feature (17)..(392): NCBI GI NO: 25405562 NR Description: hypothetical protein F6D8.27
  misc_feature (131)..(391): NCBI GI NO: 23041852 NR Description: hypothetical protein
  misc_feature (125)..(381): NCBI GI NO: 17228848 NR Description: putative hydrolase [Nostoc sp. PCC 7120]
MTLQAFHGSACCFRSHLLHFSSSTASSPPFLASRRFQSCPSTRKSLKLNCSSSGNNGDQDYLLDAPVSVGDGFSFSGGKYSDGPSPSDEWFKQGKKVKAYSIPGTGEKAKDPIFGLAMGSGSQATGDRFRWFCVESGSADNPSVILIHGFPSQAYSYRKVLPVLSKDYHVIAFDWLGFGFSDKPQPRYGFDYTLDEYVSSLESLIDELAATKVSLVVQGYFSPVVAKYASIHQEKVRNLILLNPPLTAQHAKLPPTLSIFSNFLLGEIFSQDPLRASDKALTSCGPYKMKEEDAMVYRRPYLTSGSSGFALNAISRNMNKDLKRYVEDMQTILKDKNWKVQTTICWGQRDRWLSYDGVEDFCKDSNHKLIDVPTAGHHVQEDCGEEVGQLIRGIISKRTKI

SEQ ID NO: 8059 - protein, 284 aa, Glycine max
  peptide (1)..(284): Ceres Seq. ID no. 14312896
  misc_feature (51)..(280): Pfam Name: Pfam Description:  alpha/beta hydrolase fold
  misc_feature (1)..(280): NCBI GI NO: 18413878 NR Description: hydrolase, alpha/beta fold family
  misc_feature (1)..(280): NCBI GI NO: 21537159 NR Description: hydrolase-like protein [Arabidopsis thaliana]
  misc_feature (1)..(154): NCBI GI NO: 7487267 NR Description: hypothetical protein T20K18
  misc_feature (206)..(256): NCBI GI NO: 7487267 NR Description: hypothetical protein T20K18
  misc_feature (4)..(278): NCBI GI NO: 38344893 NR Description: OSJNBa0033G05.17
  misc_feature (1)..(275): NCBI GI NO: 22330196 NR Description: hydrolase, alpha/beta fold family
  misc_feature (10)..(270): NCBI GI NO: 23130266 NR Description: hypothetical protein [Nostoc punctiforme]
  misc_feature (1)..(275): NCBI GI NO: 25405562 NR Description: hypothetical protein F6D8.27
  misc_feature (14)..(274): NCBI GI NO: 23041852 NR Description: hypothetical protein
  misc_feature (8)..(264): NCBI GI NO: 17228848 NR Description: putative hydrolase [Nostoc sp. PCC 7120]
MGSGSQATGDRFRWFCVESGSADNPSVILIHGFPSQAYSYRKVLPVLSKDYHVIAFDWLGFGFSDKPQPRYGFDYTLDEYVSSLESLIDELAATKVSLVVQGYFSPVVAKYASIHQEKVRNLILLNPPLTAQHAKLPPTLSIFSNFLLGEIFSQDPLRASDKALTSCGPYKMKEEDAMVYRRPYLTSGSSGFALNAISRNMNKDLKRYVEDMQTILKDKNWKVQTTICWGQRDRWLSYDGVEDFCKDSNHKLIDVPTAGHHVQEDCGEEVGQLIRGIISKRTKI

SEQ ID NO: 8060 - DNA, 1202 bp, Glycine max
  misc_feature (1)..(1202): Ceres Seq. ID no. 15168484
gtaacaccgttgttcgaaacttcaaatcaaaaaaagctcagagaacccatcccgccgccgccgtgtactccgaccgccacctccattcgccgatgtactctcaatcccttggtaattattgatttcttctattatcctttgagttaaagtcgaaggagtgcgattattctgatttgagaagcaaaaataccaaagagtgaagaaaagaaaagaaaaaatgctgtacataattggtttagggttgggtgatgagcaagacatcactctcaaaggcttggaagctgtgaagaagtgcagcaaggtttacatggaagcctacacttccctcctctcctttggtctctccaccaatggcatctccaacctggaaaaactatacggtaaacccattattcttgctgacagagaaatggtagaagaaaaggctgatgaaattctctctgaagctgatcatgcccatgttgctttccttgttgttggggatccttttggggctaccactcacactgacctggttgttcgagcaaagaagatggcaattgaagtcaaagtagtacacaatgcatctgtgatgaatgctattggagtttgtggtctacagctttaccgttatggggagaccgtttctataccattctttacagagacttggagacctgatagcttctatgaaaagattcaaagaaacctatcaatgggactgcacacgctttgcttgttagatattcgtgtgaaggaacccacactagaatctttgtgcagaggaagaaaagcttatgaaccacccagatatatgacaataaacacagccattgagcagctcttggagattgtgcaagcacgtgaagaacctgcatatactgaggataccgagtgtgttgggcttgcacggcttgggagtgaagatcagatgatagtagctggaacaatgaagcagttgcagatggttgattttggagcacctttgcattgccttgttataacaggccagacccatcctgtggaggaagaaatgctgtatttttacagatgcaggacatcgatacaacattaagacagcagcaccagtttaatttagcaaaaaagacttgtttgtttcttttgaaggaacccttgtatttttgttcttcctgtaaaaactttttggttgctaatcagggccaaaattaactaaattcattggtggctgaaaaattatgggc

SEQ ID NO: 8061 - protein, 278 aa, Glycine max
  peptide (1)..(278): Ceres Seq. ID no. 15168485
  misc_feature (1)..(207): Pfam Name: Corrin/Porphyrin Pfam Description: Tetrapyrrole
  misc_feature (1)..(274): NCBI GI NO: 15236075 NR Description: methyltransferase - like protein
  misc_feature (1)..(270): NCBI GI NO: 40254183 NR Description: RIKEN cDNA 2410012M04 [Mus musculus]
  misc_feature (1)..(270): NCBI GI NO: 12845949 NR Description: unnamed protein product [Mus musculus]
  misc_feature (1)..(270): NCBI GI NO: 31753136 NR Description: Unknown (protein for MGC:61450) [Homo sapiens]
  misc_feature (1)..(273): NCBI GI NO: 28829458 NR Description: similar to Arabidopsis thaliana (Mouse-ear cress)
  misc_feature (87)..(270): NCBI GI NO: 34859873 NR Description: similar to RIKEN cDNA 2410012M04
  misc_feature (1)..(92): NCBI GI NO: 34859873 NR Description: similar to RIKEN cDNA 2410012M04
  misc_feature (1)..(257): NCBI GI NO: 7706272 NR Description: CGI-30 protein [Homo sapiens]
  misc_feature (1)..(270): NCBI GI NO: 19075941 NR Description: putative diphthine synthase
  misc_feature (1)..(270): NCBI GI NO: 28572120 NR Description: Diphthamide methyltransferase CG31289-PA
MLYIIGLGLGDEQDITLKGLEAVKKCSKVYMEAYTSLLSFGLSTNGISNLEKLYGKPIILADREMVEEKADEILSEADHAHVAFLVVGDPFGATTHTDLVVRAKKMAIEVKVVHNASVMNAIGVCGLQLYRYGETVSIPFFTETWRPDSFYEKIQRNLSMGLHTLCLLDIRVKEPTLESLCRGRKAYEPPRYMTINTAIEQLLEIVQAREEPAYTEDTECVGLARLGSEDQMIVAGTMKQLQMVDFGAPLHCLVITGQTHPVEEEMLYFYRCRTSIQH

SEQ ID NO: 8062 - protein, 248 aa, Glycine max
  peptide (1)..(248): Ceres Seq. ID no. 15168486
  misc_feature (1)..(177): Pfam Name: Corrin/Porphyrin Pfam Description: Tetrapyrrole
  misc_feature (1)..(244): NCBI GI NO: 15236075 NR Description: methyltransferase - like protein
  misc_feature (1)..(240): NCBI GI NO: 40254183 NR Description: RIKEN cDNA 2410012M04 [Mus musculus]
  misc_feature (1)..(240): NCBI GI NO: 12845949 NR Description: unnamed protein product [Mus musculus]
  misc_feature (1)..(240): NCBI GI NO: 31753136 NR Description: Unknown (protein for MGC:61450) [Homo sapiens]
  misc_feature (1)..(243): NCBI GI NO: 28829458 NR Description: similar to Arabidopsis thaliana (Mouse-ear cress)
  misc_feature (57)..(240): NCBI GI NO: 34859873 NR Description: similar to RIKEN cDNA 2410012M04
  misc_feature (1)..(62): NCBI GI NO: 34859873 NR Description: similar to RIKEN cDNA 2410012M04
  misc_feature (1)..(227): NCBI GI NO: 7706272 NR Description: CGI-30 protein [Homo sapiens]
  misc_feature (1)..(240): NCBI GI NO: 19075941 NR Description: putative diphthine synthase
  misc_feature (1)..(240): NCBI GI NO: 28572120 NR Description: Diphthamide methyltransferase CG31289-PA
MEAYTSLLSFGLSTNGISNLEKLYGKPIILADREMVEEKADEILSEADHAHVAFLVVGDPFGATTHTDLVVRAKKMAIEVKVVHNASVMNAIGVCGLQLYRYGETVSIPFFTETWRPDSFYEKIQRNLSMGLHTLCLLDIRVKEPTLESLCRGRKAYEPPRYMTINTAIEQLLEIVQAREEPAYTEDTECVGLARLGSEDQMIVAGTMKQLQMVDFGAPLHCLVITGQTHPVEEEMLYFYRCRTSIQH

SEQ ID NO: 8063 - protein, 214 aa, Glycine max
  peptide (1)..(214): Ceres Seq. ID no. 15168487
  misc_feature (1)..(143): Pfam Name: Corrin/Porphyrin Pfam Description: Tetrapyrrole
  misc_feature (1)..(210): NCBI GI NO: 15236075 NR Description: methyltransferase - like protein
  misc_feature (1)..(206): NCBI GI NO: 40254183 NR Description: RIKEN cDNA 2410012M04 [Mus musculus]
  misc_feature (1)..(206): NCBI GI NO: 12845949 NR Description: unnamed protein product [Mus musculus]
  misc_feature (1)..(206): NCBI GI NO: 31753136 NR Description: Unknown (protein for MGC:61450) [Homo sapiens]
  misc_feature (1)..(209): NCBI GI NO: 28829458 NR Description: similar to Arabidopsis thaliana (Mouse-ear cress)
  misc_feature (23)..(206): NCBI GI NO: 34859873 NR Description: similar to RIKEN cDNA 2410012M04
  misc_feature (1)..(28): NCBI GI NO: 34859873 NR Description: similar to RIKEN cDNA 2410012M04
  misc_feature (1)..(193): NCBI GI NO: 7706272 NR Description: CGI-30 protein [Homo sapiens]
  misc_feature (1)..(206): NCBI GI NO: 19075941 NR Description: putative diphthine synthase
  misc_feature (1)..(206): NCBI GI NO: 28572120 NR Description: Diphthamide methyltransferase CG31289-PA
MVEEKADEILSEADHAHVAFLVVGDPFGATTHTDLVVRAKKMAIEVKVVHNASVMNAIGVCGLQLYRYGETVSIPFFTETWRPDSFYEKIQRNLSMGLHTLCLLDIRVKEPTLESLCRGRKAYEPPRYMTINTAIEQLLEIVQAREEPAYTEDTECVGLARLGSEDQMIVAGTMKQLQMVDFGAPLHCLVITGQTHPVEEEMLYFYRCRTSIQH

SEQ ID NO: 8064 - DNA, 731 bp, Glycine max
  misc_feature (1)..(731): Ceres Seq. ID no. 13594213
  misc_feature (588)..(588): n is a, c, t, g, unknown, or other
  misc_feature (586)..(586): n is a, c, t, g, unknown, or other
  misc_feature (587)..(587): n is a, c, t, g, unknown, or other
  misc_feature (589)..(589): n is a, c, t, g, unknown, or other
agcatcaattaataaaactattcaactcacttaagcctgcacaaaaacaacttaatagaagatgccttccaagaggcttcaatggagatccttagtacttggttgtttcaaggccaccaagaaccaatccttggaatctccaaacatagtttccaagaaatcatcttcaagtagaatcttcctttctgatttaagcctaagcgattattcatcagtttctatcatgagtgatttgtccaattctctcgtgggatcaaatcttcgtattttcacctaccaagagctctctgaggttacacacaacttcagcaaatccaactatcttggggaaggtgggtttgggaaggtgtataaaggatttattgatgacaatcttaaacgtggattgaaagctcagactgtggcagttaaggccttaaacttggatggaaaacaaggccacagagagtggttggctgaagtaatctttctggggcaattgaaacatcgccatctggttaacttaattggctactgctgtgaagatgagcataggcttcttgtgtatgagtacatggagaggggcaatctagaggaaaagcttttnnnnggttatttagcagccttgccttggctaacaagaatcaaaatagcaattggggccgcaaagggacttatgtttcttcatgaagaagagaaaccagtcatatatagagatatcaaggcctcaaacattctattagactctgatt

SEQ ID NO: 8065 - protein, 223 aa, Glycine max
  peptide (1)..(223): Ceres Seq. ID no. 13594214
  misc_feature (82)..(222): Pfam Name: Pfam Description:  Protein kinase domain
  misc_feature (5)..(222): NCBI GI NO: 30013675 NR Description: Avr9/Cf-9 rapidly elicited protein 264
  misc_feature (6)..(222): NCBI GI NO: 14484938 NR Description: auxin-regulated dual specificity cytosolic kinase
  misc_feature (4)..(222): NCBI GI NO: 15225019 NR Description: protein kinase, putative [Arabidopsis thaliana]
  misc_feature (5)..(222): NCBI GI NO: 15218526 NR Description: protein kinase, putative [Arabidopsis thaliana]
  misc_feature (4)..(222): NCBI GI NO: 15225277 NR Description: protein kinase, putative [Arabidopsis thaliana]
  misc_feature (29)..(131): NCBI GI NO: 27436752 NR Description: Putative serine/threonine protein kinase
  misc_feature (131)..(222): NCBI GI NO: 27436752 NR Description: Putative serine/threonine protein kinase
  misc_feature (4)..(222): NCBI GI NO: 10176804 NR Description: serine/threonine protein kinase-like
  misc_feature (4)..(222): NCBI GI NO: 15238553 NR Description: protein kinase, putative [Arabidopsis thaliana]
  misc_feature (1)..(222): NCBI GI NO: 37534008 NR Description: putative serine/threonine protein kinase
  misc_feature (175)..(175): Xaa is any aa, unknown or other
  misc_feature (176)..(176): Xaa is any aa, unknown or other
MPSKRLQWRSLVLGCFKATKNQSLESPNIVSKKSSSSRIFLSDLSLSDYSSVSIMSDLSNSLVGSNLRIFTYQELSEVTHNFSKSNYLGEGGFGKVYKGFIDDNLKRGLKAQTVAVKALNLDGKQGHREWLAEVIFLGQLKHRHLVNLIGYCCEDEHRLLVYEYMERGNLEEKLXXGYLAALPWLTRIKIAIGAAKGLMFLHEEEKPVIYRDIKASNILLDSD

SEQ ID NO: 8066 - protein, 169 aa, Glycine max
  peptide (1)..(169): Ceres Seq. ID no. 13594215
  misc_feature (28)..(168): Pfam Name: Pfam Description:  Protein kinase domain
  misc_feature (1)..(168): NCBI GI NO: 30013675 NR Description: Avr9/Cf-9 rapidly elicited protein 264
  misc_feature (1)..(168): NCBI GI NO: 14484938 NR Description: auxin-regulated dual specificity cytosolic kinase
  misc_feature (1)..(168): NCBI GI NO: 15225019 NR Description: protein kinase, putative [Arabidopsis thaliana]
  misc_feature (1)..(168): NCBI GI NO: 15218526 NR Description: protein kinase, putative [Arabidopsis thaliana]
  misc_feature (1)..(168): NCBI GI NO: 15225277 NR Description: protein kinase, putative [Arabidopsis thaliana]
  misc_feature (1)..(77): NCBI GI NO: 27436752 NR Description: Putative serine/threonine protein kinase
  misc_feature (77)..(168): NCBI GI NO: 27436752 NR Description: Putative serine/threonine protein kinase
  misc_feature (1)..(168): NCBI GI NO: 10176804 NR Description: serine/threonine protein kinase-like
  misc_feature (1)..(168): NCBI GI NO: 15238553 NR Description: protein kinase, putative [Arabidopsis thaliana]
  misc_feature (1)..(168): NCBI GI NO: 37534008 NR Description: putative serine/threonine protein kinase
  misc_feature (121)..(121): Xaa is any aa, unknown or other
  misc_feature (122)..(122): Xaa is any aa, unknown or other
MSDLSNSLVGSNLRIFTYQELSEVTHNFSKSNYLGEGGFGKVYKGFIDDNLKRGLKAQTVAVKALNLDGKQGHREWLAEVIFLGQLKHRHLVNLIGYCCEDEHRLLVYEYMERGNLEEKLXXGYLAALPWLTRIKIAIGAAKGLMFLHEEEKPVIYRDIKASNILLDSD

SEQ ID NO: 8067 - DNA, 1200 bp, Glycine max
  misc_feature (1)..(1200): Ceres Seq. ID no. 15168500
taacacacaacacaacacaaacactacatagacattgaatcaaaaatcaatggtggttgcatccattcgtcttcttccttctccattcctctctttcgcgcctcgtttctctccatattcatattcatggcgctgccgtccctcttccaccattcccttttcttccatccactccaaagcttctactaagggagatggtggagtagtggaatttggtggtgatcaaacagagcttatatttttggggactggaaccagtgaaggggttccacgtgtcagctgcttgactaatcctttacacaaatgtgaggtgtgttcaaaagctgctcaaccgggtaataagaataggagacttaacacaagcatcctcattcgtcaccccggttcctcaggaacacacaataatattcttatagatgctggaaaatttttctatcacagtgctctccggtggtttcctgcttttgggataagaacaattgatgcggtcattattactcattcacatgctgatgcaatcggaggtcttgatgatcttagagattggacaaacaatgttcagcctcatattccaatatatgtagccaagcgtgactttgaggtgatgacaaagacccattattatttagtagatactagtgttatcttacctggtgcccaagtctcagagttgcaattcaatatcgtatcagaagaaccattttttgtacatggactgaagttcaccccattaccagtgtggcacggccagaattatcggtcccttggttttcgttttggtaatatatgttacattagtgatgtcagcgacattcctgaagaaacatatccacttctgaaggactgtgaaattctaatcccggatgctttgaggcctgattgctctacttctacacattttggacttcaaagggccttggacgaagtgcgaaaaattcaacccaaaagaacactttttaccggtatgatgcatctgatggatcatgaagaagtgaatgactcccttgcgaagctattggagtctgaaggccttgatgcacaactgagctatgacgggcttcgtataccaattagactctagtttgtatacagtctctttcataagatgactttttttttttttctcaaagagaaattattaaataaacattcaaataattttacaagttcatacattctgcaggttcctgcatctattct

SEQ ID NO: 8068 - protein, 343 aa, Glycine max
  peptide (1)..(343): Ceres Seq. ID no. 15168501
  misc_feature (102)..(306): Pfam Name: Pfam Description:  Metallo-beta-lactamase superfamily
  misc_feature (45)..(343): NCBI GI NO: 9294602 NR Description: hydrolase-like protein [Arabidopsis thaliana]
  misc_feature (45)..(268): NCBI GI NO: 15231379 NR Description: hydrolase, putative [Arabidopsis thaliana]
  misc_feature (296)..(343): NCBI GI NO: 15231379 NR Description: hydrolase, putative [Arabidopsis thaliana]
  misc_feature (60)..(332): NCBI GI NO: 19075752 NR Description: putative hydrolase [Schizosaccharomyces pombe]
  misc_feature (43)..(264): NCBI GI NO: 25513552 NR Description: 36
  misc_feature (43)..(264): NCBI GI NO: 30691663 NR Description: expressed protein [Arabidopsis thaliana]
  misc_feature (58)..(321): NCBI GI NO: 15236346 NR Description: hydrolase -related [Arabidopsis thaliana]
  misc_feature (85)..(341): NCBI GI NO: 32477197 NR Description: phnP protein homolog-putative hydrolase
  misc_feature (65)..(341): NCBI GI NO: 17987268 NR Description: PHNP PROTEIN [Brucella melitensis]
  misc_feature (65)..(341): NCBI GI NO: 23501878 NR Description: conserved hypothetical protein
MVVASIRLLPSPFLSFAPRFSPYSYSWRCRPSSTIPFSSIHSKASTKGDGGVVEFGGDQTELIFLGTGTSEGVPRVSCLTNPLHKCEVCSKAAQPGNKNRRLNTSILIRHPGSSGTHNNILIDAGKFFYHSALRWFPAFGIRTIDAVIITHSHADAIGGLDDLRDWTNNVQPHIPIYVAKRDFEVMTKTHYYLVDTSVILPGAQVSELQFNIVSEEPFFVHGLKFTPLPVWHGQNYRSLGFRFGNICYISDVSDIPEETYPLLKDCEILIPDALRPDCSTSTHFGLQRALDEVRKIQPKRTLFTGMMHLMDHEEVNDSLAKLLESEGLDAQLSYDGLRIPIRL

SEQ ID NO: 8069 - DNA, 1399 bp, Glycine max
  misc_feature (1)..(1399): Ceres Seq. ID no. 13638097
aaaccaaaccacacaaataaacgaccaacacacattatatctctttgttaccttcgcacgaacgagagaagagaagcaaacgatggctacttttctttccaaccaatctctgttgggttcttgtccttgttctactcccttctcttcaaagccctttcaaaccctaaaaccccaaatcttatcttttccatctcgcgggtttccgcgccccctaatttcctcagtcaatcgaagaacccaattgaagtcttcccaagatttccctccaactacaaatgatgaaacagaggagacccagaatgatgtaagagggacaaatgatgatgaagataaaaaacaagtacctagtttaatgatcctccttgaagcatacaaggaagccttttttaatggcgaccaaaataccgtagctcagattgaagaggggatatattcaatagcaaataggaaaaataaattgattcagaaattatcaagtttatcggcagacaaagctgcttccaagaagagttatcttcgtttacaagctgattttgataattttaggaaaaggactgacaaagagagacttaacatccaatccgatgcccagcaacaagtcattgaaaagcttttgttgatggtcgacaattttgagagaacccaacagcaaattaaagcagcaacagagaaagagaagaaaattggtgttagctatcaaggtatttacaaacaatttgtagaggttctgaggaatcataatgtttcagtggtagcaacagtgggcaagccgtttaatcccttgcaacatgaagccgttgcacgtgaggagtccacagagttcaaaaaagggattataattaaagaatcccgacgtggtttcttgctcagagatcgagttctaaggccagcccttgtcaaggtttccttaggtcctggaaataagaaatctcccgtgtctcctgacaagtctgtggagcaaccttcaacagctgctggaatagatgaaagatagtctcttgaacttgttcattaaaaatccagttccacctgcatacctgatatcttgtcattggtcaacttgaaattcttctagtttggtattttggcctgaggtgagtatagtctcttgtagtatggacctcaccaattttaacttgtgtcccgccgcactacaattttttgcttcatcatgacaaagggaattacttttgttcatgagagaatggtgatttcttttgcaatccatttttttttttaccaaagcttagaatgttcattctcggactttgttggcattattgttccttgtctcaatgcttaacaaagggaaatactagagaaagctcgactgcaaaaattacccatgtcattctacaatattgtatgtgttatatatatgccatatcttacgacttgt

SEQ ID NO: 8070 - protein, 330 aa, Glycine max
  peptide (1)..(330): Ceres Seq. ID no. 13638098
  misc_feature (150)..(303): Pfam Name: Pfam Description:  GrpE
  misc_feature (42)..(316): NCBI GI NO: 21593629 NR Description: putative heat shock protein [Arabidopsis thaliana]
  misc_feature (42)..(316): NCBI GI NO: 18400095 NR Description: heat shock protein -related [Arabidopsis thaliana]
  misc_feature (70)..(329): NCBI GI NO: 18418410 NR Description: chloroplast GrpE protein [Arabidopsis thaliana]
  misc_feature (64)..(329): NCBI GI NO: 30686476 NR Description: chloroplast GrpE protein [Arabidopsis thaliana]
  misc_feature (115)..(327): NCBI GI NO: 32488078 NR Description: OSJNBa0084A10.6
  misc_feature (132)..(329): NCBI GI NO: 33860576 NR Description: Heat shock protein GrpE
  misc_feature (136)..(302): NCBI GI NO: 15384277 NR Description: co-chaperone CGE1 precursor isoform a
  misc_feature (136)..(302): NCBI GI NO: 15384279 NR Description: co-chaperone CGE1 precursor isoform b
  misc_feature (130)..(313): NCBI GI NO: 2495091 NR Description: GRPE PROTEIN (HSP-70 COFACTOR)
  misc_feature (140)..(318): NCBI GI NO: 22298857 NR Description: heat shock protein
NQTTQINDQHTLYLFVTFARTREEKQTMATFLSNQSLLGSCPCSTPFSSKPFQTLKPQILSFPSRGFPRPLISSVNRRTQLKSSQDFPPTTNDETEETQNDVRGTNDDEDKKQVPSLMILLEAYKEAFFNGDQNTVAQIEEGIYSIANRKNKLIQKLSSLSADKAASKKSYLRLQADFDNFRKRTDKERLNIQSDAQQQVIEKLLLMVDNFERTQQQIKAATEKEKKIGVSYQGIYKQFVEVLRNHNVSVVATVGKPFNPLQHEAVAREESTEFKKGIIIKESRRGFLLRDRVLRPALVKVSLGPGNKKSPVSPDKSVEQPSTAAGIDER

SEQ ID NO: 8071 - protein, 303 aa, Glycine max
  peptide (1)..(303): Ceres Seq. ID no. 13638099
  misc_feature (123)..(276): Pfam Name: Pfam Description:  GrpE
  misc_feature (15)..(289): NCBI GI NO: 21593629 NR Description: putative heat shock protein [Arabidopsis thaliana]
  misc_feature (15)..(289): NCBI GI NO: 18400095 NR Description: heat shock protein -related [Arabidopsis thaliana]
  misc_feature (43)..(302): NCBI GI NO: 18418410 NR Description: chloroplast GrpE protein [Arabidopsis thaliana]
  misc_feature (37)..(302): NCBI GI NO: 30686476 NR Description: chloroplast GrpE protein [Arabidopsis thaliana]
  misc_feature (88)..(300): NCBI GI NO: 32488078 NR Description: OSJNBa0084A10.6
  misc_feature (105)..(302): NCBI GI NO: 33860576 NR Description: Heat shock protein GrpE
  misc_feature (109)..(275): NCBI GI NO: 15384277 NR Description: co-chaperone CGE1 precursor isoform a
  misc_feature (109)..(275): NCBI GI NO: 15384279 NR Description: co-chaperone CGE1 precursor isoform b
  misc_feature (103)..(286): NCBI GI NO: 2495091 NR Description: GRPE PROTEIN (HSP-70 COFACTOR)
  misc_feature (113)..(291): NCBI GI NO: 22298857 NR Description: heat shock protein
MATFLSNQSLLGSCPCSTPFSSKPFQTLKPQILSFPSRGFPRPLISSVNRRTQLKSSQDFPPTTNDETEETQNDVRGTNDDEDKKQVPSLMILLEAYKEAFFNGDQNTVAQIEEGIYSIANRKNKLIQKLSSLSADKAASKKSYLRLQADFDNFRKRTDKERLNIQSDAQQQVIEKLLLMVDNFERTQQQIKAATEKEKKIGVSYQGIYKQFVEVLRNHNVSVVATVGKPFNPLQHEAVAREESTEFKKGIIIKESRRGFLLRDRVLRPALVKVSLGPGNKKSPVSPDKSVEQPSTAAGIDER

SEQ ID NO: 8072 - protein, 213 aa, Glycine max
  peptide (1)..(213): Ceres Seq. ID no. 13638100
  misc_feature (33)..(186): Pfam Name: Pfam Description:  GrpE
  misc_feature (1)..(199): NCBI GI NO: 21593629 NR Description: putative heat shock protein [Arabidopsis thaliana]
  misc_feature (1)..(199): NCBI GI NO: 18400095 NR Description: heat shock protein -related [Arabidopsis thaliana]
  misc_feature (1)..(212): NCBI GI NO: 18418410 NR Description: chloroplast GrpE protein [Arabidopsis thaliana]
  misc_feature (1)..(212): NCBI GI NO: 30686476 NR Description: chloroplast GrpE protein [Arabidopsis thaliana]
  misc_feature (1)..(210): NCBI GI NO: 32488078 NR Description: OSJNBa0084A10.6
  misc_feature (15)..(212): NCBI GI NO: 33860576 NR Description: Heat shock protein GrpE
  misc_feature (19)..(185): NCBI GI NO: 15384277 NR Description: co-chaperone CGE1 precursor isoform a
  misc_feature (19)..(185): NCBI GI NO: 15384279 NR Description: co-chaperone CGE1 precursor isoform b
  misc_feature (13)..(196): NCBI GI NO: 2495091 NR Description: GRPE PROTEIN (HSP-70 COFACTOR)
  misc_feature (23)..(201): NCBI GI NO: 22298857 NR Description: heat shock protein
MILLEAYKEAFFNGDQNTVAQIEEGIYSIANRKNKLIQKLSSLSADKAASKKSYLRLQADFDNFRKRTDKERLNIQSDAQQQVIEKLLLMVDNFERTQQQIKAATEKEKKIGVSYQGIYKQFVEVLRNHNVSVVATVGKPFNPLQHEAVAREESTEFKKGIIIKESRRGFLLRDRVLRPALVKVSLGPGNKKSPVSPDKSVEQPSTAAGIDER

SEQ ID NO: 8073 - DNA, 1308 bp, Glycine max
  misc_feature (1)..(1308): Ceres Seq. ID no. 15171755
cccttccttccttctttcattcctttccctcattttcctcttttctctctcctttttccccttcacatgtcttctgccggcggcgacaggggcggcggcgctacctccggcgaccctcgccaatacttctgccaccagtgcaaccgcaccgtctcaatttccccttccccctcctccgatctcctctgccccacttgcaacggcggcttcctcgaagaactcgaattcccaatccccaaccctaaccctaaccctcccaatcccttcttccccgacttccccctcgccggcgccgccaccattcccctcgtcctccccggcgccgccgcctcccctcccttcgaggatctctccgccctcttcggaaaccgacccgacgccgccgccgatgccttcaaccccctcgtcttcctccagaactacttccaaaccctaagagccggcggcaacctccaattggtgatagagtccggcgaccctggcggagcgttccgcttccccggcgtcacccacggcgactacttctttgggccgggcctcgaggagctgatccagcatctcgctgagaacgatcccaaccgttacggcaccccgccggcctccaagtcggtcgtcgagggcctgccggacgtctccgtcaccgaggagctgctggcgtcggattcctcgcagtgcgccgtgtgcaaagacaccttcgagctcggcgagaccgcgaagcagatcccctgtaagcatatatatcacgcggattgcattttgccgtggttagaattgcacaattcttgccccgtttgtcggtatgagttgcccacagatgatcctgattacgagcagagggctcgtcgtggtggtagtggtggtggtggtgctgccggcagtggggcagctccacaggtgaattggaacatggcattggggtccggtggttctgcggattcatctggtagcggtggcggtgataattcacagaggagaaggtttagggtgtctttgccatggccgtttaggcaatttgctgagacaagtaatgttgggagtggcaacaatgatagcaacaataacaacaacagcaatagcaatagtgacagtagtggaaataatggtgggcaatcgaactctggaaaccgggggaatcagaattttgactcggagaccagacaggaagatctcgattgagagccactcgtgttttatatgtatcaagagtttttccaaaattgcagcattttgttgaatagaaatgatgctaaatatcaattagtggttagtgacagttgaaaattttatatttgattataatgaacttac

SEQ ID NO: 8074 - protein, 391 aa, Glycine max
  peptide (1)..(391): Ceres Seq. ID no. 15171756
  misc_feature (225)..(265): Pfam Name: RING finger Pfam Description: Zinc finger, C3HC4 type
  misc_feature (23)..(324): NCBI GI NO: 11994207 NR Description: gene_id:MPN9.20~unknown protein
  misc_feature (23)..(324): NCBI GI NO: 15231003 NR Description: expressed protein [Arabidopsis thaliana]
  misc_feature (125)..(364): NCBI GI NO: 37535546 NR Description: putative zinc finger protein
  misc_feature (134)..(271): NCBI GI NO: 18405518 NR Description: RING-H2 finger protein (RHC1a)
  misc_feature (310)..(377): NCBI GI NO: 18405518 NR Description: RING-H2 finger protein (RHC1a)
  misc_feature (42)..(288): NCBI GI NO: 18410530 NR Description: expressed protein [Arabidopsis thaliana]
  misc_feature (167)..(367): NCBI GI NO: 15241188 NR Description: expressed protein [Arabidopsis thaliana]
  misc_feature (167)..(352): NCBI GI NO: 18405411 NR Description: expressed protein [Arabidopsis thaliana]
  misc_feature (24)..(272): NCBI GI NO: 14719329 NR Description: putative RING-H2 finger protein [Oryza sativa]
  misc_feature (169)..(281): NCBI GI NO: 15219060 NR Description: hypothetical protein [Arabidopsis thaliana]
PFLPSFIPFPHFPLFSLLFPLHMSSAGGDRGGGATSGDPRQYFCHQCNRTVSISPSPSSDLLCPTCNGGFLEELEFPIPNPNPNPPNPFFPDFPLAGAATIPLVLPGAAASPPFEDLSALFGNRPDAAADAFNPLVFLQNYFQTLRAGGNLQLVIESGDPGGAFRFPGVTHGDYFFGPGLEELIQHLAENDPNRYGTPPASKSVVEGLPDVSVTEELLASDSSQCAVCKDTFELGETAKQIPCKHIYHADCILPWLELHNSCPVCRYELPTDDPDYEQRARRGGSGGGGAAGSGAAPQVNWNMALGSGGSADSSGSGGGDNSQRRRFRVSLPWPFRQFAETSNVGSGNNDSNNNNNSNSNSDSSGNNGGQSNSGNRGNQNFDSETRQEDLD

SEQ ID NO: 8075 - protein, 369 aa, Glycine max
  peptide (1)..(369): Ceres Seq. ID no. 15171757
  misc_feature (203)..(243): Pfam Name: RING finger Pfam Description: Zinc finger, C3HC4 type
  misc_feature (1)..(302): NCBI GI NO: 11994207 NR Description: gene_id:MPN9.20~unknown protein
  misc_feature (1)..(302): NCBI GI NO: 15231003 NR Description: expressed protein [Arabidopsis thaliana]
  misc_feature (103)..(342): NCBI GI NO: 37535546 NR Description: putative zinc finger protein
  misc_feature (112)..(249): NCBI GI NO: 18405518 NR Description: RING-H2 finger protein (RHC1a)
  misc_feature (288)..(355): NCBI GI NO: 18405518 NR Description: RING-H2 finger protein (RHC1a)
  misc_feature (20)..(266): NCBI GI NO: 18410530 NR Description: expressed protein [Arabidopsis thaliana]
  misc_feature (145)..(345): NCBI GI NO: 15241188 NR Description: expressed protein [Arabidopsis thaliana]
  misc_feature (145)..(330): NCBI GI NO: 18405411 NR Description: expressed protein [Arabidopsis thaliana]
  misc_feature (2)..(250): NCBI GI NO: 14719329 NR Description: putative RING-H2 finger protein [Oryza sativa]
  misc_feature (147)..(259): NCBI GI NO: 15219060 NR Description: hypothetical protein [Arabidopsis thaliana]
MSSAGGDRGGGATSGDPRQYFCHQCNRTVSISPSPSSDLLCPTCNGGFLEELEFPIPNPNPNPPNPFFPDFPLAGAATIPLVLPGAAASPPFEDLSALFGNRPDAAADAFNPLVFLQNYFQTLRAGGNLQLVIESGDPGGAFRFPGVTHGDYFFGPGLEELIQHLAENDPNRYGTPPASKSVVEGLPDVSVTEELLASDSSQCAVCKDTFELGETAKQIPCKHIYHADCILPWLELHNSCPVCRYELPTDDPDYEQRARRGGSGGGGAAGSGAAPQVNWNMALGSGGSADSSGSGGGDNSQRRRFRVSLPWPFRQFAETSNVGSGNNDSNNNNNSNSNSDSSGNNGGQSNSGNRGNQNFDSETRQEDLD

SEQ ID NO: 8076 - DNA, 1335 bp, Glycine max
  misc_feature (1)..(1335): Ceres Seq. ID no. 13594117
gaatttgctctagacaagtttggtgattgacgatgtcgggcttgaagcttggcacgactgcttccatctacgttcgaacagcgaaaaccaaaagcaaacccctcttatcatggagaagcccaccccaacacccccgcagccgcaggtacatgctttccccttccaaaaatcaaatcctagggttcacacctagaaacaaattcccatgctattctttgggaagggctggtcttgtcacagattttggttcgtcagtgccccaacctcaacctcaacctcagccaaagccagagccagaaccagaacctgaaccttccaaattgcttacgttgccaacaattttgactctaggccgtgtcgccgctgtcccacttcttgttgctactttctacatggacggttggcgtggaactgctgctactaccagcattttcgtcgctgcatcaatcactgattggcttgatggctatcttgctcgcaagatgaagttaaaatcttcattcggtgcattcttagatccagttgctgacaagcttatggttgctgctacactggtcttattatgtactagacctttggatggtggtgtgtttggacaagcgccgtggctactcactatacctgcaattgccataattggtagagagataaccatgtctgcagtcagggagtgggctgcttcccaggatagcaagcttttagaggctgttgctgtaaataacttggggaagtggaaaacagccacacagatgacagcattaaccatccttcttgcgacccgggactggagccatggaggaggagctgccattgtagtaggctctggtgttgctttgctttatacttcagcagggcttgccttatggtcgttggttgtatatatgaagaaaatatggagggtgttgttgaggtagcttgcgaacatttaccaatgtcacgaaagggggctgcaattttagtggcatgcaaatgtttttttttttcctgcgcaatctctaaccccatgcagtgtcatttctcctactcgtgtattttctgcgcatttttttggtcctctaaaaaagataagggccactagccatgcttaagcgttacagcagtgattgtgttgggaaaacgttgtgttgtaagttgtaacccacgttttccccaaatccatgaaggcacttgcttctccgtttgatgctttggaaagtgtgaacacacgcattttgttttaggccctaactcaatttagagtcattgaaagtttgagaattgcgaccagagaaaattcacaacaggtcaggaattattgtataatggttgatttgttctgatatagttcaacgatgc

SEQ ID NO: 8077 - protein, 293 aa, Glycine max
  peptide (1)..(293): Ceres Seq. ID no. 13594118
  misc_feature (131)..(286): Pfam Name: Pfam Description:  CDP-alcohol phosphatidyltransferase
  misc_feature (88)..(293): NCBI GI NO: 15225064 NR Description: phosphatidylglycerolphosphate synthase (PGS1)
  misc_feature (90)..(293): NCBI GI NO: 24796824 NR Description: putative phosphatidylglycerolphosphate synthase
  misc_feature (86)..(293): NCBI GI NO: 15233163 NR Description: phosphatidylglycerolphosphate synthase
  misc_feature (98)..(288): NCBI GI NO: 23061902 NR Description: hypothetical protein
  misc_feature (98)..(288): NCBI GI NO: 27753591 NR Description: CDP-diacylglycerol-glycerol-3-phosphate
  misc_feature (98)..(288): NCBI GI NO: 23472904 NR Description: hypothetical protein
  misc_feature (98)..(288): NCBI GI NO: 28870198 NR Description: CDP-diacylglycerol --glycerol-3-phosphate 3-phosphatidyltransferase
  misc_feature (98)..(288): NCBI GI NO: 26990792 NR Description: CDP-diacylglycerol --glycerol-3-phosphate 3-phosphatidyltransferase
  misc_feature (98)..(288): NCBI GI NO: 15597780 NR Description: CDP-diacylglycerol --glycerol-3-phosphate 3-phosphatidyltransferase
  misc_feature (98)..(288): NCBI GI NO: 23104171 NR Description: hypothetical protein [Azotobacter vinelandii]
MSGLKLGTTASIYVRTAKTKSKPLLSWRSPPQHPRSRRYMLSPSKNQILGFTPRNKFPCYSLGRAGLVTDFGSSVPQPQPQPQPKPEPEPEPEPSKLLTLPTILTLGRVAAVPLLVATFYMDGWRGTAATTSIFVAASITDWLDGYLARKMKLKSSFGAFLDPVADKLMVAATLVLLCTRPLDGGVFGQAPWLLTIPAIAIIGREITMSAVREWAASQDSKLLEAVAVNNLGKWKTATQMTALTILLATRDWSHGGGAAIVVGSGVALLYTSAGLALWSLVVYMKKIWRVLLR

SEQ ID NO: 8078 - protein, 254 aa, Glycine max
  peptide (1)..(254): Ceres Seq. ID no. 13594119
  misc_feature (92)..(247): Pfam Name: Pfam Description:  CDP-alcohol phosphatidyltransferase
  misc_feature (49)..(254): NCBI GI NO: 15225064 NR Description: phosphatidylglycerolphosphate synthase (PGS1)
  misc_feature (51)..(254): NCBI GI NO: 24796824 NR Description: putative phosphatidylglycerolphosphate synthase
  misc_feature (47)..(254): NCBI GI NO: 15233163 NR Description: phosphatidylglycerolphosphate synthase
  misc_feature (59)..(249): NCBI GI NO: 23061902 NR Description: hypothetical protein
  misc_feature (59)..(249): NCBI GI NO: 27753591 NR Description: CDP-diacylglycerol-glycerol-3-phosphate
  misc_feature (59)..(249): NCBI GI NO: 23472904 NR Description: hypothetical protein
  misc_feature (59)..(249): NCBI GI NO: 28870198 NR Description: CDP-diacylglycerol --glycerol-3-phosphate 3-phosphatidyltransferase
  misc_feature (59)..(249): NCBI GI NO: 26990792 NR Description: CDP-diacylglycerol --glycerol-3-phosphate 3-phosphatidyltransferase
  misc_feature (59)..(249): NCBI GI NO: 15597780 NR Description: CDP-diacylglycerol --glycerol-3-phosphate 3-phosphatidyltransferase
  misc_feature (59)..(249): NCBI GI NO: 23104171 NR Description: hypothetical protein [Azotobacter vinelandii]
MLSPSKNQILGFTPRNKFPCYSLGRAGLVTDFGSSVPQPQPQPQPKPEPEPEPEPSKLLTLPTILTLGRVAAVPLLVATFYMDGWRGTAATTSIFVAASITDWLDGYLARKMKLKSSFGAFLDPVADKLMVAATLVLLCTRPLDGGVFGQAPWLLTIPAIAIIGREITMSAVREWAASQDSKLLEAVAVNNLGKWKTATQMTALTILLATRDWSHGGGAAIVVGSGVALLYTSAGLALWSLVVYMKKIWRVLLR

SEQ ID NO: 8079 - protein, 173 aa, Glycine max
  peptide (1)..(173): Ceres Seq. ID no. 13594120
  misc_feature (11)..(166): Pfam Name: Pfam Description:  CDP-alcohol phosphatidyltransferase
  misc_feature (1)..(173): NCBI GI NO: 15225064 NR Description: phosphatidylglycerolphosphate synthase (PGS1)
  misc_feature (1)..(173): NCBI GI NO: 24796824 NR Description: putative phosphatidylglycerolphosphate synthase
  misc_feature (1)..(173): NCBI GI NO: 15233163 NR Description: phosphatidylglycerolphosphate synthase
  misc_feature (1)..(168): NCBI GI NO: 23061902 NR Description: hypothetical protein
  misc_feature (1)..(168): NCBI GI NO: 27753591 NR Description: CDP-diacylglycerol-glycerol-3-phosphate
  misc_feature (1)..(168): NCBI GI NO: 23472904 NR Description: hypothetical protein
  misc_feature (1)..(168): NCBI GI NO: 28870198 NR Description: CDP-diacylglycerol --glycerol-3-phosphate 3-phosphatidyltransferase
  misc_feature (1)..(168): NCBI GI NO: 26990792 NR Description: CDP-diacylglycerol --glycerol-3-phosphate 3-phosphatidyltransferase
  misc_feature (1)..(168): NCBI GI NO: 15597780 NR Description: CDP-diacylglycerol --glycerol-3-phosphate 3-phosphatidyltransferase
  misc_feature (1)..(168): NCBI GI NO: 23104171 NR Description: hypothetical protein [Azotobacter vinelandii]
MDGWRGTAATTSIFVAASITDWLDGYLARKMKLKSSFGAFLDPVADKLMVAATLVLLCTRPLDGGVFGQAPWLLTIPAIAIIGREITMSAVREWAASQDSKLLEAVAVNNLGKWKTATQMTALTILLATRDWSHGGGAAIVVGSGVALLYTSAGLALWSLVVYMKKIWRVLLR

SEQ ID NO: 8080 - DNA, 1852 bp, Glycine max
  misc_feature (1)..(1852): Ceres Seq. ID no. 13594216
aaacataattcgttcctgggagtctctctgtcttctacttgtttgttagggttccttttcccgtttcgtttcgtttcgttttttttgcaatggaagaaagccctcgtggtcgcagaaagcgagcacacccttcttctccttctcctccttcgccaatctccaagaagccccaaaccttcccttcgttccaagacatccccaatctcccttctaacatcaaatccctctgccacctcatcgccaccacctccgccgccaccgtcgagcactccctccaatccgccgccatctccgtcatccctcacgacgtcgaagaagtcctcaaactctcctacggcttcccgggccaatccgtcaaattcttccgctggagcggccgccacctcaacgacaaccacacgccctattcctggaacctcgttgtcgatatcctcggcagaaaccgcttcttcgaccccatgtgggacgccgttaagtcaatgaacaaagaagggttactctcgctcgccacattcgcctccgtcttcagcagctatgttgccgctgacagaatccgtgaagcaattatggcgtttgagattatggacaattacggttgtgtgagggatgcttttgctttgaattcgcttttgagtgcaatttgtagcaatggtaggactcttgatgcttgtgattacttgcaggttgctaagaaattcgtccgaccggatacggatacttacgcgattttaatggaggggtgggaaggggagaagagtatggttagtgctaaggagacatttgctgagatggtgattgagattggatgggatcctgcgaatgtgccggcttatgattcgttcttgtgtacacttgttagagggcatgatggattgcttgaggctattaagtttgttgattccatgagggataggaggtgttaccccggtgtgaggtttctgaaggctgcattggatgagtgtgttaagtgccatgatgttaggacagctgagtttttctgggaggtgttggtggttgggaaggtgttgcagcccacctctgagatgtacaatttgatgatcggtttgtgttgctatcgcggtgacaccgatgctgcaaggaggatgctccatgagatggtttaccaaggggcttttcctgatgtggtgacttataacttgttgtttaagttcttgctcaaggggaggaaactgagggaggcttcgtcggtgtttgcggagatggtgcagaatgagtgtgtgccggagcaggataactgtgatttggcagttaaggcgtatgtggattgcggggagcctgttatggcgatcaaggtttggaagtgtttggtggagaattataagaagggtttggagcagaccgcgaattttctggttgtggggctttgcaatttgaacaggccacaggtggcggttaagtatgccgaggatatgattggcaggggaatcagtttgtcctcttccacattgtcgaagctgagacaaagccttgtcaaggagagaagagaatatgtgtatgaggatcttttgagaaagtggaaatctcactaggtagtttggattttttttgctaaaactgtgtaacttaatattagtgccgaatttgaatgttttgcttttgtctgatagagaggggaagaattttgaagtggttattattatctaaaagatgatactttggttctgcattgggataaataggctccagcatgtgttatctttgtatatagttactgcaaaagatcctactagaattgctttagaaggttaaaggtagaggaagtttatataggtttttgtatcaaacttatattataaaaaataaaaaaaagctttatctatttacctatctt

SEQ ID NO: 8081 - protein, 486 aa, Glycine max
  peptide (1)..(486): Ceres Seq. ID no. 13594217
  misc_feature (49)..(482): NCBI GI NO: 14488357 NR Description: unknown protein
  misc_feature (30)..(482): NCBI GI NO: 15223926 NR Description: pentatricopeptide (PPR) repeat-containing protein
  misc_feature (46)..(482): NCBI GI NO: 15223927 NR Description: pentatricopeptide (PPR) repeat-containing protein
  misc_feature (40)..(484): NCBI GI NO: 15228767 NR Description: pentatricopeptide (PPR) repeat-containing protein
  misc_feature (52)..(482): NCBI GI NO: 18394846 NR Description: expressed protein [Arabidopsis thaliana]
  misc_feature (40)..(484): NCBI GI NO: 15228788 NR Description: pentatricopeptide (PPR) repeat-containing protein
  misc_feature (40)..(484): NCBI GI NO: 15241508 NR Description: pentatricopeptide (PPR) repeat-containing protein
  misc_feature (26)..(468): NCBI GI NO: 15219049 NR Description: hypothetical protein [Arabidopsis thaliana]
  misc_feature (58)..(482): NCBI GI NO: 25511622 NR Description: T6A9.11 protein - Arabidopsis thaliana
  misc_feature (58)..(482): NCBI GI NO: 15217756 NR Description: pentatricopeptide (PPR) repeat-containing protein
MEESPRGRRKRAHPSSPSPPSPISKKPQTFPSFQDIPNLPSNIKSLCHLIATTSAATVEHSLQSAAISVIPHDVEEVLKLSYGFPGQSVKFFRWSGRHLNDNHTPYSWNLVVDILGRNRFFDPMWDAVKSMNKEGLLSLATFASVFSSYVAADRIREAIMAFEIMDNYGCVRDAFALNSLLSAICSNGRTLDACDYLQVAKKFVRPDTDTYAILMEGWEGEKSMVSAKETFAEMVIEIGWDPANVPAYDSFLCTLVRGHDGLLEAIKFVDSMRDRRCYPGVRFLKAALDECVKCHDVRTAEFFWEVLVVGKVLQPTSEMYNLMIGLCCYRGDTDAARRMLHEMVYQGAFPDVVTYNLLFKFLLKGRKLREASSVFAEMVQNECVPEQDNCDLAVKAYVDCGEPVMAIKVWKCLVENYKKGLEQTANFLVVGLCNLNRPQVAVKYAEDMIGRGISLSSSTLSKLRQSLVKERREYVYEDLLRKWKSH

SEQ ID NO: 8082 - protein, 363 aa, Glycine max
  peptide (1)..(363): Ceres Seq. ID no. 13594218
  misc_feature (1)..(359): NCBI GI NO: 14488357 NR Description: unknown protein
  misc_feature (1)..(359): NCBI GI NO: 15223926 NR Description: pentatricopeptide (PPR) repeat-containing protein
  misc_feature (1)..(359): NCBI GI NO: 15223927 NR Description: pentatricopeptide (PPR) repeat-containing protein
  misc_feature (1)..(361): NCBI GI NO: 15228767 NR Description: pentatricopeptide (PPR) repeat-containing protein
  misc_feature (1)..(359): NCBI GI NO: 18394846 NR Description: expressed protein [Arabidopsis thaliana]
  misc_feature (1)..(361): NCBI GI NO: 15228788 NR Description: pentatricopeptide (PPR) repeat-containing protein
  misc_feature (1)..(361): NCBI GI NO: 15241508 NR Description: pentatricopeptide (PPR) repeat-containing protein
  misc_feature (1)..(345): NCBI GI NO: 15219049 NR Description: hypothetical protein [Arabidopsis thaliana]
  misc_feature (1)..(359): NCBI GI NO: 25511622 NR Description: T6A9.11 protein - Arabidopsis thaliana
  misc_feature (1)..(359): NCBI GI NO: 15217756 NR Description: pentatricopeptide (PPR) repeat-containing protein
MWDAVKSMNKEGLLSLATFASVFSSYVAADRIREAIMAFEIMDNYGCVRDAFALNSLLSAICSNGRTLDACDYLQVAKKFVRPDTDTYAILMEGWEGEKSMVSAKETFAEMVIEIGWDPANVPAYDSFLCTLVRGHDGLLEAIKFVDSMRDRRCYPGVRFLKAALDECVKCHDVRTAEFFWEVLVVGKVLQPTSEMYNLMIGLCCYRGDTDAARRMLHEMVYQGAFPDVVTYNLLFKFLLKGRKLREASSVFAEMVQNECVPEQDNCDLAVKAYVDCGEPVMAIKVWKCLVENYKKGLEQTANFLVVGLCNLNRPQVAVKYAEDMIGRGISLSSSTLSKLRQSLVKERREYVYEDLLRKWKSH

SEQ ID NO: 8083 - protein, 356 aa, Glycine max
  peptide (1)..(356): Ceres Seq. ID no. 13594219
  misc_feature (1)..(352): NCBI GI NO: 14488357 NR Description: unknown protein
  misc_feature (1)..(352): NCBI GI NO: 15223926 NR Description: pentatricopeptide (PPR) repeat-containing protein
  misc_feature (1)..(352): NCBI GI NO: 15223927 NR Description: pentatricopeptide (PPR) repeat-containing protein
  misc_feature (1)..(354): NCBI GI NO: 15228767 NR Description: pentatricopeptide (PPR) repeat-containing protein
  misc_feature (1)..(352): NCBI GI NO: 18394846 NR Description: expressed protein [Arabidopsis thaliana]
  misc_feature (1)..(354): NCBI GI NO: 15228788 NR Description: pentatricopeptide (PPR) repeat-containing protein
  misc_feature (1)..(354): NCBI GI NO: 15241508 NR Description: pentatricopeptide (PPR) repeat-containing protein
  misc_feature (1)..(338): NCBI GI NO: 15219049 NR Description: hypothetical protein [Arabidopsis thaliana]
  misc_feature (1)..(352): NCBI GI NO: 25511622 NR Description: T6A9.11 protein - Arabidopsis thaliana
  misc_feature (1)..(352): NCBI GI NO: 15217756 NR Description: pentatricopeptide (PPR) repeat-containing protein
MNKEGLLSLATFASVFSSYVAADRIREAIMAFEIMDNYGCVRDAFALNSLLSAICSNGRTLDACDYLQVAKKFVRPDTDTYAILMEGWEGEKSMVSAKETFAEMVIEIGWDPANVPAYDSFLCTLVRGHDGLLEAIKFVDSMRDRRCYPGVRFLKAALDECVKCHDVRTAEFFWEVLVVGKVLQPTSEMYNLMIGLCCYRGDTDAARRMLHEMVYQGAFPDVVTYNLLFKFLLKGRKLREASSVFAEMVQNECVPEQDNCDLAVKAYVDCGEPVMAIKVWKCLVENYKKGLEQTANFLVVGLCNLNRPQVAVKYAEDMIGRGISLSSSTLSKLRQSLVKERREYVYEDLLRKWKSH

SEQ ID NO: 8084 - DNA, 837 bp, Glycine max
  misc_feature (1)..(837): Ceres Seq. ID no. 13594121
acttaccacacacacctcctaaaccaaaattatccaaaaccatgtccagcttcactcatgccaccacactcctccatgcccacatcaaaaccaagcacaaaaaaccctccaccaccaccaccaccaccaccccattaccccataaccattcccccaacagaaggaagctgatttcaacttttctagccacttcaacagcagcactactagtgcatggagtcaccagcaccccacaagcactggcccagagctggggcacgcactccttcatcaaggagcacttcttcgagccggggctctccccggaagacgcggtggcgaggataaagcagactgcggaggggctgcacagcattcgggaggcgctggagaccatgtcttggaggtatatcatgttctacatacgcatcaagcaggcctatcttgaccaggacttgaggactgccttcaccaccttgcctgagagtagacgcaaggagtatgtcaaaactgctaatgagttggtgtctaactttggtgagtttgataggcatattcggacgccaaaggtatatgaatcatacctatactacgagaagacattgaagtcaatagatcaacttgtggccatactagcatagcacaaggaggaagctgcagggtataacggtcttaatttgcaattcttatttttatggtataaagcctcttgttacgttttttttccttccattttaattccgaattgaaatagaaggtattatagcacgaagttcaagcatatattatgtacatgtttgtatgcaacttcaaattcatgaacacaaagaaggttctaaaatgagaagcttcaatctc

SEQ ID NO: 8085 - protein, 205 aa, Glycine max
  peptide (1)..(205): Ceres Seq. ID no. 15221309
  misc_feature (16)..(205): Pfam Name: PsbQ Pfam Description: Oxygen evolving enhancer protein 3
  misc_feature (14)..(205): NCBI GI NO: 18394073 NR Description: PsbQ domain protein family [Arabidopsis thaliana]
  misc_feature (90)..(200): NCBI GI NO: 8131595 NR Description: oxygen evolving enhancer protein 3
  misc_feature (85)..(204): NCBI GI NO: 34810268 NR Description: Chain A
  misc_feature (90)..(204): NCBI GI NO: 11134066 NR Description: Oxygen-evolving enhancer protein 3-2
  misc_feature (90)..(204): NCBI GI NO: 11134057 NR Description: Oxygen-evolving enhancer protein 3-1
  misc_feature (85)..(204): NCBI GI NO: 131397 NR Description: Oxygen-evolving enhancer protein 3
  misc_feature (90)..(204): NCBI GI NO: 15234637 NR Description: oxygen-evolving complex protein 16
LPHTPPKPKLSKTMSSFTHATTLLHAHIKTKHKKPSTTTTTTTPLPHNHSPNRRKLISTFLATSTAALLVHGVTSTPQALAQSWGTHSFIKEHFFEPGLSPEDAVARIKQTAEGLHSIREALETMSWRYIMFYIRIKQAYLDQDLRTAFTTLPESRRKEYVKTANELVSNFGEFDRHIRTPKVYESYLYYEKTLKSIDQLVAILA

SEQ ID NO: 8086 - protein, 192 aa, Glycine max
  peptide (1)..(192): Ceres Seq. ID no. 15221310
  misc_feature (3)..(192): Pfam Name: PsbQ Pfam Description: Oxygen evolving enhancer protein 3
  misc_feature (1)..(192): NCBI GI NO: 18394073 NR Description: PsbQ domain protein family [Arabidopsis thaliana]
  misc_feature (77)..(187): NCBI GI NO: 8131595 NR Description: oxygen evolving enhancer protein 3
  misc_feature (72)..(191): NCBI GI NO: 34810268 NR Description: Chain A
  misc_feature (77)..(191): NCBI GI NO: 11134066 NR Description: Oxygen-evolving enhancer protein 3-2
  misc_feature (77)..(191): NCBI GI NO: 11134057 NR Description: Oxygen-evolving enhancer protein 3-1
  misc_feature (72)..(191): NCBI GI NO: 131397 NR Description: Oxygen-evolving enhancer protein 3
  misc_feature (77)..(191): NCBI GI NO: 15234637 NR Description: oxygen-evolving complex protein 16
MSSFTHATTLLHAHIKTKHKKPSTTTTTTTPLPHNHSPNRRKLISTFLATSTAALLVHGVTSTPQALAQSWGTHSFIKEHFFEPGLSPEDAVARIKQTAEGLHSIREALETMSWRYIMFYIRIKQAYLDQDLRTAFTTLPESRRKEYVKTANELVSNFGEFDRHIRTPKVYESYLYYEKTLKSIDQLVAILA

SEQ ID NO: 8087 - DNA, 1314 bp, Glycine max
  misc_feature (1)..(1314): Ceres Seq. ID no. 15225046
aacaacctaaaaaatattcactaagatttatttcccttattttattcatttattctttgttcctagtctttatcttataatttctcattgcttgcccggtaattcaagatcaacttggaaaatttgcaagatttgggatgaaatctggtcggatcttgctttgtgggatggggattttggtgggtcttatttcaatacaaagctcttcctctctcaatcccatctccctctcttcttcttcttcttcttcttcataacacaaacacaaaacataaacctttcttccaaccaaccttttttccaattcattctttgtttcttcaaaaatcttcaatccattttcaccttttcacaaatggggatggctgcagagtcacagtttcatgtcttggctgttgatgacagtctcatagataggaaactcattgagaggctcctcagaacctcttcttatgaagttactacagttgattctggtagcaaggctttagagtttctggggttgtgtgagaatgatgagagcaacccaagtacaccatatgtttgtcccaacaaccatcaggaggtggaggtgaatcttgttataacagattactgtatgcctggcatgacaggctatgacttgcttaagaaaatcaaggaatcttcatctttgagaaacataccggtggtgattatgtcatctgaaaatgtgccttcaaggattaacagatgtttggaggaaggagcagaagaatttttcttgaagcctgtgaggctgtcagatttaaacaagcttaaaccccatatgaagaaaaccaagttgaaagatcaaaaacaaggaacagtagaaaagcttgaagacttagaagttcaacagcaacagccacaacaacaaatcatcatccaaaatgagcagcaacaagcaccaaaatcccgagatcttcttcagccagagtcagagtcacatccacatgcacaaccaactattgaacaacagcaacaatcactacaacaagccaacaacaatagcaagaggaagaccatggaacagggcctttcacctgagactgacagaacaagaccaagatacagtggcatagccactgtggtatgatcataaatcattggcaaataattttcttgaatttcaaaaatgtaattctcataacttctttcttcttcttttaaaaaaaattaacttaagtgttggttaatataggctctataggagtgtagtagagttgtttcctgtacacattttcctggaaatatttccttccaattttgcttccccccaatataaatgaaaaagaaaaaagaaatattgaattg

SEQ ID NO: 8088 - protein, 246 aa, Glycine max
  peptide (1)..(246): Ceres Seq. ID no. 15225047
  misc_feature (9)..(149): Pfam Name: Pfam Description:  Response regulator receiver domain
  misc_feature (1)..(246): NCBI GI NO: 15230202 NR Description: responce reactor 4 [Arabidopsis thaliana]
  misc_feature (1)..(214): NCBI GI NO: 15227325 NR Description: two-component response regulator 3 protein -related
  misc_feature (1)..(201): NCBI GI NO: 12060388 NR Description: response regulator 6 [Zea mays]
  misc_feature (5)..(174): NCBI GI NO: 12060386 NR Description: response regulator 5 [Zea mays]
  misc_feature (5)..(149): NCBI GI NO: 34906626 NR Description: putative response regulator
  misc_feature (5)..(189): NCBI GI NO: 12060384 NR Description: response regulator 4 [Zea mays]
  misc_feature (9)..(143): NCBI GI NO: 33330868 NR Description: type-A response regulator [Catharanthus roseus]
  misc_feature (7)..(236): NCBI GI NO: 13173408 NR Description: response regulator protein [Dianthus caryophyllus]
  misc_feature (8)..(203): NCBI GI NO: 15218550 NR Description: response regulator1 (ATRR1) [Arabidopsis thaliana]
  misc_feature (8)..(161): NCBI GI NO: 15218957 NR Description: response regulator 3 [Arabidopsis thaliana]
MGMAAESQFHVLAVDDSLIDRKLIERLLRTSSYEVTTVDSGSKALEFLGLCENDESNPSTPYVCPNNHQEVEVNLVITDYCMPGMTGYDLLKKIKESSSLRNIPVVIMSSENVPSRINRCLEEGAEEFFLKPVRLSDLNKLKPHMKKTKLKDQKQGTVEKLEDLEVQQQQPQQQIIIQNEQQQAPKSRDLLQPESESHPHAQPTIEQQQQSLQQANNNSKRKTMEQGLSPETDRTRPRYSGIATVV

SEQ ID NO: 8089 - protein, 244 aa, Glycine max
  peptide (1)..(244): Ceres Seq. ID no. 15225048
  misc_feature (7)..(147): Pfam Name: Pfam Description:  Response regulator receiver domain
  misc_feature (1)..(244): NCBI GI NO: 15230202 NR Description: responce reactor 4 [Arabidopsis thaliana]
  misc_feature (1)..(212): NCBI GI NO: 15227325 NR Description: two-component response regulator 3 protein -related
  misc_feature (1)..(199): NCBI GI NO: 12060388 NR Description: response regulator 6 [Zea mays]
  misc_feature (3)..(172): NCBI GI NO: 12060386 NR Description: response regulator 5 [Zea mays]
  misc_feature (3)..(147): NCBI GI NO: 34906626 NR Description: putative response regulator
  misc_feature (3)..(187): NCBI GI NO: 12060384 NR Description: response regulator 4 [Zea mays]
  misc_feature (7)..(141): NCBI GI NO: 33330868 NR Description: type-A response regulator [Catharanthus roseus]
  misc_feature (5)..(234): NCBI GI NO: 13173408 NR Description: response regulator protein [Dianthus caryophyllus]
  misc_feature (6)..(201): NCBI GI NO: 15218550 NR Description: response regulator1 (ATRR1) [Arabidopsis thaliana]
  misc_feature (6)..(159): NCBI GI NO: 15218957 NR Description: response regulator 3 [Arabidopsis thaliana]
MAAESQFHVLAVDDSLIDRKLIERLLRTSSYEVTTVDSGSKALEFLGLCENDESNPSTPYVCPNNHQEVEVNLVITDYCMPGMTGYDLLKKIKESSSLRNIPVVIMSSENVPSRINRCLEEGAEEFFLKPVRLSDLNKLKPHMKKTKLKDQKQGTVEKLEDLEVQQQQPQQQIIIQNEQQQAPKSRDLLQPESESHPHAQPTIEQQQQSLQQANNNSKRKTMEQGLSPETDRTRPRYSGIATVV

SEQ ID NO: 8090 - protein, 165 aa, Glycine max
  peptide (1)..(165): Ceres Seq. ID no. 15225049
  misc_feature (1)..(68): Pfam Name: Pfam Description:  Response regulator receiver domain
  misc_feature (1)..(165): NCBI GI NO: 15230202 NR Description: responce reactor 4 [Arabidopsis thaliana]
  misc_feature (1)..(133): NCBI GI NO: 15227325 NR Description: two-component response regulator 3 protein -related
  misc_feature (1)..(120): NCBI GI NO: 12060388 NR Description: response regulator 6 [Zea mays]
  misc_feature (1)..(93): NCBI GI NO: 12060386 NR Description: response regulator 5 [Zea mays]
  misc_feature (1)..(68): NCBI GI NO: 34906626 NR Description: putative response regulator
  misc_feature (1)..(108): NCBI GI NO: 12060384 NR Description: response regulator 4 [Zea mays]
  misc_feature (1)..(62): NCBI GI NO: 33330868 NR Description: type-A response regulator [Catharanthus roseus]
  misc_feature (1)..(155): NCBI GI NO: 13173408 NR Description: response regulator protein [Dianthus caryophyllus]
  misc_feature (1)..(122): NCBI GI NO: 15218550 NR Description: response regulator1 (ATRR1) [Arabidopsis thaliana]
  misc_feature (1)..(80): NCBI GI NO: 15218957 NR Description: response regulator 3 [Arabidopsis thaliana]
MPGMTGYDLLKKIKESSSLRNIPVVIMSSENVPSRINRCLEEGAEEFFLKPVRLSDLNKLKPHMKKTKLKDQKQGTVEKLEDLEVQQQQPQQQIIIQNEQQQAPKSRDLLQPESESHPHAQPTIEQQQQSLQQANNNSKRKTMEQGLSPETDRTRPRYSGIATVV

SEQ ID NO: 8091 - DNA, 1163 bp, Glycine max
  misc_feature (1)..(1163): Ceres Seq. ID no. 12608028
atcagtaaccgcgatttcttctccttccctgcttcaactctattcgaaatttcacagtgcggagatcctcctccatggatcgccggaaaagcaacgagacaacgaagtcgtcgacaacctcaaccgtggaattgccaccaccaatctcagcctcagaagcccttatagtcaacgcattatgcgcgcttggcttggccttcgccttctggattgcgaacactgtctactccatcgaactcgttactcatccttctctcacactcttcttcatctggattacagagctccccattgtgacccttctatacagtcgatatcgacaaaatcggaagcaatgcacgtacctgcgagctgttgggagaggggttctaggagtgcctgttggggcactactgaattttttaggagctattgctgtgggggcgcctgttacatttcagtatcttcccaagactgtaaattgggctcttatgatgtctgtgttcacaacaattccagcgtcatgtgttcttggttcatcgtgggctgactggcgacgtatatttgcacaaacaaagccaaaaggatctatagagtacctgatttgtttaccagcacatggagcagttattggagcatggtttggggcttggccaatgcctcttgactgggagaggccatggcaggaatggcccatttctgtgagctatgggaccgtagctggttacctggtggcattggttgcatcattgggctttgttcttgcttgtggtagatcacaacatatcaaaagagaatgaagtgctagtagaagcatctgattatactaattgtgggtgagatgtagaagcataatatcttgatgaactagacatggaagctgtcttctttaggacctgtttgtaggcaatggataatgaattatgatgacaaagggaaaattggtgctataaaactccaggctctcgccatgacatggtccagcatggggttgaatccattatggatctattgtagacagtattaccttgcatttgtaagaggctaatttcgtatgcaaatatgtgacctcctagtcacttggctgcaaatctaactgttgtaccaaggttttctttcagtgatttatgatgataacgatttatttctattttgttttagtaatgttcaagaagtatgctttt

SEQ ID NO: 8092 - protein, 234 aa, Glycine max
  peptide (1)..(234): Ceres Seq. ID no. 12608029
  misc_feature (11)..(231): NCBI GI NO: 25518421 NR Description: hypothetical protein T24D18
  misc_feature (11)..(219): NCBI GI NO: 30684686 NR Description: expressed protein [Arabidopsis thaliana]
  misc_feature (30)..(218): NCBI GI NO: 6679315 NR Description: phosphatidylinositol glycan, class F
  misc_feature (30)..(218): NCBI GI NO: 22135636 NR Description: phosphatidylinositol glycan, class F
  misc_feature (30)..(218): NCBI GI NO: 4505797 NR Description: phosphatidylinositol glycan, class F isoform 1
  misc_feature (97)..(223): NCBI GI NO: 19075814 NR Description: putative short-chain dehydrogenase
  misc_feature (30)..(197): NCBI GI NO: 27894291 NR Description: phosphatidylinositol glycan, class F isoform 2
  misc_feature (89)..(227): NCBI GI NO: 32412938 NR Description: hypothetical protein [Neurospora crassa]
MDRRKSNETTKSSTTSTVELPPPISASEALIVNALCALGLAFAFWIANTVYSIELVTHPSLTLFFIWITELPIVTLLYSRYRQNRKQCTYLRAVGRGVLGVPVGALLNFLGAIAVGAPVTFQYLPKTVNWALMMSVFTTIPASCVLGSSWADWRRIFAQTKPKGSIEYLICLPAHGAVIGAWFGAWPMPLDWERPWQEWPISVSYGTVAGYLVALVASLGFVLACGRSQHIKRE

SEQ ID NO: 8093 - protein, 175 aa, Glycine max
  peptide (1)..(175): Ceres Seq. ID no. 12608030
SVTAISSPSLLQLYSKFHSAEILLHGSPEKQRDNEVVDNLNRGIATTNLSLRSPYSQRIMRAWLGLRLLDCEHCLLHRTRYSSFSHTLLHLDYRAPHCDPSIQSISTKSEAMHVPASCWERGSRSACWGTTEFFRSYCCGGACYISVSSQDCKLGSYDVCVHNNSSVMCSWFIVG

SEQ ID NO: 8094 - DNA, 1019 bp, Glycine max
  misc_feature (1)..(1019): Ceres Seq. ID no. 15168461
atatatatatatgaatagagatagagcatgaggcaaagtcaacagtgaagaggtgtgacagagagacaaaagaaaagatgtcagggcctcaatgctgttcaaatccaccaagcttgaaccccggtggaggagttgggcatgtggacaaagtgggtggtgttgattcctatttcactggatctcctcactccaaactcgctgttcttatgctctccgatgtttttggatatgaagcgccaaatttaaggaagcttgctgacaaagttggggctgctgggtattatgtagttgttcctgacctcttggatggcgaaccctttaatcctcagaattcggacaggccctttcctgcttggataaaagatcatggaccagtggagaaaggtgctgaagctacaaaacccataattgaagccttaaaaagtaaaggtgtttcagctattgcagctgttggtttttgttggggtgcaaaggttgtggttgaacttgcgaaatccagactgatccaaactgcagtgctattgcatccatcatttgtctccctggatgacatcaagggtgttgatattccaattgctatacttggagccgaggtagaccaagtttctcctccagagcttgtgaaacaatttgaacaagtcctagctgctaaatctggggttgccagttttgttaaaatatttcccaaagtttcacacggttgggctgtgagatataacactgaagatgcagaaaccgtaaaggtggcagaagaggcccaccaggacttgctggactggcttgctaaacatcataagtgagacatcttgctctgttaagactgtacaatggagtacttgagtgaaggatgtaatgtaaaatggtactcaatcaacgtagctgtagtttgcaagaaaataaatgttgtattgttacatgttggaagtggatcttattgctagatgatcctaataatgttgctttccgtgatttgagtttggtggacaattgtgatttgagatcttaataaatcatatttc

SEQ ID NO: 8095 - protein, 240 aa, Glycine max
  peptide (1)..(240): Ceres Seq. ID no. 15168462
  misc_feature (28)..(238): Pfam Name: Pfam Description:  Dienelactone hydrolase family
  misc_feature (1)..(240): NCBI GI NO: 18403820 NR Description: expressed protein [Arabidopsis thaliana]
  misc_feature (1)..(240): NCBI GI NO: 18403812 NR Description: expressed protein [Arabidopsis thaliana]
  misc_feature (1)..(240): NCBI GI NO: 24899687 NR Description: Unknown protein [Arabidopsis thaliana]
  misc_feature (50)..(240): NCBI GI NO: 9294513 NR Description: contains similarity to endo-1
  misc_feature (5)..(240): NCBI GI NO: 40253303 NR Description: putative Endo-1,3;1,4-beta-D-glucanase precursor
  misc_feature (6)..(240): NCBI GI NO: 40253306 NR Description: putative Endo-1,3;1,4-beta-D-glucanase precursor
  misc_feature (5)..(195): NCBI GI NO: 8928122 NR Description: Endo-1,3;1,4-beta-D-glucanase precursor
  misc_feature (69)..(240): NCBI GI NO: 40253308 NR Description: Endo-1,3
  misc_feature (17)..(238): NCBI GI NO: 38181938 NR Description: Unknown (protein for MGC:76315)
  misc_feature (17)..(238): NCBI GI NO: 31712014 NR Description: RIKEN cDNA 2310016A09 [Mus musculus]
MSGPQCCSNPPSLNPGGGVGHVDKVGGVDSYFTGSPHSKLAVLMLSDVFGYEAPNLRKLADKVGAAGYYVVVPDLLDGEPFNPQNSDRPFPAWIKDHGPVEKGAEATKPIIEALKSKGVSAIAAVGFCWGAKVVVELAKSRLIQTAVLLHPSFVSLDDIKGVDIPIAILGAEVDQVSPPELVKQFEQVLAAKSGVASFVKIFPKVSHGWAVRYNTEDAETVKVAEEAHQDLLDWLAKHHK

SEQ ID NO: 8096 - protein, 197 aa, Glycine max
  peptide (1)..(197): Ceres Seq. ID no. 15168463
  misc_feature (1)..(195): Pfam Name: Pfam Description:  Dienelactone hydrolase family
  misc_feature (1)..(197): NCBI GI NO: 18403820 NR Description: expressed protein [Arabidopsis thaliana]
  misc_feature (1)..(197): NCBI GI NO: 18403812 NR Description: expressed protein [Arabidopsis thaliana]
  misc_feature (1)..(197): NCBI GI NO: 24899687 NR Description: Unknown protein [Arabidopsis thaliana]
  misc_feature (7)..(197): NCBI GI NO: 9294513 NR Description: contains similarity to endo-1
  misc_feature (1)..(197): NCBI GI NO: 40253303 NR Description: putative Endo-1,3;1,4-beta-D-glucanase precursor
  misc_feature (1)..(197): NCBI GI NO: 40253306 NR Description: putative Endo-1,3;1,4-beta-D-glucanase precursor
  misc_feature (1)..(152): NCBI GI NO: 8928122 NR Description: Endo-1,3;1,4-beta-D-glucanase precursor
  misc_feature (26)..(197): NCBI GI NO: 40253308 NR Description: Endo-1,3
  misc_feature (1)..(195): NCBI GI NO: 38181938 NR Description: Unknown (protein for MGC:76315)
  misc_feature (1)..(195): NCBI GI NO: 31712014 NR Description: RIKEN cDNA 2310016A09 [Mus musculus]
MLSDVFGYEAPNLRKLADKVGAAGYYVVVPDLLDGEPFNPQNSDRPFPAWIKDHGPVEKGAEATKPIIEALKSKGVSAIAAVGFCWGAKVVVELAKSRLIQTAVLLHPSFVSLDDIKGVDIPIAILGAEVDQVSPPELVKQFEQVLAAKSGVASFVKIFPKVSHGWAVRYNTEDAETVKVAEEAHQDLLDWLAKHHK

SEQ ID NO: 8097 - DNA, 1524 bp, Glycine max
  misc_feature (1)..(1524): Ceres Seq. ID no. 15168517
acttgattacatcccctccgttcatggaccaatatgctcaagcttcttcttccatcctcatcctctaaactcatctccagacacattttctcacaactatcacgccccaccaccaccatgtccataaatctacgcacccacgccttcgcgggtaacccgctccgatcccccaaccgggtcgacccgttttcgcccgcctccgcgctcgagaccctcacgacccgaatcctcgacgccgcgcacgtgtcctcaccgtccgtggattttaaggtcttgccttttagaaatgggagggtgctggcttcttcggagagtggtgacacgtggcgcctcgggtggatcgcgctggaggaagtgaagggtctattgggtgcggatttgagcgcggactcgttcgtttatttggggtcagactcggactcagactcggtggtgtactgggcgatcgacgtgtcgagggagagtgggttggtgacggaattcagtggcgtgaggttgtgcttcgtggagctcaggacgctcatggtcgctaccgattgggtggatttgaagaccatggggaacctcgccatcgccggtcatgccagggcacttcttgaatggcataaaatatcacgattttgtggacattgtggagagaaaacagtccctatggaagctgggagacgtaaacagtgctcaaatgaatcatgcaaacagaggatatatccacgacttgacccggtggtcattatgctagtaattgatcgggagaatgaccgtgcccttttgagcaaacaatcgagatttgtacctagaatgtggagctgcttagcaggttttatagagccaggagaaagcttggaggaggctgtaagaagagaaacgtgggaggagactggtattgaagtgggagaagttgtatatcatagctctcagccatggcctgttggaccgaatagcatgccatgtcagctgatggtggggttctttgcatatgcgaaatcccttgaaataaatgtggacaaagaagagttggaagatgctcagtggcacagtagagaatatgtaagaaaggctctgacatttgctgaatacaagaaagcccaacaaactgcggtagcgaaggtagaacaaatgtgtaagggagtagaaaaggctcacagcttgtctaccgatttcaatgtggaaagtggtgaacttgctccaatgtttgttcctggaccctttgcaatagctcatcaccttatttcctcctgggcattcccagatcaaaatgtaaatggcagtgaatgtcattcaaaacaggctagtggttctatgtcaaatttgtaggagtgcaaattatttttttaaaggcacctttgattttacattgttttccatactaaactgatgtgagatataatcaatcaccataagactgactgcattatgttgcattttctttgttgggcgtagaaacataaattgggcagttgaattgtttagggtttttttatgtgtaagaattaaataagatatcaagagatttataacatttac

SEQ ID NO: 8098 - protein, 426 aa, Glycine max
  peptide (1)..(426): Ceres Seq. ID no. 15168518
  misc_feature (229)..(360): Pfam Name: Pfam Description:  NUDIX domain
  misc_feature (1)..(426): NCBI GI NO: 15241252 NR Description: MutT/nudix family protein [Arabidopsis thaliana]
  misc_feature (29)..(189): NCBI GI NO: 5803245 NR Description: hypothetical protein
  misc_feature (317)..(404): NCBI GI NO: 5803245 NR Description: hypothetical protein
  misc_feature (177)..(347): NCBI GI NO: 23109722 NR Description: hypothetical protein
  misc_feature (127)..(344): NCBI GI NO: 21312664 NR Description: RIKEN cDNA 0610016O18 [Mus musculus]
  misc_feature (102)..(343): NCBI GI NO: 22988758 NR Description: hypothetical protein [Burkholderia fungorum]
  misc_feature (180)..(344): NCBI GI NO: 13899267 NR Description: nudix
  misc_feature (178)..(343): NCBI GI NO: 15887452 NR Description: AGR_C_150p [Agrobacterium tumefaciens]
  misc_feature (184)..(336): NCBI GI NO: 15963981 NR Description: HYPOTHETICAL PROTEIN [Sinorhizobium meliloti]
  misc_feature (183)..(347): NCBI GI NO: 29829616 NR Description: hypothetical protein
MLKLLLPSSSSKLISRHIFSQLSRPTTTMSINLRTHAFAGNPLRSPNRVDPFSPASALETLTTRILDAAHVSSPSVDFKVLPFRNGRVLASSESGDTWRLGWIALEEVKGLLGADLSADSFVYLGSDSDSDSVVYWAIDVSRESGLVTEFSGVRLCFVELRTLMVATDWVDLKTMGNLAIAGHARALLEWHKISRFCGHCGEKTVPMEAGRRKQCSNESCKQRIYPRLDPVVIMLVIDRENDRALLSKQSRFVPRMWSCLAGFIEPGESLEEAVRRETWEETGIEVGEVVYHSSQPWPVGPNSMPCQLMVGFFAYAKSLEINVDKEELEDAQWHSREYVRKALTFAEYKKAQQTAVAKVEQMCKGVEKAHSLSTDFNVESGELAPMFVPGPFAIAHHLISSWAFPDQNVNGSECHSKQASGSMSNL

SEQ ID NO: 8099 - protein, 398 aa, Glycine max
  peptide (1)..(398): Ceres Seq. ID no. 15168519
  misc_feature (201)..(332): Pfam Name: Pfam Description:  NUDIX domain
  misc_feature (1)..(398): NCBI GI NO: 15241252 NR Description: MutT/nudix family protein [Arabidopsis thaliana]
  misc_feature (1)..(161): NCBI GI NO: 5803245 NR Description: hypothetical protein
  misc_feature (289)..(376): NCBI GI NO: 5803245 NR Description: hypothetical protein
  misc_feature (149)..(319): NCBI GI NO: 23109722 NR Description: hypothetical protein
  misc_feature (99)..(316): NCBI GI NO: 21312664 NR Description: RIKEN cDNA 0610016O18 [Mus musculus]
  misc_feature (74)..(315): NCBI GI NO: 22988758 NR Description: hypothetical protein [Burkholderia fungorum]
  misc_feature (152)..(316): NCBI GI NO: 13899267 NR Description: nudix
  misc_feature (150)..(315): NCBI GI NO: 15887452 NR Description: AGR_C_150p [Agrobacterium tumefaciens]
  misc_feature (156)..(308): NCBI GI NO: 15963981 NR Description: HYPOTHETICAL PROTEIN [Sinorhizobium meliloti]
  misc_feature (155)..(319): NCBI GI NO: 29829616 NR Description: hypothetical protein
MSINLRTHAFAGNPLRSPNRVDPFSPASALETLTTRILDAAHVSSPSVDFKVLPFRNGRVLASSESGDTWRLGWIALEEVKGLLGADLSADSFVYLGSDSDSDSVVYWAIDVSRESGLVTEFSGVRLCFVELRTLMVATDWVDLKTMGNLAIAGHARALLEWHKISRFCGHCGEKTVPMEAGRRKQCSNESCKQRIYPRLDPVVIMLVIDRENDRALLSKQSRFVPRMWSCLAGFIEPGESLEEAVRRETWEETGIEVGEVVYHSSQPWPVGPNSMPCQLMVGFFAYAKSLEINVDKEELEDAQWHSREYVRKALTFAEYKKAQQTAVAKVEQMCKGVEKAHSLSTDFNVESGELAPMFVPGPFAIAHHLISSWAFPDQNVNGSECHSKQASGSMSNL

SEQ ID NO: 8100 - protein, 263 aa, Glycine max
  peptide (1)..(263): Ceres Seq. ID no. 15168520
  misc_feature (66)..(197): Pfam Name: Pfam Description:  NUDIX domain
  misc_feature (1)..(263): NCBI GI NO: 15241252 NR Description: MutT/nudix family protein [Arabidopsis thaliana]
  misc_feature (1)..(26): NCBI GI NO: 5803245 NR Description: hypothetical protein
  misc_feature (154)..(241): NCBI GI NO: 5803245 NR Description: hypothetical protein
  misc_feature (14)..(184): NCBI GI NO: 23109722 NR Description: hypothetical protein
  misc_feature (1)..(181): NCBI GI NO: 21312664 NR Description: RIKEN cDNA 0610016O18 [Mus musculus]
  misc_feature (1)..(180): NCBI GI NO: 22988758 NR Description: hypothetical protein [Burkholderia fungorum]
  misc_feature (17)..(181): NCBI GI NO: 13899267 NR Description: nudix
  misc_feature (15)..(180): NCBI GI NO: 15887452 NR Description: AGR_C_150p [Agrobacterium tumefaciens]
  misc_feature (21)..(173): NCBI GI NO: 15963981 NR Description: HYPOTHETICAL PROTEIN [Sinorhizobium meliloti]
  misc_feature (20)..(184): NCBI GI NO: 29829616 NR Description: hypothetical protein
MVATDWVDLKTMGNLAIAGHARALLEWHKISRFCGHCGEKTVPMEAGRRKQCSNESCKQRIYPRLDPVVIMLVIDRENDRALLSKQSRFVPRMWSCLAGFIEPGESLEEAVRRETWEETGIEVGEVVYHSSQPWPVGPNSMPCQLMVGFFAYAKSLEINVDKEELEDAQWHSREYVRKALTFAEYKKAQQTAVAKVEQMCKGVEKAHSLSTDFNVESGELAPMFVPGPFAIAHHLISSWAFPDQNVNGSECHSKQASGSMSNL

SEQ ID NO: 8101 - DNA, 1478 bp, Glycine max
  misc_feature (1)..(1478): Ceres Seq. ID no. 15175775
aacctcactgtgaccccttaaggccttcttcaaccttctaaaacaccaccctcttttgcataacttcaccaaaatgtccctctgctacacttccaatttcatctcactgaaccatcaaaagagcttctccttaaccttctcttcagagtcttctcctcacttcatcaacctatttccggttaagcctcagaaaccacaccaccctattaagttcaccgcagaaaggttcaaactttttgcctctctgacatcatctccatccgttgagacctccccatcaagttataggagcaagagccccaaagatgttaacgtcttggtggtgggttcaactgggtacattggaaagttcgtggtgagagagttagttaagagagggtttaatgttacagccatagctagagagaggagtggaattaagggcagtgttgataaggatcagactttgggtcagttgagaggggccaatgtgtgtttctcagacgtgaccaatttggatgtttttgaggaatctctgaacaggttggggaagtcatttgatgttgtggtgtcatgtcttgctagtagaaatggaggtgtgaaggactcttggaagatagattatgaggcaacaaggaatagccttgttgctggaagaaaacgtggggcttcacattttgtgttgctttcagcaatatgtgtgcagaagccgctcctcgagtttcagcgtgccaagttgaagtttgaggatgagttggtgaagttagctgaggaggatggtggattcacttatagcatagtgaggccaactgcatttttcaagagtttggggggtcaggttgagttagtgaaggatgggaaaccttatgttatgtttggagatgggaaactgtgtgcttgtaagcctataagtgagtctgatttggcttcttttattgtggattgtgtgctgagtgaggataagattaaccaggtgttgccaattggagggcctgggaaggcattgactccattggaacaaggggagatgctgtttaggcttttggggaaggagcctaagttcttgaaagttccaatcgggatcatggatttcgccattggggttcttgactttttggttaaggtctttccttcactggaagatgctgctgagtttgggaagattggaaggtactatgcggcggaaagtatgttgcttctggatcccgagaccggagaatacagtgctgagaaaacacctagctatgggaatgatacattggaagagttttttgcaagggttctcagggagggcatggctggtcaagaactaggtgagcaaacaatattttaagatgattgtggttagatatgtatgaacacaataaggcaaatagagcaaccagttttgtttctgtaaatgtatgtattcagctagagtcactgtaatgtttacaagttcaggcattgttgaaagaaattcaagtctctggaaatgaattgttgaagattcattcttc

SEQ ID NO: 8102 - protein, 412 aa, Glycine max
  peptide (1)..(412): Ceres Seq. ID no. 15175776
  misc_feature (81)..(331): Pfam Name: Pfam Description:  Isoflavone reductase
  misc_feature (1)..(409): NCBI GI NO: 15239530 NR Description: isoflavone reductase-related
  misc_feature (1)..(409): NCBI GI NO: 26449404 NR Description: unknown protein [Arabidopsis thaliana]
  misc_feature (1)..(409): NCBI GI NO: 21553818 NR Description: unknown [Arabidopsis thaliana]
  misc_feature (71)..(412): NCBI GI NO: 33865497 NR Description: conserved hypothetical protein
  misc_feature (81)..(412): NCBI GI NO: 21673889 NR Description: conserved hypothetical protein
  misc_feature (76)..(412): NCBI GI NO: 22959007 NR Description: hypothetical protein [Rhodobacter sphaeroides]
  misc_feature (142)..(412): NCBI GI NO: 21328662 NR Description: conserved hypothetical protein
  misc_feature (79)..(238): NCBI GI NO: 23130188 NR Description: hypothetical protein [Nostoc punctiforme]
  misc_feature (60)..(321): NCBI GI NO: 30685117 NR Description: expressed protein [Arabidopsis thaliana]
MSLCYTSNFISLNHQKSFSLTFSSESSPHFINLFPVKPQKPHHPIKFTAERFKLFASLTSSPSVETSPSSYRSKSPKDVNVLVVGSTGYIGKFVVRELVKRGFNVTAIARERSGIKGSVDKDQTLGQLRGANVCFSDVTNLDVFEESLNRLGKSFDVVVSCLASRNGGVKDSWKIDYEATRNSLVAGRKRGASHFVLLSAICVQKPLLEFQRAKLKFEDELVKLAEEDGGFTYSIVRPTAFFKSLGGQVELVKDGKPYVMFGDGKLCACKPISESDLASFIVDCVLSEDKINQVLPIGGPGKALTPLEQGEMLFRLLGKEPKFLKVPIGIMDFAIGVLDFLVKVFPSLEDAAEFGKIGRYYAAESMLLLDPETGEYSAEKTPSYGNDTLEEFFARVLREGMAGQELGEQTIF

SEQ ID NO: 8103 - DNA, 1935 bp, Glycine max
  misc_feature (1)..(1935): Ceres Seq. ID no. 15179918
acagtaactgtaaccgttccaaatttctatgccagcgaggcagagagagaaactagagcgagaaagagagagagcgccacgcaccgttcattccttcgtcctcgccgtttctaaccgtcgcagttttccggcgaagtttctccgatttgtttaaccgaaatggcggatctgtccgttctcggttggattctgtgctccgctctgagcctcttcgcgctctacagcctggccttcggcggagcgagccgtaaccgcgcttcgccggagaagaggaatgagttatcggagaccgtgacgacctccgccggagaatgtagatcagagaaacaccacggcgacgctgacgtcatcattgtcggagccggcgtcgccggcgcctctctggcgcacactctcggcaaggatgggcgtcgggtacacgtcattgaaagagacctgagtgagcctgatcgaattgttggagagttgcttcaacccggtggctatctcaaattaattgagctcggacttgaagattttgtggacaaaattgatgctcagcaagtgtttggttatgcccttttcaaggatgggaaacatactcgtctctcttaccccttggagaagtttcactcggatgtctctggcagaagctttcacaatgggcgctttattcagaggttgcgggagaaagctgcctcacttgccaatgtacgattggagcaaggaacagtcacttccctggttgaagagaagggaacaattaaaggtgtgcaatataagaacaaagatggccaggagttgacaacatatgctcctcttaccattgtttgtgatggttgcttctcaaacttacgccgttctctttgtaatcctaaggtggatattccctcatgttttgttggtttagttttagagaactgtgaacttccatgtgcaaatcatggccatgtcatactgggagacccttcgccgattctattctatcctatcagtagtacagagattcgctgtctggtcgatgtacctggtcagaaggttccttctatatcaaacggtgaaatggaaaagtatttgaagacaatggtggctccacagatccccccccagctttatgatgccttcattgctgctgttgacaaaggcaacataaggacaatgccaaacagaagcatgccagcagatcctcatcctacacccggagcccttctgatgggagatgcattcaacatgcgacatccactaactgggggaggaatgactgtagcattgtctgatattgtggtgctgagaaatcttctaagccctttgtctgacctgaatgatgcacccacactctgtaaataccttgaatcattttataccttgcgtaagcctgtggcatccaccataaatacattggcaggtgctctttacaaagtattttgtgcatcccctgatctggcaaggaaggaaatgcgccaagcttgcttcgattatctcagccttggaggcctattctcggaaggaccagtctctttactttctggattaaaccctcgtcccttgagcttggttctccatttctttgctgttgcaatatacggtgttggccgtctattgttaccatttccttcacctaagagagtatggatcggagcccgattaatctcgggtgcatctgcaatcatccttcccataattaaggccgaagggattcgtcagatgtttttccctgccactgttccagcttattacagaactcctccagttgcacaataaattgagggaaggttgaagttcgtagttctgtaagcattttggcttcttttgtgtgtattctttgtagtctgtagcttgtaatgttttaattgaatgtatcatctctgtctctctctctctctctcctttttggtacactagaaattaaatccatgatattaaactaaattacaatccactctgggcacttaaacc

SEQ ID NO: 8104 - protein, 526 aa, Glycine max
  peptide (1)..(526): Ceres Seq. ID no. 15179919
  misc_feature (211)..(409): Pfam Name: Pfam Description:  Monooxygenase
  misc_feature (3)..(524): NCBI GI NO: 27475610 NR Description: squalene monooxygenase 2 [Medicago truncatula]
  misc_feature (1)..(525): NCBI GI NO: 27475612 NR Description: squalene monooxygenase 1 [Medicago truncatula]
  misc_feature (1)..(524): NCBI GI NO: 6685403 NR Description: Squalene monooxygenase (Squalene epoxidase) (SE)
  misc_feature (6)..(522): NCBI GI NO: 27311241 NR Description: Putative Squalene monooxygenase
  misc_feature (59)..(523): NCBI GI NO: 27311240 NR Description: Putative Squalene monooxygenase
  misc_feature (9)..(526): NCBI GI NO: 18406296 NR Description: squalene monooxygenase
  misc_feature (9)..(526): NCBI GI NO: 25404216 NR Description: probable squalene monooxygenase F9K23.3
  misc_feature (16)..(523): NCBI GI NO: 18420113 NR Description: squalene monooxygenase
  misc_feature (16)..(523): NCBI GI NO: 21537043 NR Description: squalene epoxidase-like protein
  misc_feature (16)..(523): NCBI GI NO: 7488348 NR Description: squalene monooxygenase (EC 1
MADLSVLGWILCSALSLFALYSLAFGGASRNRASPEKRNELSETVTTSAGECRSEKHHGDADVIIVGAGVAGASLAHTLGKDGRRVHVIERDLSEPDRIVGELLQPGGYLKLIELGLEDFVDKIDAQQVFGYALFKDGKHTRLSYPLEKFHSDVSGRSFHNGRFIQRLREKAASLANVRLEQGTVTSLVEEKGTIKGVQYKNKDGQELTTYAPLTIVCDGCFSNLRRSLCNPKVDIPSCFVGLVLENCELPCANHGHVILGDPSPILFYPISSTEIRCLVDVPGQKVPSISNGEMEKYLKTMVAPQIPPQLYDAFIAAVDKGNIRTMPNRSMPADPHPTPGALLMGDAFNMRHPLTGGGMTVALSDIVVLRNLLSPLSDLNDAPTLCKYLESFYTLRKPVASTINTLAGALYKVFCASPDLARKEMRQACFDYLSLGGLFSEGPVSLLSGLNPRPLSLVLHFFAVAIYGVGRLLLPFPSPKRVWIGARLISGASAIILPIIKAEGIRQMFFPATVPAYYRTPPVAQ

SEQ ID NO: 8105 - DNA, 950 bp, Glycine max
  misc_feature (1)..(950): Ceres Seq. ID no. 12608035
agtaactcaaccttcaaacattttgccttttcagctttcattgcccaaccttgtagtgtggccttgctgttttctcaatgagaaaggcttttactctgcaacgcgcacttttgcgcttctctgttgcgttgttgctggttgccagcttcacttgtgctacttctgttatggcaataactgaagtttcagggaatgaagtgaatacagatgggaagcttgtaaatgaagaactagcaaaaacaagccaacaaggatatgacaaagaagcaaaatttaaaggatttttttcaaaacctattccaaaaccaatttctgttgttaagcctattcctattccactatataagtctataccaaaatcaattcccatagtgaaacctatcccaaagtcaattcctaatgaagaagaaaaatttaaaggactttttccaaagcctattcccatagttaagcctattccgaagtcaattcccattgttaagccaatactaaaaccaattcctgttgttaaacctattcctattccagtatacaagtccataccaaaatctgttcctattgttaagcctgtgccaaagttaattccggttgttaaacccataacaaaacccattcctacttttgagccagaatcttttctaaagccgaagcctttctttgaaaaacctgttcctaaattgccactggagcccaaattcaagaaaccacgtattccacattttccggttcaaaagccaatttcaactccaactccataaaactattttgctcagaaagttattcgatccattatctaacgcctatatatctacactaaatatctcaaaattatcagttgcatctgcataatcatcctatcatatttgtgtactgtattggataacatgtggcggatgtaaatcaatattatattaaaatacaagagtcgtattgattttccatttttattt

SEQ ID NO: 8106 - protein, 226 aa, Glycine max
  peptide (1)..(226): Ceres Seq. ID no. 12608036
  misc_feature (47)..(226): Pfam Name: Pfam Description:  Extensin-like region
  misc_feature (70)..(221): NCBI GI NO: 17570087 NR Description: Predicted CDS, E
  misc_feature (72)..(226): NCBI GI NO: 17570087 NR Description: Predicted CDS, E
  misc_feature (72)..(226): NCBI GI NO: 7489265 NR Description: proline-rich protein GPP1 - potato
  misc_feature (70)..(226): NCBI GI NO: 17570087 NR Description: Predicted CDS, E
  misc_feature (71)..(226): NCBI GI NO: 17570087 NR Description: Predicted CDS, E
  misc_feature (71)..(226): NCBI GI NO: 17570087 NR Description: Predicted CDS, E
  misc_feature (72)..(226): NCBI GI NO: 7489265 NR Description: proline-rich protein GPP1 - potato
  misc_feature (72)..(226): NCBI GI NO: 100798 NR Description: proline-rich protein - wheat
  misc_feature (72)..(226): NCBI GI NO: 100798 NR Description: proline-rich protein - wheat
  misc_feature (72)..(226): NCBI GI NO: 100798 NR Description: proline-rich protein - wheat
MRKAFTLQRALLRFSVALLLVASFTCATSVMAITEVSGNEVNTDGKLVNEELAKTSQQGYDKEAKFKGFFSKPIPKPISVVKPIPIPLYKSIPKSIPIVKPIPKSIPNEEEKFKGLFPKPIPIVKPIPKSIPIVKPILKPIPVVKPIPIPVYKSIPKSVPIVKPVPKLIPVVKPITKPIPTFEPESFLKPKPFFEKPVPKLPLEPKFKKPRIPHFPVQKPISTPTP

SEQ ID NO: 8107 - protein, 196 aa, Glycine max
  peptide (1)..(196): Ceres Seq. ID no. 12608037
  misc_feature (17)..(196): Pfam Name: Pfam Description:  Extensin-like region
  misc_feature (40)..(191): NCBI GI NO: 17570087 NR Description: Predicted CDS, E
  misc_feature (42)..(196): NCBI GI NO: 17570087 NR Description: Predicted CDS, E
  misc_feature (42)..(196): NCBI GI NO: 7489265 NR Description: proline-rich protein GPP1 - potato
  misc_feature (40)..(196): NCBI GI NO: 17570087 NR Description: Predicted CDS, E
  misc_feature (41)..(196): NCBI GI NO: 17570087 NR Description: Predicted CDS, E
  misc_feature (41)..(196): NCBI GI NO: 17570087 NR Description: Predicted CDS, E
  misc_feature (42)..(196): NCBI GI NO: 7489265 NR Description: proline-rich protein GPP1 - potato
  misc_feature (42)..(196): NCBI GI NO: 100798 NR Description: proline-rich protein - wheat
  misc_feature (42)..(196): NCBI GI NO: 100798 NR Description: proline-rich protein - wheat
  misc_feature (42)..(196): NCBI GI NO: 100798 NR Description: proline-rich protein - wheat
MAITEVSGNEVNTDGKLVNEELAKTSQQGYDKEAKFKGFFSKPIPKPISVVKPIPIPLYKSIPKSIPIVKPIPKSIPNEEEKFKGLFPKPIPIVKPIPKSIPIVKPILKPIPVVKPIPIPVYKSIPKSVPIVKPVPKLIPVVKPITKPIPTFEPESFLKPKPFFEKPVPKLPLEPKFKKPRIPHFPVQKPISTPTP

SEQ ID NO: 8108 - DNA, 1401 bp, Glycine max
  misc_feature (1)..(1401): Ceres Seq. ID no. 13595727
ctttattgtgcctagaacatcctaatcgaaaaactattcttaagccgaattcgacaacaccgtacagtacttgcttcgacttactgtattgtgcgttgcattgccccttcatcacatcatcaacaacgttcactggtaaatggtgcgtaattttcttctcattgcaagattaactgcatcgttcacacaccacagaagtaccccaatccaattgggttctctgctgcaacacaaacacaatgcttcaatttttttcttcaattccttcacttcaggaatctcttctgattctgaatcagatgatgaaaaccaccacaaaggtgacacctttactgtgtcttacctcatcaactcatgggggttgtccccaaaacgggccagggaactctccaacaggatcaatttgaaaaacccagatggcccaaacgctgttattgatcttctcaacaactatgggtttgaaaaaacccatcttgcaaaacttgtggagagaaagccctcagtgcttcttgcggatgcagagaatacccttttgcctaaactcaagttcttccgttctattgggatttccaacactgacatgcctaaaatcctaattgctagccataatatgttgttcagaagcttgaacaaatgcctcattccacggtatgagatcctaaagagtgtacttcgtgacaaaggggaagttgttagagctttgaaaaatgccccatttagttttacgtatggtgacatgatgaaacgcttggttccaaacattagggttttgagggaatctggtgtgcctcaaggttccatttcttatctgttgatgcattctaggtctctagcttacagggaccattccaaatttgtggaagctgtcaacactgctaaggaatttgggtttaatcctttgagaagaacttttgtcgtgggtgttgaagttcttgccattaagagatgggaatcaaggtttgaggtttatgagaggtgtggctggaaccgcgaaatagctcttcgagcagttcgaaagtttcccagtgttgtgaagttgtcagaggaagtgtttataaaaaaaatgagttttctagtgaaggatatgggttggccatcagaagatattgctgaatatcctcaagttgtaacgtacaacttggagaagaggattatccctagattctcggtaatcaaaatgttgaaatcaaaaggtctgctcaagaataatttgcactttagtggcattatttgcataaccgaggcgaagtttttgaagaaatttgtcattagttttcagaaagatttgcctttcttgccagatttctacaacagtttggcaaatcaacagaatgtattataggctttgaaggcttttgctggtgattgccctaacttccagcttgtctctttcattggacc

SEQ ID NO: 8109 - protein, 400 aa, Glycine max
  peptide (1)..(400): Ceres Seq. ID no. 15221648
  misc_feature (99)..(373): Pfam Name: Pfam Description:  mTERF
  misc_feature (27)..(390): NCBI GI NO: 18415647 NR Description: expressed protein [Arabidopsis thaliana]
  misc_feature (47)..(392): NCBI GI NO: 15218140 NR Description: hypothetical protein [Arabidopsis thaliana]
  misc_feature (47)..(392): NCBI GI NO: 25511650 NR Description: T22I11.2 protein - Arabidopsis thaliana
  misc_feature (17)..(303): NCBI GI NO: 15220660 NR Description: expressed protein [Arabidopsis thaliana]
  misc_feature (17)..(303): NCBI GI NO: 26450011 NR Description: unknown protein [Arabidopsis thaliana]
  misc_feature (275)..(386): NCBI GI NO: 15220660 NR Description: expressed protein [Arabidopsis thaliana]
  misc_feature (275)..(386): NCBI GI NO: 26450011 NR Description: unknown protein [Arabidopsis thaliana]
  misc_feature (63)..(397): NCBI GI NO: 34394750 NR Description: unknown protein
  misc_feature (88)..(383): NCBI GI NO: 15238313 NR Description: expressed protein [Arabidopsis thaliana]
  misc_feature (88)..(383): NCBI GI NO: 21553423 NR Description: unknown [Arabidopsis thaliana]
MVRNFLLIARLTASFTHHRSTPIQLGSLLQHKHNASIFFFNSFTSGISSDSESDDENHHKGDTFTVSYLINSWGLSPKRARELSNRINLKNPDGPNAVIDLLNNYGFEKTHLAKLVERKPSVLLADAENTLLPKLKFFRSIGISNTDMPKILIASHNMLFRSLNKCLIPRYEILKSVLRDKGEVVRALKNAPFSFTYGDMMKRLVPNIRVLRESGVPQGSISYLLMHSRSLAYRDHSKFVEAVNTAKEFGFNPLRRTFVVGVEVLAIKRWESRFEVYERCGWNREIALRAVRKFPSVVKLSEEVFIKKMSFLVKDMGWPSEDIAEYPQVVTYNLEKRIIPRFSVIKMLKSKGLLKNNLHFSGIICITEAKFLKKFVISFQKDLPFLPDFYNSLANQQNVL

SEQ ID NO: 8110 - protein, 253 aa, Glycine max
  peptide (1)..(253): Ceres Seq. ID no. 15221649
  misc_feature (1)..(226): Pfam Name: Pfam Description:  mTERF
  misc_feature (1)..(243): NCBI GI NO: 18415647 NR Description: expressed protein [Arabidopsis thaliana]
  misc_feature (1)..(245): NCBI GI NO: 15218140 NR Description: hypothetical protein [Arabidopsis thaliana]
  misc_feature (1)..(245): NCBI GI NO: 25511650 NR Description: T22I11.2 protein - Arabidopsis thaliana
  misc_feature (1)..(156): NCBI GI NO: 15220660 NR Description: expressed protein [Arabidopsis thaliana]
  misc_feature (1)..(156): NCBI GI NO: 26450011 NR Description: unknown protein [Arabidopsis thaliana]
  misc_feature (128)..(239): NCBI GI NO: 15220660 NR Description: expressed protein [Arabidopsis thaliana]
  misc_feature (128)..(239): NCBI GI NO: 26450011 NR Description: unknown protein [Arabidopsis thaliana]
  misc_feature (1)..(250): NCBI GI NO: 34394750 NR Description: unknown protein
  misc_feature (1)..(236): NCBI GI NO: 15238313 NR Description: expressed protein [Arabidopsis thaliana]
  misc_feature (1)..(236): NCBI GI NO: 21553423 NR Description: unknown [Arabidopsis thaliana]
MPKILIASHNMLFRSLNKCLIPRYEILKSVLRDKGEVVRALKNAPFSFTYGDMMKRLVPNIRVLRESGVPQGSISYLLMHSRSLAYRDHSKFVEAVNTAKEFGFNPLRRTFVVGVEVLAIKRWESRFEVYERCGWNREIALRAVRKFPSVVKLSEEVFIKKMSFLVKDMGWPSEDIAEYPQVVTYNLEKRIIPRFSVIKMLKSKGLLKNNLHFSGIICITEAKFLKKFVISFQKDLPFLPDFYNSLANQQNVL

SEQ ID NO: 8111 - protein, 243 aa, Glycine max
  peptide (1)..(243): Ceres Seq. ID no. 15221650
  misc_feature (1)..(216): Pfam Name: Pfam Description:  mTERF
  misc_feature (1)..(233): NCBI GI NO: 18415647 NR Description: expressed protein [Arabidopsis thaliana]
  misc_feature (1)..(235): NCBI GI NO: 15218140 NR Description: hypothetical protein [Arabidopsis thaliana]
  misc_feature (1)..(235): NCBI GI NO: 25511650 NR Description: T22I11.2 protein - Arabidopsis thaliana
  misc_feature (1)..(146): NCBI GI NO: 15220660 NR Description: expressed protein [Arabidopsis thaliana]
  misc_feature (1)..(146): NCBI GI NO: 26450011 NR Description: unknown protein [Arabidopsis thaliana]
  misc_feature (118)..(229): NCBI GI NO: 15220660 NR Description: expressed protein [Arabidopsis thaliana]
  misc_feature (118)..(229): NCBI GI NO: 26450011 NR Description: unknown protein [Arabidopsis thaliana]
  misc_feature (1)..(240): NCBI GI NO: 34394750 NR Description: unknown protein
  misc_feature (1)..(226): NCBI GI NO: 15238313 NR Description: expressed protein [Arabidopsis thaliana]
  misc_feature (1)..(226): NCBI GI NO: 21553423 NR Description: unknown [Arabidopsis thaliana]
MLFRSLNKCLIPRYEILKSVLRDKGEVVRALKNAPFSFTYGDMMKRLVPNIRVLRESGVPQGSISYLLMHSRSLAYRDHSKFVEAVNTAKEFGFNPLRRTFVVGVEVLAIKRWESRFEVYERCGWNREIALRAVRKFPSVVKLSEEVFIKKMSFLVKDMGWPSEDIAEYPQVVTYNLEKRIIPRFSVIKMLKSKGLLKNNLHFSGIICITEAKFLKKFVISFQKDLPFLPDFYNSLANQQNVL

SEQ ID NO: 8112 - DNA, 1446 bp, Glycine max
  misc_feature (1)..(1446): Ceres Seq. ID no. 15171743
aaaaagaagaagaggagtgtgtgtgtggaagaagaagaagaaggagcatatggagttccaccgcagcgactcatcatcgtccccgtcttcatccacgcccacacccaacaacgccgatcccaataaaacctcttcttcagacccaatgcattcatggtgggaatccgtctctaaagcccgttcacgaatccacgccctcgccgccatcctcccctcctcctcctccgactccctctcctctctcgccgactccgaccgccctgctctctcactcttgtcctcccccgctgcctacgccgccgtctcctcttccctctccggctcccactccgaccccctctgccactggctctacgacaccttcctctcctccgacccccacctccgcctcgtcgtcctctccttcgtccccctcctctctggcctctacctctcccgaatccactcccctgaaccgccgtccctcgccgggttcgaagccgtcctcctcgccctctacgccgccgagaccaaatcccgaaacggcaaacccctcgtggtcacaatccccgacctctcccacccctccatctaccatgcgcccctccgcaaaccccaatcccaaaccctaaccctagcctcaacaccctcggttggactcatttcgccccctttagaaccccagctcggcgtcaaatccaccaagcgcgcctccatcgtcggcgttgcgctacactccttcttctcccagatctcccacatgcccgcctggtccaagctcgaattctgccaattcgccgcagcctgggccggctccgcccactgtccctgccgcaacgagctcgaccgcgatggcaaaatcgaggatttcgccaccgccattgagaacgttcgaattcgcgatggcgattatctggaagaagggaaaggggagaggattcccttgccgtgggagattctgcagccttcgctcagaatcctggggcactgtttattggggcctttgaactctcaggatgtgaaggatgctgcttcctttgcggtgcggtgcttgtacgcccgtgcttcccacgatttggtgccgcaggcaatactcgccactaggagtctcattcagcttgatgtgaggactagagaggctgccagggcgaatgccgccactaactcgaatgccaatacgcccaccaaggccaagaagccggagattcttctggtttccaagtgaggaatggggaggaggttgctgttgctgtgtactattactgtaggtcttcatactgtaagcacaatttgtgtttgtataatagaaacttcatagatgccaattttattttatcttttattatttttttgcttgttctgggttatagtatacatatatatatttatttattttttctaccgagtgattgggtagctgtattggctttgtttcttgatggaaatatgctgagcttcctttgtgtt

SEQ ID NO: 8113 - protein, 400 aa, Glycine max
  peptide (1)..(400): Ceres Seq. ID no. 15171744
  misc_feature (22)..(79): Pfam Name: Pfam Description:  Equine herpesvirus glycoprotein gp2
  misc_feature (20)..(289): NCBI GI NO: 15237612 NR Description: expressed protein [Arabidopsis thaliana]
  misc_feature (301)..(400): NCBI GI NO: 15237612 NR Description: expressed protein [Arabidopsis thaliana]
  misc_feature (22)..(366): NCBI GI NO: 15242145 NR Description: expressed protein [Arabidopsis thaliana]
KRRRGVCVWKKKKKEHMEFHRSDSSSSPSSSTPTPNNADPNKTSSSDPMHSWWESVSKARSRIHALAAILPSSSSDSLSSLADSDRPALSLLSSPAAYAAVSSSLSGSHSDPLCHWLYDTFLSSDPHLRLVVLSFVPLLSGLYLSRIHSPEPPSLAGFEAVLLALYAAETKSRNGKPLVVTIPDLSHPSIYHAPLRKPQSQTLTLASTPSVGLISPPLEPQLGVKSTKRASIVGVALHSFFSQISHMPAWSKLEFCQFAAAWAGSAHCPCRNELDRDGKIEDFATAIENVRIRDGDYLEEGKGERIPLPWEILQPSLRILGHCLLGPLNSQDVKDAASFAVRCLYARASHDLVPQAILATRSLIQLDVRTREAARANAATNSNANTPTKAKKPEILLVSK

SEQ ID NO: 8114 - protein, 384 aa, Glycine max
  peptide (1)..(384): Ceres Seq. ID no. 15171745
  misc_feature (6)..(63): Pfam Name: Pfam Description:  Equine herpesvirus glycoprotein gp2
  misc_feature (4)..(273): NCBI GI NO: 15237612 NR Description: expressed protein [Arabidopsis thaliana]
  misc_feature (285)..(384): NCBI GI NO: 15237612 NR Description: expressed protein [Arabidopsis thaliana]
  misc_feature (6)..(350): NCBI GI NO: 15242145 NR Description: expressed protein [Arabidopsis thaliana]
MEFHRSDSSSSPSSSTPTPNNADPNKTSSSDPMHSWWESVSKARSRIHALAAILPSSSSDSLSSLADSDRPALSLLSSPAAYAAVSSSLSGSHSDPLCHWLYDTFLSSDPHLRLVVLSFVPLLSGLYLSRIHSPEPPSLAGFEAVLLALYAAETKSRNGKPLVVTIPDLSHPSIYHAPLRKPQSQTLTLASTPSVGLISPPLEPQLGVKSTKRASIVGVALHSFFSQISHMPAWSKLEFCQFAAAWAGSAHCPCRNELDRDGKIEDFATAIENVRIRDGDYLEEGKGERIPLPWEILQPSLRILGHCLLGPLNSQDVKDAASFAVRCLYARASHDLVPQAILATRSLIQLDVRTREAARANAATNSNANTPTKAKKPEILLVSK

SEQ ID NO: 8115 - protein, 352 aa, Glycine max
  peptide (1)..(352): Ceres Seq. ID no. 15171746
  misc_feature (1)..(241): NCBI GI NO: 15237612 NR Description: expressed protein [Arabidopsis thaliana]
  misc_feature (253)..(352): NCBI GI NO: 15237612 NR Description: expressed protein [Arabidopsis thaliana]
  misc_feature (1)..(318): NCBI GI NO: 15242145 NR Description: expressed protein [Arabidopsis thaliana]
MHSWWESVSKARSRIHALAAILPSSSSDSLSSLADSDRPALSLLSSPAAYAAVSSSLSGSHSDPLCHWLYDTFLSSDPHLRLVVLSFVPLLSGLYLSRIHSPEPPSLAGFEAVLLALYAAETKSRNGKPLVVTIPDLSHPSIYHAPLRKPQSQTLTLASTPSVGLISPPLEPQLGVKSTKRASIVGVALHSFFSQISHMPAWSKLEFCQFAAAWAGSAHCPCRNELDRDGKIEDFATAIENVRIRDGDYLEEGKGERIPLPWEILQPSLRILGHCLLGPLNSQDVKDAASFAVRCLYARASHDLVPQAILATRSLIQLDVRTREAARANAATNSNANTPTKAKKPEILLVSK

SEQ ID NO: 8116 - DNA, 1279 bp, Glycine max
  misc_feature (1)..(1279): Ceres Seq. ID no. 15171717
actgttactgggttgggtcaactctaattacaatgagttatccttcactctcattccaattcgcaccattactctcattttctcttacagcattatccttgccaccattaccggtcttttcgaagcgttactctccatcatcatcttcacctatccccaaagccactccctctcacttattgtcactgttgggttccaaaactcagtcctcagccgtgaatcccgtggtagcacgcggcctcaaattatgcttcaaattcctcgttcctttctctccagtgcagcctcgtcaccggaaattgggtttgggcctgcccaaactcactgtcccaagtcagagagaggagaacgagcttatttggtggccgccagagcccgttttggagctggcgcgtctcgccgtcgattctggcggcgaccccgccgctattcatcgccttcttgacccaaccattatcccgcataggtacctgattgtgaaggatcaaaggaagagcgctgtgagctcaccagaactcgctatggcagacgcttcgtttgaactgaacctgtatctgcagtttttgtttgaactcattgttgatcgaggtccatctgttgggttggatgttgccttgaaccggtttgatctgttccatggtcacctttttctagcgctagactctggaagacttggtatcttattccatgcgaaggaatacccagcatatgataagcaagtgttcccgtacaatatgggtttttgtcagagagggtccaatgtgacatatgatgattcaatgaatctgagaaatattctctggctggctccaatgcttggcgattctggtgaattttgggtggcaccaggtgttcttgtagtgctggatgcttgtcccgatggaatcatatacagagatctaatacccgattatgtaaattttgcaaggactatatatgaagatgatcttggggatgttgctgttgatgtgaactacttgaatgttggatctgaaaccagaaattatcaaatattcatatgctgatgttgggttcgagatatggcgcatgttcacttcccagtgatacaccagcttatataaatgaagattgccgaagcttaaacgaataatgtatatgccaacttcatttgtagtgaagattgcatagcatatttcttccaatatgataggttacttgatagctatgtcaggtactgtatatgcttgtgcaattattggctaacatgacaggtgccgcggatgttgacgtgggttcatgcacttgattgattttgcgt

SEQ ID NO: 8117 - protein, 340 aa, Glycine max
  peptide (1)..(340): Ceres Seq. ID no. 15171718
  misc_feature (12)..(340): NCBI GI NO: 40823291 NR Description: At5g27710 [Arabidopsis thaliana]
  misc_feature (12)..(227): NCBI GI NO: 15241027 NR Description: expressed protein [Arabidopsis thaliana]
  misc_feature (228)..(340): NCBI GI NO: 15241027 NR Description: expressed protein [Arabidopsis thaliana]
  misc_feature (57)..(340): NCBI GI NO: 33146851 NR Description: unknown protein
CYWVGSTLITMSYPSLSFQFAPLLSFSLTALSLPPLPVFSKRYSPSSSSPIPKATPSHLLSLLGSKTQSSAVNPVVARGLKLCFKFLVPFSPVQPRHRKLGLGLPKLTVPSQREENELIWWPPEPVLELARLAVDSGGDPAAIHRLLDPTIIPHRYLIVKDQRKSAVSSPELAMADASFELNLYLQFLFELIVDRGPSVGLDVALNRFDLFHGHLFLALDSGRLGILFHAKEYPAYDKQVFPYNMGFCQRGSNVTYDDSMNLRNILWLAPMLGDSGEFWVAPGVLVVLDACPDGIIYRDLIPDYVNFARTIYEDDLGDVAVDVNYLNVGSETRNYQIFIC

SEQ ID NO: 8118 - protein, 330 aa, Glycine max
  peptide (1)..(330): Ceres Seq. ID no. 15171719
  misc_feature (2)..(330): NCBI GI NO: 40823291 NR Description: At5g27710 [Arabidopsis thaliana]
  misc_feature (2)..(217): NCBI GI NO: 15241027 NR Description: expressed protein [Arabidopsis thaliana]
  misc_feature (218)..(330): NCBI GI NO: 15241027 NR Description: expressed protein [Arabidopsis thaliana]
  misc_feature (47)..(330): NCBI GI NO: 33146851 NR Description: unknown protein
MSYPSLSFQFAPLLSFSLTALSLPPLPVFSKRYSPSSSSPIPKATPSHLLSLLGSKTQSSAVNPVVARGLKLCFKFLVPFSPVQPRHRKLGLGLPKLTVPSQREENELIWWPPEPVLELARLAVDSGGDPAAIHRLLDPTIIPHRYLIVKDQRKSAVSSPELAMADASFELNLYLQFLFELIVDRGPSVGLDVALNRFDLFHGHLFLALDSGRLGILFHAKEYPAYDKQVFPYNMGFCQRGSNVTYDDSMNLRNILWLAPMLGDSGEFWVAPGVLVVLDACPDGIIYRDLIPDYVNFARTIYEDDLGDVAVDVNYLNVGSETRNYQIFIC

SEQ ID NO: 8119 - DNA, 1443 bp, Glycine max
  misc_feature (1)..(1443): Ceres Seq. ID no. 14316532
ttttttttctgcaaacaaatcaaccctcaaatttccttttgcttcctagaaagatttagttcccggaagcttctctctttgcacttgcatgatttgatctccgccgtggattcgtgatggtgattttatgaacttcctcctctgccccctctttccttttctgattatcattatttttatatttaactagagagagagactcatccttccttcgagacatgagatgaggccgatgcaactgccaccgccttccgcttccggggccaaccctgcccctgccaccaccaacaacaacaacaaggagcagcgtccccagcgccgccgcaaggacctcacgctgccgctgccgcagcgagacaccaacttggcggtgccacttcctctgccgccatcgacggcgcctgctgcggcggcgagcggcggagcgagccagcaggcggcgcagcaggtgatccctttctcggagctggagagactgaaccgcatcgggagcgggagcggcgggacggtgtacaaggtggtccaccgcacgagcgggcgcgtgtacgcgctgaaggtgatatacggtcaccacgaggagtcggtgcggcggcagatccaccgggaaatccagatcctccgtgacgtggacgatgcgaacgtggtgaagtgtcacgagatgtacgatcagaacagcgaaatccaggtgctgctggagttcatggacggaggttctctggaggggaaacacatcacgcaggagcagcagctggcagatctgtctcggcagattcttagggggctggcgtacctgcaccggcggcacatcgtccacagggacatcaagccgtcgaatctgcttataaactcgcggaagcaggtgaagatcgctgacttcggggtgggtcggatactgaatcagacgatggatccgtgcaattcgtcggtggggacgatcgcctacatgagtccggagaggatcaatacggacataaacgacgggcaatacgacgcgtacgcaggggacatatggagctttggggttagcatactggagttctacatgggaaggttccccttcgcggttgggaggcagggcgattgggccagtctcatgtgcgccatttgtatgtctcagcctcccgaggctcctccttctgcttcccctcacttcaaggacttcatcttgcgctgtcttcagcgcgatccctctcgccgctggtctgcttccaggttgctcgaacaccccttcattgctccgccgctgcccaaccacaatcagactcctccaaacctccatcagctactccctcctccgccaaggcctcttccctcctagtatgatggatccttctacatgcctattgcctattgcctagctagctagccctgtgtgccgctttattttcattttcattttcattttcatacagaatcaaatcttaatattggattttcagccgt

SEQ ID NO: 8120 - protein, 364 aa, Glycine max
  peptide (1)..(364): Ceres Seq. ID no. 14316533
  misc_feature (82)..(337): Pfam Name: Pfam Description:  Protein kinase domain
  misc_feature (1)..(364): NCBI GI NO: 15528439 NR Description: MEK map kinase kinsae
  misc_feature (1)..(359): NCBI GI NO: 33563103 NR Description: mitogen-activated protein kinase kinase
  misc_feature (1)..(364): NCBI GI NO: 15217998 NR Description: mitogen-activated protein kinase kinase
  misc_feature (1)..(359): NCBI GI NO: 12484128 NR Description: mitogen-activated protein kinase 2
  misc_feature (32)..(364): NCBI GI NO: 15232491 NR Description: mitogen-activated protein kinase kinase
  misc_feature (32)..(364): NCBI GI NO: 19698851 NR Description: MAP kinase kinase 5 [Arabidopsis thaliana]
  misc_feature (32)..(364): NCBI GI NO: 25287595 NR Description: mitogen-activated protein kinase kinase (EC 2
  misc_feature (1)..(349): NCBI GI NO: 14719279 NR Description: MAP kinase kinase [Zea mays]
  misc_feature (37)..(341): NCBI GI NO: 15219482 NR Description: mitogen-activated protein kinase kinase
  misc_feature (37)..(341): NCBI GI NO: 15221060 NR Description: mitogen-activated protein kinase kinase
MRPMQLPPPSASGANPAPATTNNNNKEQRPQRRRKDLTLPLPQRDTNLAVPLPLPPSTAPAAAASGGASQQAAQQVIPFSELERLNRIGSGSGGTVYKVVHRTSGRVYALKVIYGHHEESVRRQIHREIQILRDVDDANVVKCHEMYDQNSEIQVLLEFMDGGSLEGKHITQEQQLADLSRQILRGLAYLHRRHIVHRDIKPSNLLINSRKQVKIADFGVGRILNQTMDPCNSSVGTIAYMSPERINTDINDGQYDAYAGDIWSFGVSILEFYMGRFPFAVGRQGDWASLMCAICMSQPPEAPPSASPHFKDFILRCLQRDPSRRWSASRLLEHPFIAPPLPNHNQTPPNLHQLLPPPPRPLPS

SEQ ID NO: 8121 - protein, 361 aa, Glycine max
  peptide (1)..(361): Ceres Seq. ID no. 14316534
  misc_feature (79)..(334): Pfam Name: Pfam Description:  Protein kinase domain
  misc_feature (1)..(361): NCBI GI NO: 15528439 NR Description: MEK map kinase kinsae
  misc_feature (1)..(356): NCBI GI NO: 33563103 NR Description: mitogen-activated protein kinase kinase
  misc_feature (1)..(361): NCBI GI NO: 15217998 NR Description: mitogen-activated protein kinase kinase
  misc_feature (1)..(356): NCBI GI NO: 12484128 NR Description: mitogen-activated protein kinase 2
  misc_feature (29)..(361): NCBI GI NO: 15232491 NR Description: mitogen-activated protein kinase kinase
  misc_feature (29)..(361): NCBI GI NO: 19698851 NR Description: MAP kinase kinase 5 [Arabidopsis thaliana]
  misc_feature (29)..(361): NCBI GI NO: 25287595 NR Description: mitogen-activated protein kinase kinase (EC 2
  misc_feature (1)..(346): NCBI GI NO: 14719279 NR Description: MAP kinase kinase [Zea mays]
  misc_feature (34)..(338): NCBI GI NO: 15219482 NR Description: mitogen-activated protein kinase kinase
  misc_feature (34)..(338): NCBI GI NO: 15221060 NR Description: mitogen-activated protein kinase kinase
MQLPPPSASGANPAPATTNNNNKEQRPQRRRKDLTLPLPQRDTNLAVPLPLPPSTAPAAAASGGASQQAAQQVIPFSELERLNRIGSGSGGTVYKVVHRTSGRVYALKVIYGHHEESVRRQIHREIQILRDVDDANVVKCHEMYDQNSEIQVLLEFMDGGSLEGKHITQEQQLADLSRQILRGLAYLHRRHIVHRDIKPSNLLINSRKQVKIADFGVGRILNQTMDPCNSSVGTIAYMSPERINTDINDGQYDAYAGDIWSFGVSILEFYMGRFPFAVGRQGDWASLMCAICMSQPPEAPPSASPHFKDFILRCLQRDPSRRWSASRLLEHPFIAPPLPNHNQTPPNLHQLLPPPPRPLPS

SEQ ID NO: 8122 - protein, 219 aa, Glycine max
  peptide (1)..(219): Ceres Seq. ID no. 14316535
  misc_feature (1)..(192): Pfam Name: Pfam Description:  Protein kinase domain
  misc_feature (1)..(219): NCBI GI NO: 15528439 NR Description: MEK map kinase kinsae
  misc_feature (1)..(214): NCBI GI NO: 33563103 NR Description: mitogen-activated protein kinase kinase
  misc_feature (1)..(219): NCBI GI NO: 15217998 NR Description: mitogen-activated protein kinase kinase
  misc_feature (1)..(214): NCBI GI NO: 12484128 NR Description: mitogen-activated protein kinase 2
  misc_feature (1)..(219): NCBI GI NO: 15232491 NR Description: mitogen-activated protein kinase kinase
  misc_feature (1)..(219): NCBI GI NO: 19698851 NR Description: MAP kinase kinase 5 [Arabidopsis thaliana]
  misc_feature (1)..(219): NCBI GI NO: 25287595 NR Description: mitogen-activated protein kinase kinase (EC 2
  misc_feature (1)..(204): NCBI GI NO: 14719279 NR Description: MAP kinase kinase [Zea mays]
  misc_feature (1)..(196): NCBI GI NO: 15219482 NR Description: mitogen-activated protein kinase kinase
  misc_feature (1)..(196): NCBI GI NO: 15221060 NR Description: mitogen-activated protein kinase kinase
MYDQNSEIQVLLEFMDGGSLEGKHITQEQQLADLSRQILRGLAYLHRRHIVHRDIKPSNLLINSRKQVKIADFGVGRILNQTMDPCNSSVGTIAYMSPERINTDINDGQYDAYAGDIWSFGVSILEFYMGRFPFAVGRQGDWASLMCAICMSQPPEAPPSASPHFKDFILRCLQRDPSRRWSASRLLEHPFIAPPLPNHNQTPPNLHQLLPPPPRPLPS

SEQ ID NO: 8123 - DNA, 1436 bp, Glycine max
  misc_feature (1)..(1436): Ceres Seq. ID no. 15168352
caccttccctcccctgttcaaaataccattaccatatcaaaaaccttaaccccattaattcataccctccccaccttcccccccgacacataacagctttcgaaccaaacctgttccttcttccttaatggccacaaacatcctccaagcaaaatggaaccaccactccgaagaagacgaagatcacaaagacaatgagcaacaagaagaagaagaagaagataatgaagcattgtcactctgcgatcttccgatcaacctcgaggacccaccgggaaaccaagaacactctcgccccaacgaaacatcgcaagaagaattcaatttccggttatggcgtgctccctttaacaaagagcccgaaatgtgtgcagcggatgaagtcttcttcaagggccaaatcctcccgttgcgcgtctcgttcagctccgaggccgggttgttagccacggtgtcccaatctcaacaacattacggtaagcaattcgttaggtcagaatcgttggatcgcaattctagcgattatcgtagtagtagtaatagtagtagaagtagtagtctcagaagtcaaaactcttccactagcactagcactagctccacaaccacaaacacaacaattcccaaaagtaagcacaaaattcgaaaccaatttcacacgcacccaagtcccaaaccgcaattaagagcatcagctccaacacacaaccaaggtagaaaatccacgtcagcatggggaattttccgtttaggtgttgtccctgctcccgagatagggttacaagatctcaaggttcgaaaccgaaactgcgtcgtcgtcagtcgtaatagtagtaatagtaacagtaacaacaacaacaacagttcgaaaagtgtcaaaacaagtaacaggaacaacaagaagggcagcagcaattacaataatgttttgaaacagttagtgggcaaaggcggtggtctattgagtggttgtgattgttcctttgaaacagtgcaacccaacaacattgtcatgataaaaggtggtaatggtaatagtggtggtggtaccgctaaaagcacgaacatgacagaaagtacaacgcacgccgcgaaagaaaaagtggtcgagtttaagaagcacaagcagcaaaagcagggaaagaaggttacgtcacgtcgccgaacgtttgaatggataaaggagcttcatgcaagccaacctgatgatgaagaggctttgttatcaaacgcatcatgagtggttccgtcgcatgcttaattggagtttactttaagattcttagattagatttagattagattgggtttagattgcctttcatttgaatattaaattttataatattgtagtgcaggtgctgtaacaaaaagttcttgctttctcgcgaggacgaggctgtaatttatttatttttattattttcattttctcc

SEQ ID NO: 8124 - protein, 370 aa, Glycine max
  peptide (1)..(370): Ceres Seq. ID no. 15168353
  misc_feature (236)..(331): Pfam Name: I, L, M and V Pfam Description: tRNA synthetases class I
  misc_feature (79)..(291): NCBI GI NO: 34393445 NR Description: unknown protein
  misc_feature (11)..(152): NCBI GI NO: 15240713 NR Description: expressed protein [Arabidopsis thaliana]
  misc_feature (11)..(152): NCBI GI NO: 28393537 NR Description: unknown protein [Arabidopsis thaliana]
  misc_feature (77)..(358): NCBI GI NO: 40737007 NR Description: hypothetical protein
  misc_feature (98)..(247): NCBI GI NO: 28828651 NR Description: similar to Plasmodium falciparum
  misc_feature (232)..(267): NCBI GI NO: 28828651 NR Description: similar to Plasmodium falciparum
  misc_feature (232)..(266): NCBI GI NO: 28828651 NR Description: similar to Plasmodium falciparum
  misc_feature (232)..(266): NCBI GI NO: 28828651 NR Description: similar to Plasmodium falciparum
  misc_feature (232)..(266): NCBI GI NO: 28828651 NR Description: similar to Plasmodium falciparum
  misc_feature (232)..(266): NCBI GI NO: 28828651 NR Description: similar to Plasmodium falciparum
MATNILQAKWNHHSEEDEDHKDNEQQEEEEEDNEALSLCDLPINLEDPPGNQEHSRPNETSQEEFNFRLWRAPFNKEPEMCAADEVFFKGQILPLRVSFSSEAGLLATVSQSQQHYGKQFVRSESLDRNSSDYRSSSNSSRSSSLRSQNSSTSTSTSSTTTNTTIPKSKHKIRNQFHTHPSPKPQLRASAPTHNQGRKSTSAWGIFRLGVVPAPEIGLQDLKVRNRNCVVVSRNSSNSNSNNNNNSSKSVKTSNRNNKKGSSNYNNVLKQLVGKGGGLLSGCDCSFETVQPNNIVMIKGGNGNSGGGTAKSTNMTESTTHAAKEKVVEFKKHKQQKQGKKVTSRRRTFEWIKELHASQPDDEEALLSNAS

SEQ ID NO: 8125 - protein, 291 aa, Glycine max
  peptide (1)..(291): Ceres Seq. ID no. 15168354
  misc_feature (157)..(252): Pfam Name: I, L, M and V Pfam Description: tRNA synthetases class I
  misc_feature (1)..(212): NCBI GI NO: 34393445 NR Description: unknown protein
  misc_feature (1)..(73): NCBI GI NO: 15240713 NR Description: expressed protein [Arabidopsis thaliana]
  misc_feature (1)..(73): NCBI GI NO: 28393537 NR Description: unknown protein [Arabidopsis thaliana]
  misc_feature (1)..(279): NCBI GI NO: 40737007 NR Description: hypothetical protein
  misc_feature (19)..(168): NCBI GI NO: 28828651 NR Description: similar to Plasmodium falciparum
  misc_feature (153)..(188): NCBI GI NO: 28828651 NR Description: similar to Plasmodium falciparum
  misc_feature (153)..(187): NCBI GI NO: 28828651 NR Description: similar to Plasmodium falciparum
  misc_feature (153)..(187): NCBI GI NO: 28828651 NR Description: similar to Plasmodium falciparum
  misc_feature (153)..(187): NCBI GI NO: 28828651 NR Description: similar to Plasmodium falciparum
  misc_feature (153)..(187): NCBI GI NO: 28828651 NR Description: similar to Plasmodium falciparum
MCAADEVFFKGQILPLRVSFSSEAGLLATVSQSQQHYGKQFVRSESLDRNSSDYRSSSNSSRSSSLRSQNSSTSTSTSSTTTNTTIPKSKHKIRNQFHTHPSPKPQLRASAPTHNQGRKSTSAWGIFRLGVVPAPEIGLQDLKVRNRNCVVVSRNSSNSNSNNNNNSSKSVKTSNRNNKKGSSNYNNVLKQLVGKGGGLLSGCDCSFETVQPNNIVMIKGGNGNSGGGTAKSTNMTESTTHAAKEKVVEFKKHKQQKQGKKVTSRRRTFEWIKELHASQPDDEEALLSNAS

SEQ ID NO: 8126 - DNA, 1292 bp, Glycine max
  misc_feature (1)..(1292): Ceres Seq. ID no. 15168537
acttcccattttattcttcatttcactgacaccacactttatttacatcttcgtatttccctttcctcgaaacttaattagaactcaaaatatagaaaaataagacaacatattaattcgtcgtgttcctcatcatgttcctatttgaggatctctggtccctcccgcgcctcttctcagagtcgcttaatttacagtctttacgcgaatcctttacgagctcgagctgtgacagaacggagtcggagcaatgccgcgacgagtcggcggcgatggttctgaaattcgtggcggtggcgtcgattctggtcgccggattcgggggagtctcgattccgctggtcgggaagtcgcggcggtttcttcgaccggacggcgacgttttcgcggcggcgaaggcgttcgcggcgggggtgattttagcgacggggttcgtccacatgctgagggactcgtgggacgcgcttcgggagccgtgcttggggacgcactcgcgcgcgtgggcgaagtttcccttcaccggtttcttcgccatggtgtcagcgctctttactctactggttgactttttagcgacggaatattacgagcgcagagaggcgcgtgggcgcgtggagcgagggaaggttgttgattatgatgaaggttgtgacgaggcgttgttggaaacgggaatcgtggaggttaaggatcttgggcgagggggaagacactcccactctcacgacggcgatgatgtggaaagtagtgttcgacacgtcgtcgtttcacaggtattggaacttgggattgtatcacattcgatgataattgggttatctctaggagtttcacaaagtccctgtaccatgaaacccctaattgtggcattatccttccatcaattctttgaaggatttgcacttggtggttgcatctcccaagcccaattcaagaccttatcagcaacaataatgtcatgtttttttgcactaacaacgccacttggtgttgctattggagctagtgttgcttcaatttttaacccttacagtccagtagcactcatcactgaaggcatcttggacgccttgtcagctgggattttagtgtatatggctttagtggacttaatagctgcagattttcttagcaagaaaatgcgttgtaactttaggtttcagataatatgttactgtctgcttttccttggggctggattgatgtcttcacttgcaatttgggcatgatactttcctatgttgctgtaaattatttttcaattaatgttgatatataggtttattgttttc

SEQ ID NO: 8127 - protein, 364 aa, Glycine max
  peptide (1)..(364): Ceres Seq. ID no. 15168538
  misc_feature (190)..(364): NCBI GI NO: 30682009 NR Description: metal transporter, putative (ZIP4)
  misc_feature (3)..(159): NCBI GI NO: 30682009 NR Description: metal transporter, putative (ZIP4)
  misc_feature (1)..(201): NCBI GI NO: 18406954 NR Description: metal transporter, putative (IRT3)
  misc_feature (170)..(364): NCBI GI NO: 18406954 NR Description: metal transporter, putative (IRT3)
  misc_feature (15)..(193): NCBI GI NO: 14582255 NR Description: ZIP-like zinc transporter [Thlaspi caerulescens]
  misc_feature (188)..(364): NCBI GI NO: 14582255 NR Description: ZIP-like zinc transporter [Thlaspi caerulescens]
  misc_feature (170)..(364): NCBI GI NO: 37079196 NR Description: Fe
  misc_feature (28)..(201): NCBI GI NO: 37079196 NR Description: Fe
  misc_feature (188)..(364): NCBI GI NO: 7381054 NR Description: Zn and Cd transporter ZNT1 [Thlaspi caerulescens]
  misc_feature (23)..(193): NCBI GI NO: 7381054 NR Description: Zn and Cd transporter ZNT1 [Thlaspi caerulescens]
MFLFEDLWSLPRLFSESLNLQSLRESFTSSSCDRTESEQCRDESAAMVLKFVAVASILVAGFGGVSIPLVGKSRRFLRPDGDVFAAAKAFAAGVILATGFVHMLRDSWDALREPCLGTHSRAWAKFPFTGFFAMVSALFTLLVDFLATEYYERREARGRVERGKVVDYDEGCDEALLETGIVEVKDLGRGGRHSHSHDGDDVESSVRHVVVSQVLELGIVSHSMIIGLSLGVSQSPCTMKPLIVALSFHQFFEGFALGGCISQAQFKTLSATIMSCFFALTTPLGVAIGASVASIFNPYSPVALITEGILDALSAGILVYMALVDLIAADFLSKKMRCNFRFQIICYCLLFLGAGLMSSLAIWA

SEQ ID NO: 8128 - protein, 318 aa, Glycine max
  peptide (1)..(318): Ceres Seq. ID no. 15168539
  misc_feature (144)..(318): NCBI GI NO: 30682009 NR Description: metal transporter, putative (ZIP4)
  misc_feature (1)..(113): NCBI GI NO: 30682009 NR Description: metal transporter, putative (ZIP4)
  misc_feature (1)..(155): NCBI GI NO: 18406954 NR Description: metal transporter, putative (IRT3)
  misc_feature (124)..(318): NCBI GI NO: 18406954 NR Description: metal transporter, putative (IRT3)
  misc_feature (1)..(147): NCBI GI NO: 14582255 NR Description: ZIP-like zinc transporter [Thlaspi caerulescens]
  misc_feature (142)..(318): NCBI GI NO: 14582255 NR Description: ZIP-like zinc transporter [Thlaspi caerulescens]
  misc_feature (124)..(318): NCBI GI NO: 37079196 NR Description: Fe
  misc_feature (1)..(155): NCBI GI NO: 37079196 NR Description: Fe
  misc_feature (142)..(318): NCBI GI NO: 7381054 NR Description: Zn and Cd transporter ZNT1 [Thlaspi caerulescens]
  misc_feature (1)..(147): NCBI GI NO: 7381054 NR Description: Zn and Cd transporter ZNT1 [Thlaspi caerulescens]
MVLKFVAVASILVAGFGGVSIPLVGKSRRFLRPDGDVFAAAKAFAAGVILATGFVHMLRDSWDALREPCLGTHSRAWAKFPFTGFFAMVSALFTLLVDFLATEYYERREARGRVERGKVVDYDEGCDEALLETGIVEVKDLGRGGRHSHSHDGDDVESSVRHVVVSQVLELGIVSHSMIIGLSLGVSQSPCTMKPLIVALSFHQFFEGFALGGCISQAQFKTLSATIMSCFFALTTPLGVAIGASVASIFNPYSPVALITEGILDALSAGILVYMALVDLIAADFLSKKMRCNFRFQIICYCLLFLGAGLMSSLAIWA

SEQ ID NO: 8129 - protein, 262 aa, Glycine max
  peptide (1)..(262): Ceres Seq. ID no. 15168540
  misc_feature (88)..(262): NCBI GI NO: 30682009 NR Description: metal transporter, putative (ZIP4)
  misc_feature (1)..(57): NCBI GI NO: 30682009 NR Description: metal transporter, putative (ZIP4)
  misc_feature (1)..(99): NCBI GI NO: 18406954 NR Description: metal transporter, putative (IRT3)
  misc_feature (68)..(262): NCBI GI NO: 18406954 NR Description: metal transporter, putative (IRT3)
  misc_feature (1)..(91): NCBI GI NO: 14582255 NR Description: ZIP-like zinc transporter [Thlaspi caerulescens]
  misc_feature (86)..(262): NCBI GI NO: 14582255 NR Description: ZIP-like zinc transporter [Thlaspi caerulescens]
  misc_feature (68)..(262): NCBI GI NO: 37079196 NR Description: Fe
  misc_feature (1)..(99): NCBI GI NO: 37079196 NR Description: Fe
  misc_feature (86)..(262): NCBI GI NO: 7381054 NR Description: Zn and Cd transporter ZNT1 [Thlaspi caerulescens]
  misc_feature (1)..(91): NCBI GI NO: 7381054 NR Description: Zn and Cd transporter ZNT1 [Thlaspi caerulescens]
MLRDSWDALREPCLGTHSRAWAKFPFTGFFAMVSALFTLLVDFLATEYYERREARGRVERGKVVDYDEGCDEALLETGIVEVKDLGRGGRHSHSHDGDDVESSVRHVVVSQVLELGIVSHSMIIGLSLGVSQSPCTMKPLIVALSFHQFFEGFALGGCISQAQFKTLSATIMSCFFALTTPLGVAIGASVASIFNPYSPVALITEGILDALSAGILVYMALVDLIAADFLSKKMRCNFRFQIICYCLLFLGAGLMSSLAIWA

SEQ ID NO: 8130 - DNA, 728 bp, Glycine max
  misc_feature (1)..(728): Ceres Seq. ID no. 12563124
gtgccagtcttacccctcttaataccaattttctagggtttatacaattttcgatggcttcttcagatgttgagtaccgttgctttgtcggtgggctcgcttgggccactgacgaccaagctctcgagagagccttctctcagtacggcgaaatcgttgaaacgaagattatcaacgatcgtgagactggaagatccaggggttttggatttgtgaccttcgcctcggagcagtccatgaaagacgccatcgaagggatgaacggccaaaaccttgacggccgtaacatcactgttaacgaagctcagtcccgtggtggcggtggcggcggaggcggtggaggtggtggatatggtggtggtcgcggtggtggatatggtggtggtggtcgcggtggtggagggggatacaaccgtagcggtggcggtggaggctatggcggcggcggtggatatggcggtggcggtggcggtggctatggcggtggcagagaccgtggttatggtggtggtggtgaccgtggttactctcgtggtggtgacggtggtgatggaggctggagaaactagggcttgatgtcgttgattagggtttatgattatgctcagtaattttagttgtgtttgagtttgagtatctttatggttttgtgtcaccgtggttcttgtttttgaccaatatatctggttgtttatagtcgatttaatgaaatgataatcagaaattgg

SEQ ID NO: 8131 - protein, 188 aa, Glycine max
  peptide (1)..(188): Ceres Seq. ID no. 12563125
  misc_feature (27)..(98): Pfam Name: a.k.a. RRM, RBD, or RNP domain Pfam Description: RNA recognition motif.
  misc_feature (18)..(188): NCBI GI NO: 5726567 NR Description: glycine-rich RNA-binding protein [Glycine max]
  misc_feature (18)..(188): NCBI GI NO: 18076086 NR Description: glycine-rich RNA-binding protein
  misc_feature (18)..(188): NCBI GI NO: 34851124 NR Description: putative glycine-rich RNA-binding protein
  misc_feature (18)..(188): NCBI GI NO: 2267567 NR Description: glycine-rich RNA binding protein 1
  misc_feature (21)..(188): NCBI GI NO: 20152613 NR Description: putative glycine rich protein [Rumex obtusifolius]
  misc_feature (18)..(186): NCBI GI NO: 15226605 NR Description: glycine-rich RNA binding protein AtGRP7
  misc_feature (18)..(186): NCBI GI NO: 21553354 NR Description: glycine-rich RNA binding protein 7
  misc_feature (21)..(188): NCBI GI NO: 7439982 NR Description: RNA-binding glycine-rich protein-1
  misc_feature (18)..(186): NCBI GI NO: 1346180 NR Description: Glycine-rich RNA-binding protein GRP1A
  misc_feature (21)..(188): NCBI GI NO: 7439981 NR Description: glycine-rich RNA-binding protein GRP1 - wheat
ASLTPLNTNFLGFIQFSMASSDVEYRCFVGGLAWATDDQALERAFSQYGEIVETKIINDRETGRSRGFGFVTFASEQSMKDAIEGMNGQNLDGRNITVNEAQSRGGGGGGGGGGGGYGGGRGGGYGGGGRGGGGGYNRSGGGGGYGGGGGYGGGGGGGYGGGRDRGYGGGGDRGYSRGGDGGDGGWRN

SEQ ID NO: 8132 - protein, 171 aa, Glycine max
  peptide (1)..(171): Ceres Seq. ID no. 12563126
  misc_feature (10)..(81): Pfam Name: a.k.a. RRM, RBD, or RNP domain Pfam Description: RNA recognition motif.
  misc_feature (1)..(171): NCBI GI NO: 5726567 NR Description: glycine-rich RNA-binding protein [Glycine max]
  misc_feature (1)..(171): NCBI GI NO: 18076086 NR Description: glycine-rich RNA-binding protein
  misc_feature (1)..(171): NCBI GI NO: 34851124 NR Description: putative glycine-rich RNA-binding protein
  misc_feature (1)..(171): NCBI GI NO: 2267567 NR Description: glycine-rich RNA binding protein 1
  misc_feature (4)..(171): NCBI GI NO: 20152613 NR Description: putative glycine rich protein [Rumex obtusifolius]
  misc_feature (1)..(169): NCBI GI NO: 15226605 NR Description: glycine-rich RNA binding protein AtGRP7
  misc_feature (1)..(169): NCBI GI NO: 21553354 NR Description: glycine-rich RNA binding protein 7
  misc_feature (4)..(171): NCBI GI NO: 7439982 NR Description: RNA-binding glycine-rich protein-1
  misc_feature (1)..(169): NCBI GI NO: 1346180 NR Description: Glycine-rich RNA-binding protein GRP1A
  misc_feature (4)..(171): NCBI GI NO: 7439981 NR Description: glycine-rich RNA-binding protein GRP1 - wheat
MASSDVEYRCFVGGLAWATDDQALERAFSQYGEIVETKIINDRETGRSRGFGFVTFASEQSMKDAIEGMNGQNLDGRNITVNEAQSRGGGGGGGGGGGGYGGGRGGGYGGGGRGGGGGYNRSGGGGGYGGGGGYGGGGGGGYGGGRDRGYGGGGDRGYSRGGDGGDGGWRN

SEQ ID NO: 8133 - protein, 110 aa, Glycine max
  peptide (1)..(110): Ceres Seq. ID no. 12563127
  misc_feature (23)..(106): Pfam Name: LMP1 Pfam Description: Herpesvirus latent membrane protein 1
  misc_feature (1)..(110): NCBI GI NO: 5726567 NR Description: glycine-rich RNA-binding protein [Glycine max]
  misc_feature (1)..(110): NCBI GI NO: 18076086 NR Description: glycine-rich RNA-binding protein
  misc_feature (1)..(110): NCBI GI NO: 34851124 NR Description: putative glycine-rich RNA-binding protein
  misc_feature (1)..(110): NCBI GI NO: 2267567 NR Description: glycine-rich RNA binding protein 1
  misc_feature (1)..(110): NCBI GI NO: 20152613 NR Description: putative glycine rich protein [Rumex obtusifolius]
  misc_feature (1)..(108): NCBI GI NO: 15226605 NR Description: glycine-rich RNA binding protein AtGRP7
  misc_feature (1)..(108): NCBI GI NO: 21553354 NR Description: glycine-rich RNA binding protein 7
  misc_feature (1)..(110): NCBI GI NO: 7439982 NR Description: RNA-binding glycine-rich protein-1
  misc_feature (1)..(108): NCBI GI NO: 1346180 NR Description: Glycine-rich RNA-binding protein GRP1A
  misc_feature (1)..(110): NCBI GI NO: 7439981 NR Description: glycine-rich RNA-binding protein GRP1 - wheat
MKDAIEGMNGQNLDGRNITVNEAQSRGGGGGGGGGGGGYGGGRGGGYGGGGRGGGGGYNRSGGGGGYGGGGGYGGGGGGGYGGGRDRGYGGGGDRGYSRGGDGGDGGWRN

SEQ ID NO: 8134 - DNA, 1192 bp, Glycine max
  misc_feature (1)..(1192): Ceres Seq. ID no. 14312262
ttctttccttcattccaaaccacacccaccacttcttccgatcagatgtccgacgatcactggatcaaggtcgccatggctgacgattctctcgtcgtcgaccttctcctccgcctccaccgccctccaccgccgccaccgccctgtctaaacctccactggacggtgcgtcagcggcgctccagatctgctcacaacaaagcggagtccaccagggccagccccaccacgccgctttcctggagcggcgccacgtcagcaagcggcggcaacctcgatggctatgaggagtacagccgcccaagcaaaccaacccaaacctcaagatctaaggttgctaatcccagcgaaacaaccactaccagaaagaccaggagaaaaaagaccttagctgaactaaaagcggaggaggatttgttgctgaaagaaagaagaaatttgaaaaaagaactggcattcttgcgtctcactgttgagaaacatagagccacaaatgaaagcataaagagaaagaagcttgattttgagtcacggcagaattctagtgctgctgctacggcctctgaggtgtctgggaaagctgtgaatggctcatttcaatttgtaaaagcagagtgtcatccatctaattcagtctcacatgacgattcacctgtttgtgcagcaaatgtttctcccaaagcacaagataatattggtaaccaagaatctacattcgtgctccctgatctaaatttgcctgtcgatgaggatatcagcgccaatatcatgcattatattgaactaagctaataaaggataggatctcgaatgacattccgcatactgataagttagacgaacatcatcttgcaagtatgcctaatagtcgtaatagtataaggtatagcatgtcagtcctaacaaattagattttgctactgtaattgtagatgttaaaccattcactttttccacttggtcaaaactgatgtggaaattgtttttttcttcttttttttttcattcatgaaactgagggtagtgtagaaatcctaacacatcaggcttagttccattctttttttcttcacaggtttctacattatccaaaattctttgtggcaaccctcgaccgtcctttattatagatatattttctgataaatgtaattaggtgttctatagataattcaagaattttggttctttt

SEQ ID NO: 8135 - protein, 263 aa, Glycine max
  peptide (1)..(263): Ceres Seq. ID no. 14312263
  misc_feature (16)..(177): NCBI GI NO: 22330774 NR Description: expressed protein [Arabidopsis thaliana]
  misc_feature (16)..(112): NCBI GI NO: 25402801 NR Description: protein F7H2.14 [imported] - Arabidopsis thaliana
  misc_feature (112)..(184): NCBI GI NO: 25402801 NR Description: protein F7H2.14 [imported] - Arabidopsis thaliana
  misc_feature (16)..(112): NCBI GI NO: 25406677 NR Description: hypothetical protein T21F11.6
  misc_feature (63)..(177): NCBI GI NO: 15236647 NR Description: expressed protein [Arabidopsis thaliana]
  misc_feature (16)..(154): NCBI GI NO: 18420894 NR Description: expressed protein [Arabidopsis thaliana]
  misc_feature (26)..(154): NCBI GI NO: 21537397 NR Description: unknown [Arabidopsis thaliana]
  misc_feature (112)..(184): NCBI GI NO: 15218326 NR Description: expressed protein [Arabidopsis thaliana]
FFPSFQTTPTTSSDQMSDDHWIKVAMADDSLVVDLLLRLHRPPPPPPPCLNLHWTVRQRRSRSAHNKAESTRASPTTPLSWSGATSASGGNLDGYEEYSRPSKPTQTSRSKVANPSETTTTRKTRRKKTLAELKAEEDLLLKERRNLKKELAFLRLTVEKHRATNESIKRKKLDFESRQNSSAAATASEVSGKAVNGSFQFVKAECHPSNSVSHDDSPVCAANVSPKAQDNIGNQESTFVLPDLNLPVDEDISANIMHYIELS

SEQ ID NO: 8136 - protein, 248 aa, Glycine max
  peptide (1)..(248): Ceres Seq. ID no. 14312264
  misc_feature (1)..(162): NCBI GI NO: 22330774 NR Description: expressed protein [Arabidopsis thaliana]
  misc_feature (1)..(97): NCBI GI NO: 25402801 NR Description: protein F7H2.14 [imported] - Arabidopsis thaliana
  misc_feature (97)..(169): NCBI GI NO: 25402801 NR Description: protein F7H2.14 [imported] - Arabidopsis thaliana
  misc_feature (1)..(97): NCBI GI NO: 25406677 NR Description: hypothetical protein T21F11.6
  misc_feature (48)..(162): NCBI GI NO: 15236647 NR Description: expressed protein [Arabidopsis thaliana]
  misc_feature (1)..(139): NCBI GI NO: 18420894 NR Description: expressed protein [Arabidopsis thaliana]
  misc_feature (11)..(139): NCBI GI NO: 21537397 NR Description: unknown [Arabidopsis thaliana]
  misc_feature (97)..(169): NCBI GI NO: 15218326 NR Description: expressed protein [Arabidopsis thaliana]
MSDDHWIKVAMADDSLVVDLLLRLHRPPPPPPPCLNLHWTVRQRRSRSAHNKAESTRASPTTPLSWSGATSASGGNLDGYEEYSRPSKPTQTSRSKVANPSETTTTRKTRRKKTLAELKAEEDLLLKERRNLKKELAFLRLTVEKHRATNESIKRKKLDFESRQNSSAAATASEVSGKAVNGSFQFVKAECHPSNSVSHDDSPVCAANVSPKAQDNIGNQESTFVLPDLNLPVDEDISANIMHYIELS

SEQ ID NO: 8137 - protein, 238 aa, Glycine max
  peptide (1)..(238): Ceres Seq. ID no. 14312265
  misc_feature (1)..(152): NCBI GI NO: 22330774 NR Description: expressed protein [Arabidopsis thaliana]
  misc_feature (1)..(87): NCBI GI NO: 25402801 NR Description: protein F7H2.14 [imported] - Arabidopsis thaliana
  misc_feature (87)..(159): NCBI GI NO: 25402801 NR Description: protein F7H2.14 [imported] - Arabidopsis thaliana
  misc_feature (1)..(87): NCBI GI NO: 25406677 NR Description: hypothetical protein T21F11.6
  misc_feature (38)..(152): NCBI GI NO: 15236647 NR Description: expressed protein [Arabidopsis thaliana]
  misc_feature (1)..(129): NCBI GI NO: 18420894 NR Description: expressed protein [Arabidopsis thaliana]
  misc_feature (1)..(129): NCBI GI NO: 21537397 NR Description: unknown [Arabidopsis thaliana]
  misc_feature (87)..(159): NCBI GI NO: 15218326 NR Description: expressed protein [Arabidopsis thaliana]
MADDSLVVDLLLRLHRPPPPPPPCLNLHWTVRQRRSRSAHNKAESTRASPTTPLSWSGATSASGGNLDGYEEYSRPSKPTQTSRSKVANPSETTTTRKTRRKKTLAELKAEEDLLLKERRNLKKELAFLRLTVEKHRATNESIKRKKLDFESRQNSSAAATASEVSGKAVNGSFQFVKAECHPSNSVSHDDSPVCAANVSPKAQDNIGNQESTFVLPDLNLPVDEDISANIMHYIELS

SEQ ID NO: 8138 - DNA, 1484 bp, Glycine max
  misc_feature (1)..(1484): Ceres Seq. ID no. 14315399
ataatatagttcaggcattatggagagagttgtatactccagggaaacaacctgagaaagtgtgcacctcggtcaaaaaacctgccggcactcgtatctgtgacaccgtgttcaattcggatccaaaaatctgatttatcgggtctcttcccaactcccccacctccaaccaacttccaccagtagtaaacagaaatacaagcataagcaaaagaagacccgcgacacatcgcaacatcgtatcatgtctgcaacaaacgtccccaaagtgctgttacaactacaaccaccctccaaatcgaacccactctgcgtgccggtgataggactcggcaccgccgcggtccacaacgacggtgacacggtgaaggctgcagtcatagaggctatcaaactcggttacagacacttcgacaccgcggcacagtacggatcggagcaggctcttggagaagccattgccgaagcacttcgggttggtctcatagcctcaagagacgagcttttcatcacttccaagttatggtgttgtgataatcatccccatcttgttcttcctgctctacaaaattcgcttcggtctcttaaattagattatttggacctatatttaattcattggccaattactgcaaagcctggaatgtgggagatgccttattctgaagagagccttgttccatttgacttaaagagtgtgtgggcagcaatggaagaatgtcacaaacttggccttaccaaatcaattggagttagcaacttctcttgcaagaaacttgaaaatcttctctcttttgctacaattcctccttctgtcaatcaagtggagatgaatattgcctggcagcaaaagaatcttagagcatactgcaaggcaaagggtataattgtgactgcctactctcctttgggagccaaagggagcaaatgggatatcaatcaaattttggacaatgaattgaccaagcagattgcacaggctcatggcaaaactgcagctcaggtatgtcttagatggttatttgagcaaggtgtgactttcataccaaagagctacaataaagagagattaaaggaaaatttagagatatttgattggtcactcaccaaagatgaccatgaaaagattaatcaagtcaaacaggagcgtatgttcaagtacggaacagcagcattcccgcttcctgatctatttgatggggaaacttagtaatacattatcagcttcaatattccattttccttgggatttaggtttctcgtgtctgtgacacaataaaaggatgaagtgtaatctgtctttagaatacccttaaagaaactcaaaattgaaatcactggtttcactttttgtgggaagtttgtttacagcaatgttatgcttttcttccatgtaattttatgtgctacactgttttatctgttgaaatgtaattgtaattcaagctacaggcatccaataaaaactagactgtttatagttt

SEQ ID NO: 8139 - protein, 321 aa, Glycine max
  peptide (1)..(321): Ceres Seq. ID no. 14315400
  misc_feature (1)..(318): NCBI GI NO: 629624 NR Description: chalcone reductase (EC 1.-.-.-) - alfalfa
  misc_feature (1)..(318): NCBI GI NO: 629622 NR Description: chalcone reductase (EC 1.-.-.-) - alfalfa
  misc_feature (1)..(318): NCBI GI NO: 537298 NR Description: chalcone reductase
  misc_feature (1)..(318): NCBI GI NO: 629623 NR Description: chalcone reductase (EC 1.-.-.-) - alfalfa
  misc_feature (1)..(318): NCBI GI NO: 537296 NR Description: chalcone reductase
  misc_feature (2)..(320): NCBI GI NO: 112837 NR Description: NAD(P)H dependent 6'-deoxychalcone synthase
  misc_feature (1)..(320): NCBI GI NO: 20147510 NR Description: chalcone reductase [Pueraria montana var. lobata]
  misc_feature (2)..(320): NCBI GI NO: 1215788 NR Description: polyketide reductase [Glycyrrhiza echinata]
  misc_feature (2)..(320): NCBI GI NO: 1514979 NR Description: polyketide reductase (GGPKR1) [Glycyrrhiza glabra]
  misc_feature (2)..(320): NCBI GI NO: 1514981 NR Description: polyketide reductase (GGPKR2) [Glycyrrhiza glabra]
MSATNVPKVLLQLQPPSKSNPLCVPVIGLGTAAVHNDGDTVKAAVIEAIKLGYRHFDTAAQYGSEQALGEAIAEALRVGLIASRDELFITSKLWCCDNHPHLVLPALQNSLRSLKLDYLDLYLIHWPITAKPGMWEMPYSEESLVPFDLKSVWAAMEECHKLGLTKSIGVSNFSCKKLENLLSFATIPPSVNQVEMNIAWQQKNLRAYCKAKGIIVTAYSPLGAKGSKWDINQILDNELTKQIAQAHGKTAAQVCLRWLFEQGVTFIPKSYNKERLKENLEIFDWSLTKDDHEKINQVKQERMFKYGTAAFPLPDLFDGET

SEQ ID NO: 8140 - protein, 188 aa, Glycine max
  peptide (1)..(188): Ceres Seq. ID no. 14315401
  misc_feature (1)..(185): NCBI GI NO: 629624 NR Description: chalcone reductase (EC 1.-.-.-) - alfalfa
  misc_feature (1)..(185): NCBI GI NO: 629622 NR Description: chalcone reductase (EC 1.-.-.-) - alfalfa
  misc_feature (1)..(185): NCBI GI NO: 537298 NR Description: chalcone reductase
  misc_feature (1)..(185): NCBI GI NO: 629623 NR Description: chalcone reductase (EC 1.-.-.-) - alfalfa
  misc_feature (1)..(185): NCBI GI NO: 537296 NR Description: chalcone reductase
  misc_feature (1)..(187): NCBI GI NO: 112837 NR Description: NAD(P)H dependent 6'-deoxychalcone synthase
  misc_feature (1)..(187): NCBI GI NO: 20147510 NR Description: chalcone reductase [Pueraria montana var. lobata]
  misc_feature (1)..(187): NCBI GI NO: 1215788 NR Description: polyketide reductase [Glycyrrhiza echinata]
  misc_feature (1)..(187): NCBI GI NO: 1514979 NR Description: polyketide reductase (GGPKR1) [Glycyrrhiza glabra]
  misc_feature (1)..(187): NCBI GI NO: 1514981 NR Description: polyketide reductase (GGPKR2) [Glycyrrhiza glabra]
MWEMPYSEESLVPFDLKSVWAAMEECHKLGLTKSIGVSNFSCKKLENLLSFATIPPSVNQVEMNIAWQQKNLRAYCKAKGIIVTAYSPLGAKGSKWDINQILDNELTKQIAQAHGKTAAQVCLRWLFEQGVTFIPKSYNKERLKENLEIFDWSLTKDDHEKINQVKQERMFKYGTAAFPLPDLFDGET

SEQ ID NO: 8141 - protein, 185 aa, Glycine max
  peptide (1)..(185): Ceres Seq. ID no. 14315402
  misc_feature (1)..(182): NCBI GI NO: 629624 NR Description: chalcone reductase (EC 1.-.-.-) - alfalfa
  misc_feature (1)..(182): NCBI GI NO: 629622 NR Description: chalcone reductase (EC 1.-.-.-) - alfalfa
  misc_feature (1)..(182): NCBI GI NO: 537298 NR Description: chalcone reductase
  misc_feature (1)..(182): NCBI GI NO: 629623 NR Description: chalcone reductase (EC 1.-.-.-) - alfalfa
  misc_feature (1)..(182): NCBI GI NO: 537296 NR Description: chalcone reductase
  misc_feature (1)..(184): NCBI GI NO: 112837 NR Description: NAD(P)H dependent 6'-deoxychalcone synthase
  misc_feature (1)..(184): NCBI GI NO: 20147510 NR Description: chalcone reductase [Pueraria montana var. lobata]
  misc_feature (1)..(184): NCBI GI NO: 1215788 NR Description: polyketide reductase [Glycyrrhiza echinata]
  misc_feature (1)..(184): NCBI GI NO: 1514979 NR Description: polyketide reductase (GGPKR1) [Glycyrrhiza glabra]
  misc_feature (1)..(184): NCBI GI NO: 1514981 NR Description: polyketide reductase (GGPKR2) [Glycyrrhiza glabra]
MPYSEESLVPFDLKSVWAAMEECHKLGLTKSIGVSNFSCKKLENLLSFATIPPSVNQVEMNIAWQQKNLRAYCKAKGIIVTAYSPLGAKGSKWDINQILDNELTKQIAQAHGKTAAQVCLRWLFEQGVTFIPKSYNKERLKENLEIFDWSLTKDDHEKINQVKQERMFKYGTAAFPLPDLFDGET

SEQ ID NO: 8142 - DNA, 1445 bp, Glycine max
  misc_feature (1)..(1445): Ceres Seq. ID no. 15168443
ttagtttgggtggaaatatcatttcccttttctattagaatttttcacttccaccgcattctctgaagaaacctcttgcactgtggacgcagcctccgccgcggggcattaccgccattgaagctgattcatgcttttttcaccgttcctcacaagaccaggtttgaagctattgccattggaaattaggacttcttttttgttactgaaaaattagagtagacaaaaaatgctcagacggaggctatctgttctctcaacatcaatcaccagaagctcaaattatagcaaacccagtctcggatacccatctatccaatctcatccctttcagctccctcactctcccagtgcttatcaaataattagtcctaatgcattcccggattttcaaggttttagagcttacagtcttctgagcttgaatgatctgagagataaggttcccagaaaacagccgacgaggaaggggcgtgggattgggtctggaaagggcaagactgcagggaggggtcacaagggtcagagagccagaaaaggtataaaattggggttcgaaggaggtcagacccctcttcgccgaagattacccaaacgtgggttcaagaacccatttagcctcacttttcagccaataggtttggggaaaattgcaaagtttattaatgctgggaagatagattcttctgaactgattacaatgaaaacactaaaggatgcaggggtactagggaagcaaatgaaagatggagtaagattgatggggcgtggttctgagcagatcaagtggccaattcatctagaggtatcaagggttactgttagggctaaggaagcagttgaagcagctggtgggtctgtgagaagggtgtattacaataagttgggcttgaaggcactggtgaagcctgagtggtttgaaaagaaaggaagattgctgcctaaagcagctagacctcctccaaagcaaaaggataaagttgatagcattggtcggttgcctgccccaacaaagccatttccatttttagttgaagcaagcaaggatcttccagttcagcatcttagttgaataactaacatttttggcaccagtttttaggattttgtaattctgtgtggtgcaaacgtctgactcacaagtttttcatgcagttcttgcaaatgctcaggtagttaattcaagaatgagataaatgaatttccttggggacaaatgaaagggagaatcttgtttattatttaatttcttttaaggatttgatcttcgtcactcagttgaaaagagagccttagtttcttgtgtatgtgtgcttggagtaggatcttagccccttcatgaagggaaaattgcaagaacagtctgcaatgtttaacttttctccggatatggatggtacttgtcaaatgacttggctgaattttaataaatggacgattgttcc

SEQ ID NO: 8143 - protein, 280 aa, Glycine max
  peptide (1)..(280): Ceres Seq. ID no. 15168444
  misc_feature (63)..(161): Pfam Name: Pfam Description:  Ribosomal protein L15 amino terminal region
  misc_feature (1)..(277): NCBI GI NO: 15237756 NR Description: expressed protein [Arabidopsis thaliana]
  misc_feature (1)..(269): NCBI GI NO: 34015188 NR Description: putative ribosomal protein L15
  misc_feature (28)..(254): NCBI GI NO: 32410177 NR Description: hypothetical protein [Neurospora crassa]
  misc_feature (63)..(211): NCBI GI NO: 22966103 NR Description: hypothetical protein [Rhodospirillum rubrum]
  misc_feature (63)..(212): NCBI GI NO: 17987059 NR Description: LSU ribosomal protein L15P [Brucella melitensis]
  misc_feature (63)..(212): NCBI GI NO: 22965142 NR Description: hypothetical protein [Rhodopseudomonas palustris]
  misc_feature (63)..(211): NCBI GI NO: 23014069 NR Description: hypothetical protein
  misc_feature (63)..(212): NCBI GI NO: 27380492 NR Description: 50S ribosomal protein L15
  misc_feature (63)..(211): NCBI GI NO: 15965128 NR Description: PROBABLE 50S RIBOSOMAL PROTEIN L15
  misc_feature (63)..(212): NCBI GI NO: 13470570 NR Description: 50S ribosomal protein L15 [Mesorhizobium loti]
MLRRRLSVLSTSITRSSNYSKPSLGYPSIQSHPFQLPHSPSAYQIISPNAFPDFQGFRAYSLLSLNDLRDKVPRKQPTRKGRGIGSGKGKTAGRGHKGQRARKGIKLGFEGGQTPLRRRLPKRGFKNPFSLTFQPIGLGKIAKFINAGKIDSSELITMKTLKDAGVLGKQMKDGVRLMGRGSEQIKWPIHLEVSRVTVRAKEAVEAAGGSVRRVYYNKLGLKALVKPEWFEKKGRLLPKAARPPPKQKDKVDSIGRLPAPTKPFPFLVEASKDLPVQHLS

SEQ ID NO: 8144 - DNA, 1195 bp, Glycine max
  misc_feature (1)..(1195): Ceres Seq. ID no. 14316543
atcgtcaaggaaaactaagttcttcagtcttgacttgagtgctttgagttcatggatccaatccaacacaagttcgtcaacgttggtgctctcaagctccacgtcgcagaaaccggaaccggtccaaacgccgtcgtattcctgcacggcttcccggagatatggtactcgtggcggcaccagatgatagctctcgccggtgccggattcagagcggtttccttcgattacagaggttacggtctctccgacccgccacccgaacccgataagacctcttggtccgatcttctcagtgatctccttcatattcttgatgctcttgctctttctaaggtgtttcttgttgggaaagactttggagctcgtcctgcatatctattttcaattcttcaccctgaaagggtcttgggagttgtcacgttgggagttccatatgttcccccaggcccctctcagtatcacaaattccttcctgaaggcttctacattttgagatggcaggaacctggaagggcagaagctgattttggacgctttgatgcaaagactgttgtgcgaaatatttacatcctcttctcaagaagtgaaataccaatagctaatgaaaaccaggagatcatggatttggtggaacctgatactccgcttcccacttggttcacagaggaagatcttgcaacatacggagccttgtatgagaaatctggattccaaactgcattgcagattccatataggtcattaggtgaagtgcttagcttgccagatcctgtggttaaagttccggcatttctgataatgggtggcaaggattatgttctgaaatttccagggattgaagatttaacaaagggtgaaaaagcaaaatggtttgttccaaacttggaggttacatttatcccggagggaacccattttgttcaagaacagtttcccgagaaggtgaatcagcttattcttgacttccttgccaagcacacttgatattggactgtcgtcatgaatggtgtatgtggattgtgaactgtgggaaaatcagacaaagtgcagcacaaaatgatcgattgctgaagctaaatgatgcaaagcttgctggtagagctttgttagatgaatttcttgtacaaagaattcgtgaaatatgcgactgagttgtctagctaataaataaataaccggtttcttagttaac

SEQ ID NO: 8145 - protein, 311 aa, Glycine max
  peptide (1)..(311): Ceres Seq. ID no. 14316544
  misc_feature (53)..(304): Pfam Name: Pfam Description:  alpha/beta hydrolase fold
  misc_feature (1)..(309): NCBI GI NO: 1354849 NR Description: epoxide hydrolase [Nicotiana tabacum]
  misc_feature (4)..(310): NCBI GI NO: 37535728 NR Description: putative epoxide hydrolase
  misc_feature (1)..(310): NCBI GI NO: 37535722 NR Description: putative epoxide hydrolase
  misc_feature (4)..(310): NCBI GI NO: 37535732 NR Description: putative epoxide hydrolase
  misc_feature (2)..(310): NCBI GI NO: 37535724 NR Description: putative epoxide hydrolase
  misc_feature (4)..(309): NCBI GI NO: 15230367 NR Description: epoxide hydrolase, putative [Arabidopsis thaliana]
  misc_feature (1)..(309): NCBI GI NO: 27960680 NR Description: soluble epoxide hydrolase [Euphorbia lagascae]
  misc_feature (1)..(309): NCBI GI NO: 7488671 NR Description: epoxide hydrolase homolog - soybean
  misc_feature (1)..(311): NCBI GI NO: 25407540 NR Description: probable epoxide hydrolase
  misc_feature (4)..(262): NCBI GI NO: 29826681 NR Description: putative epoxide hydrolase
MDPIQHKFVNVGALKLHVAETGTGPNAVVFLHGFPEIWYSWRHQMIALAGAGFRAVSFDYRGYGLSDPPPEPDKTSWSDLLSDLLHILDALALSKVFLVGKDFGARPAYLFSILHPERVLGVVTLGVPYVPPGPSQYHKFLPEGFYILRWQEPGRAEADFGRFDAKTVVRNIYILFSRSEIPIANENQEIMDLVEPDTPLPTWFTEEDLATYGALYEKSGFQTALQIPYRSLGEVLSLPDPVVKVPAFLIMGGKDYVLKFPGIEDLTKGEKAKWFVPNLEVTFIPEGTHFVQEQFPEKVNQLILDFLAKHT

SEQ ID NO: 8146 - protein, 267 aa, Glycine max
  peptide (1)..(267): Ceres Seq. ID no. 14316545
  misc_feature (9)..(260): Pfam Name: Pfam Description:  alpha/beta hydrolase fold
  misc_feature (1)..(265): NCBI GI NO: 1354849 NR Description: epoxide hydrolase [Nicotiana tabacum]
  misc_feature (1)..(266): NCBI GI NO: 37535728 NR Description: putative epoxide hydrolase
  misc_feature (1)..(266): NCBI GI NO: 37535722 NR Description: putative epoxide hydrolase
  misc_feature (1)..(266): NCBI GI NO: 37535732 NR Description: putative epoxide hydrolase
  misc_feature (1)..(266): NCBI GI NO: 37535724 NR Description: putative epoxide hydrolase
  misc_feature (1)..(265): NCBI GI NO: 15230367 NR Description: epoxide hydrolase, putative [Arabidopsis thaliana]
  misc_feature (1)..(265): NCBI GI NO: 27960680 NR Description: soluble epoxide hydrolase [Euphorbia lagascae]
  misc_feature (1)..(265): NCBI GI NO: 7488671 NR Description: epoxide hydrolase homolog - soybean
  misc_feature (1)..(267): NCBI GI NO: 25407540 NR Description: probable epoxide hydrolase
  misc_feature (1)..(218): NCBI GI NO: 29826681 NR Description: putative epoxide hydrolase
MIALAGAGFRAVSFDYRGYGLSDPPPEPDKTSWSDLLSDLLHILDALALSKVFLVGKDFGARPAYLFSILHPERVLGVVTLGVPYVPPGPSQYHKFLPEGFYILRWQEPGRAEADFGRFDAKTVVRNIYILFSRSEIPIANENQEIMDLVEPDTPLPTWFTEEDLATYGALYEKSGFQTALQIPYRSLGEVLSLPDPVVKVPAFLIMGGKDYVLKFPGIEDLTKGEKAKWFVPNLEVTFIPEGTHFVQEQFPEKVNQLILDFLAKHT

SEQ ID NO: 8147 - DNA, 1031 bp, Glycine max
  misc_feature (1)..(1031): Ceres Seq. ID no. 13594220
atcatgatcaataacagtcttaaaaaaagaagtttgaagacctatttagaaaatttcaaatcgtttagggccagttgagtagtttaacgatttttgaattacacctgaacaccaggtacgtaaaaaataaaacaaaacaaaaacacttcctcttcctcctttcccccgaaaaacccttaaaccacgaccttcatatttgcagtgctagtctgtttatttcttcagctatgtttttgtcaagaacacttggacgaacactctttgctgctgctgccagatcaaaacaatatgccactacagcagctgctgctagcagagaaggacacaacccccttcaggagttttttgaggcagacaggagccctgaagatgacaaacctgttgtttatggtcggagttggaaggcgtgtgaactgcgtctgaagtcttgggatgaccttcataagttgtggtatgtgttgttaaaggaaaagaacatgttgatgactcaacgtcaaatgcttaatgcacagaacctgcgttttcctaacccagagcgcatccctaaggtgaggaagtcaatgtgtcgcatcaagcatgtacttactgagagagcaattgaagaaccagatccgaggaggtctgctgagatgaagagaatgataaatgctctttgatggcttaaaatggacctgttcctttagtagcattactgggtatgttgttagaataggacctctacatttgcggatgtaaggttgctaacttgaagcattgtcctaatatattgtttacgaaggagtttacctgtgaatgatttctatttcttgataaagtgttaagtgggttacatcccaaatattttgctgtcctaatttctatttcctacttttagatgtatcaagcaaacaagtgttatcatattatcgtgttagaggttatgcaaaatgttagggaggaagggttgttcctgctttcatgtaataaaaatgtttttccctgttactttaaagggcaacctttgaaaaatgaatagtataattttacctgcc

SEQ ID NO: 8148 - protein, 142 aa, Glycine max
  peptide (1)..(142): Ceres Seq. ID no. 13594221
  misc_feature (1)..(142): NCBI GI NO: 15223019 NR Description: ribosomal protein L29p family
  misc_feature (56)..(142): NCBI GI NO: 25407010 NR Description: hypothetical protein
  misc_feature (1)..(55): NCBI GI NO: 25407010 NR Description: hypothetical protein
  misc_feature (1)..(122): NCBI GI NO: 17505324 NR Description: Putative mitochondrial protein of eukaryotic origin
  misc_feature (10)..(141): NCBI GI NO: 39595870 NR Description: Hypothetical protein CBG12849
  misc_feature (29)..(122): NCBI GI NO: 20810578 NR Description: 4833424P18Rik protein [Mus musculus]
  misc_feature (29)..(122): NCBI GI NO: 23273006 NR Description: 4833424P18Rik protein [Mus musculus]
  misc_feature (29)..(122): NCBI GI NO: 20865861 NR Description: similar to CGI-204 [Mus musculus]
  misc_feature (20)..(122): NCBI GI NO: 9858831 NR Description: CGI-204 [Homo sapiens]
  misc_feature (20)..(122): NCBI GI NO: 29826287 NR Description: mitochondrial ribosomal protein L47 isoform a
MFLSRTLGRTLFAAAARSKQYATTAAAASREGHNPLQEFFEADRSPEDDKPVVYGRSWKACELRLKSWDDLHKLWYVLLKEKNMLMTQRQMLNAQNLRFPNPERIPKVRKSMCRIKHVLTERAIEEPDPRRSAEMKRMINAL

SEQ ID NO: 8149 - DNA, 1424 bp, Glycine max
  misc_feature (1)..(1424): Ceres Seq. ID no. 15168576
gcacaagtcccaacctaaacccgcgtctcttcactcttcaattcaatggcttccacgcccttctccactttctgccacttccacaaacccaccctccttttcttagcttccgacgggttcaggctcggtggcgctccggcgatcgccttcggaaaggttcggaagaaccgcaaaatgggaatattccccgtttgcagagctggttctgccgtcgtcttccgcgacctcgacgccgacgactttcgccaccctcttgatcaacagaatacgctgctactgagagcaattccgggattgaacgaactgggaaaagctcttctaggaactgtatctgagcaggttatgctccttgaaaacattgggacatccgtccttgtttctaaaaatcagcttcctgatctttaccacctaatggtcgaagctgccgaaatattaaatgtagatgcccctgatctatatgttcgtcaaagtcctgtgccaaatgcatatacattagctataagtggtaaacgacctttcgttgtcattcatactagccttgtggagctcctgacaaaagcagagttgcaggctgttttggctcatgagctgggtcacctaaaatgtgatcatggtgtgtggcttacatatgcaaatattctaacccttggagcctattctgtacctggtattggcggtatgatagctcagactttggaagagcagctgttccgctggcttcgagcagctgagttgacttgtgatcgtgcagctcttcttgttgctcaagaccctaaggttgtcatctctgtcctcatgaaattagctgggggatgtccatctatggctgatcaactaaatgtggatgcattcctggagcaagctcgctcttatgaaaaagctgcttccagcccaattgggtggtatataaggaatgcacaaacaaggcaactgtcacatcctctgcctgttctacgtgctagcgaaattgatgaatggtcaagaactccagcttataaatctcttttgaaacgaggaattcagatcaaatcttagaacgaaatgtctagcagtgcatgcatggaatttgttgaaagtgcacagcagctcaaggttcttcaagttagtgcgtggtggcagatgttcaaatggtttcaggcggaagtagcatttattatgcatctatctacggctgctgcaaacatgtatgtattcactgtgttatattagtcaacccgtaagtagaattttggtgagttggattattatttcatagaaatattggttttggaaagaaaagaattacctgtacaattctagcttagaaaatttctcggagtagaaaacactattatgtaagttttatgaccgaaaatttttatttgttgtattttacactataagctaagctctttttgaatagtactaaaacattgactgtttcc

SEQ ID NO: 8150 - protein, 329 aa, Glycine max
  peptide (1)..(329): Ceres Seq. ID no. 15168577
  misc_feature (123)..(226): Pfam Name: Pfam Description:  Peptidase family M48
  misc_feature (24)..(323): NCBI GI NO: 18405231 NR Description: expressed protein [Arabidopsis thaliana]
  misc_feature (24)..(323): NCBI GI NO: 21553677 NR Description: unknown [Arabidopsis thaliana]
  misc_feature (51)..(328): NCBI GI NO: 34905986 NR Description: P0518C01.3
  misc_feature (61)..(322): NCBI GI NO: 17227669 NR Description: hypothetical protein [Nostoc sp. PCC 7120]
  misc_feature (61)..(322): NCBI GI NO: 16330161 NR Description: hypothetical protein [Synechocystis sp. PCC 6803]
  misc_feature (61)..(323): NCBI GI NO: 22298181 NR Description: ORF_ID:tll0639~hypothetical protein
  misc_feature (58)..(321): NCBI GI NO: 37523123 NR Description: hypothetical protein glr3554
  misc_feature (102)..(322): NCBI GI NO: 23042718 NR Description: hypothetical protein
  misc_feature (56)..(321): NCBI GI NO: 23017259 NR Description: hypothetical protein [Thermobifida fusca]
  misc_feature (58)..(329): NCBI GI NO: 23130232 NR Description: hypothetical protein [Nostoc punctiforme]
MASTPFSTFCHFHKPTLLFLASDGFRLGGAPAIAFGKVRKNRKMGIFPVCRAGSAVVFRDLDADDFRHPLDQQNTLLLRAIPGLNELGKALLGTVSEQVMLLENIGTSVLVSKNQLPDLYHLMVEAAEILNVDAPDLYVRQSPVPNAYTLAISGKRPFVVIHTSLVELLTKAELQAVLAHELGHLKCDHGVWLTYANILTLGAYSVPGIGGMIAQTLEEQLFRWLRAAELTCDRAALLVAQDPKVVISVLMKLAGGCPSMADQLNVDAFLEQARSYEKAASSPIGWYIRNAQTRQLSHPLPVLRASEIDEWSRTPAYKSLLKRGIQIKS

SEQ ID NO: 8151 - protein, 286 aa, Glycine max
  peptide (1)..(286): Ceres Seq. ID no. 15168578
  misc_feature (80)..(183): Pfam Name: Pfam Description:  Peptidase family M48
  misc_feature (1)..(280): NCBI GI NO: 18405231 NR Description: expressed protein [Arabidopsis thaliana]
  misc_feature (1)..(280): NCBI GI NO: 21553677 NR Description: unknown [Arabidopsis thaliana]
  misc_feature (8)..(285): NCBI GI NO: 34905986 NR Description: P0518C01.3
  misc_feature (18)..(279): NCBI GI NO: 17227669 NR Description: hypothetical protein [Nostoc sp. PCC 7120]
  misc_feature (18)..(279): NCBI GI NO: 16330161 NR Description: hypothetical protein [Synechocystis sp. PCC 6803]
  misc_feature (18)..(280): NCBI GI NO: 22298181 NR Description: ORF_ID:tll0639~hypothetical protein
  misc_feature (15)..(278): NCBI GI NO: 37523123 NR Description: hypothetical protein glr3554
  misc_feature (59)..(279): NCBI GI NO: 23042718 NR Description: hypothetical protein
  misc_feature (13)..(278): NCBI GI NO: 23017259 NR Description: hypothetical protein [Thermobifida fusca]
  misc_feature (15)..(286): NCBI GI NO: 23130232 NR Description: hypothetical protein [Nostoc punctiforme]
MGIFPVCRAGSAVVFRDLDADDFRHPLDQQNTLLLRAIPGLNELGKALLGTVSEQVMLLENIGTSVLVSKNQLPDLYHLMVEAAEILNVDAPDLYVRQSPVPNAYTLAISGKRPFVVIHTSLVELLTKAELQAVLAHELGHLKCDHGVWLTYANILTLGAYSVPGIGGMIAQTLEEQLFRWLRAAELTCDRAALLVAQDPKVVISVLMKLAGGCPSMADQLNVDAFLEQARSYEKAASSPIGWYIRNAQTRQLSHPLPVLRASEIDEWSRTPAYKSLLKRGIQIKS

SEQ ID NO: 8152 - protein, 230 aa, Glycine max
  peptide (1)..(230): Ceres Seq. ID no. 15168579
  misc_feature (24)..(127): Pfam Name: Pfam Description:  Peptidase family M48
  misc_feature (1)..(224): NCBI GI NO: 18405231 NR Description: expressed protein [Arabidopsis thaliana]
  misc_feature (1)..(224): NCBI GI NO: 21553677 NR Description: unknown [Arabidopsis thaliana]
  misc_feature (1)..(229): NCBI GI NO: 34905986 NR Description: P0518C01.3
  misc_feature (1)..(223): NCBI GI NO: 17227669 NR Description: hypothetical protein [Nostoc sp. PCC 7120]
  misc_feature (1)..(223): NCBI GI NO: 16330161 NR Description: hypothetical protein [Synechocystis sp. PCC 6803]
  misc_feature (1)..(224): NCBI GI NO: 22298181 NR Description: ORF_ID:tll0639~hypothetical protein
  misc_feature (1)..(222): NCBI GI NO: 37523123 NR Description: hypothetical protein glr3554
  misc_feature (3)..(223): NCBI GI NO: 23042718 NR Description: hypothetical protein
  misc_feature (1)..(222): NCBI GI NO: 23017259 NR Description: hypothetical protein [Thermobifida fusca]
  misc_feature (1)..(230): NCBI GI NO: 23130232 NR Description: hypothetical protein [Nostoc punctiforme]
MLLENIGTSVLVSKNQLPDLYHLMVEAAEILNVDAPDLYVRQSPVPNAYTLAISGKRPFVVIHTSLVELLTKAELQAVLAHELGHLKCDHGVWLTYANILTLGAYSVPGIGGMIAQTLEEQLFRWLRAAELTCDRAALLVAQDPKVVISVLMKLAGGCPSMADQLNVDAFLEQARSYEKAASSPIGWYIRNAQTRQLSHPLPVLRASEIDEWSRTPAYKSLLKRGIQIKS

SEQ ID NO: 8153 - DNA, 2115 bp, Glycine max
  misc_feature (1)..(2115): Ceres Seq. ID no. 15168584
ataaagaccgagtaattaaaacttttttcaatgaagttggggcccaagaggcaataaaacccagcagcagcgtataagttccggagcggctccgtccgtatcttcccgacctcctttgttttcgacaaaccctccctccctctcaaactgtcacccctttccgtacgtccattcaaacatttcctctttcttatattcttctttttctctcttcactttcaaacacaaaccctaattcactttctaccaattcattcgcaaacaccttttccaatttccaacacacaccaaccatgggctacgaagacaatccgtatcgtgacgaggacggagagcccttgatggactacgacgacattcaatccgatcgcgagccatctcccgagcctcgccgccaggacgacgatttcgatgaggacgtcgacgagtggcgcggccgtgatcggtcgcagacgccggtctatgacaccgatccgtcgcggtcgaagccgcggaagaggctgatcaagaagagcgacgccgggaagcaggcggtggagccggagcttgaggatgaggacgtggaggggtatgttccggaggcgatgttcgacgaggcggacactggaaggaagaggaagaaggggaaggagggtgggagtgggaagaaggagaagaggatgaagggggagaagagttttgggagcagcggtgggaagagtgggtccaaatttgggagtggaaagaaagggtttggtgggaaggcagggaaggatcatgatggtgaagttaaggagatgtgggatacaattgctgggggagattctgaggatgatcaagagggtgtcaggaatgtggatgatgacaacttcatagatgacactggagtggaacctgcttattatggtagtgatgaaccacgttctcctgttgatgctccccaggcggaggagggtgaagaggatgaagaaattaaggatcttttcaagataggtaagaaaaagaagaagaatgagagaagtccagcagaaatagcgtatttagttgagactgtcatggctgagcttgaggttacagctgaggaggatgctgaacttaatagacagggaaagcctgccattaataaactcaagaagttgaatcttctgactgaagtcctctcaaagaaacagcttcaactagagtttttagatcatggagtgctaactttattgaagaattggcttgagccacttcctgatggaagcttgccaaatataaatatacgctcggaagttttgaagatattgaatgattttcctatagatctagagcagtatgatagaagagaacagctgaaaaagagtggtctgggaaaggtcattatgtttttatcaaagtctgatgaagaaatcagtgcaaataggaaactagccaaggagctggttgataagtggagccggcctatatttaataagagtacccggtttgaagacatgagaaatgtggaggatgatagggttccttatcggaggccatcagttaaaaagccggcaaataaatctgcaggaatggaatctagggacagtgatcttgatttggaactttcacagcctaggtctggacagtcctcttctaggcagcatgcatcaaggccggaagcaacacctttggattttgtggtccgtccccagtctaaaattgatccagaagaaattagagcacgagcaaaacaagctgcacaagatcagcagcgtatgaagatgaataagaaattgcagcaattgagggcaccaaaaaagaagcagcttcaggctacaaaactgagcgtggaaggtcgtggtatgatcaaatatttataaatgtgtccacgttgatactggacgggtttgtttgtcctgctgcaagctctcatataatgtgctgcctgcattaatgtggattcttctgaaggtggagatccagtgagctcgataaatggaaatttgaaggagagggatgtcatgaaaatacatccgtatactgcatttgtgtattcatttagtgcagcaggaaacccaaaatacatttgacggttatgcattcgtctattatttcgttttctgttgaataatcatcatgcttgtcatcaatttaatgaatatgtggattttcact

SEQ ID NO: 8154 - protein, 508 aa, Glycine max
  peptide (1)..(508): Ceres Seq. ID no. 15168585
  misc_feature (243)..(504): Pfam Name: Pfam Description:  IWS1 C-terminus
  misc_feature (75)..(508): NCBI GI NO: 34895776 NR Description: P0434B04.3
  misc_feature (111)..(508): NCBI GI NO: 15222574 NR Description: expressed protein [Arabidopsis thaliana]
  misc_feature (209)..(508): NCBI GI NO: 15234085 NR Description: hypothetical protein [Arabidopsis thaliana]
  misc_feature (47)..(504): NCBI GI NO: 31203501 NR Description: ENSANGP00000010073 [Anopheles gambiae]
  misc_feature (3)..(504): NCBI GI NO: 16552402 NR Description: unnamed protein product [Homo sapiens]
  misc_feature (21)..(504): NCBI GI NO: 21739669 NR Description: hypothetical protein [Homo sapiens]
  misc_feature (21)..(504): NCBI GI NO: 24308177 NR Description: hypothetical protein FLJ10006 [Homo sapiens]
  misc_feature (3)..(504): NCBI GI NO: 30352010 NR Description: hypothetical protein 3000008H23 [Mus musculus]
  misc_feature (234)..(477): NCBI GI NO: 31241925 NR Description: ENSANGP00000012213 [Anopheles gambiae]
  misc_feature (21)..(385): NCBI GI NO: 7021194 NR Description: unnamed protein product [Homo sapiens]
MGYEDNPYRDEDGEPLMDYDDIQSDREPSPEPRRQDDDFDEDVDEWRGRDRSQTPVYDTDPSRSKPRKRLIKKSDAGKQAVEPELEDEDVEGYVPEAMFDEADTGRKRKKGKEGGSGKKEKRMKGEKSFGSSGGKSGSKFGSGKKGFGGKAGKDHDGEVKEMWDTIAGGDSEDDQEGVRNVDDDNFIDDTGVEPAYYGSDEPRSPVDAPQAEEGEEDEEIKDLFKIGKKKKKNERSPAEIAYLVETVMAELEVTAEEDAELNRQGKPAINKLKKLNLLTEVLSKKQLQLEFLDHGVLTLLKNWLEPLPDGSLPNINIRSEVLKILNDFPIDLEQYDRREQLKKSGLGKVIMFLSKSDEEISANRKLAKELVDKWSRPIFNKSTRFEDMRNVEDDRVPYRRPSVKKPANKSAGMESRDSDLDLELSQPRSGQSSSRQHASRPEATPLDFVVRPQSKIDPEEIRARAKQAAQDQQRMKMNKKLQQLRAPKKKQLQATKLSVEGRGMIKYL

SEQ ID NO: 8155 - protein, 492 aa, Glycine max
  peptide (1)..(492): Ceres Seq. ID no. 15168586
  misc_feature (227)..(488): Pfam Name: Pfam Description:  IWS1 C-terminus
  misc_feature (59)..(492): NCBI GI NO: 34895776 NR Description: P0434B04.3
  misc_feature (95)..(492): NCBI GI NO: 15222574 NR Description: expressed protein [Arabidopsis thaliana]
  misc_feature (193)..(492): NCBI GI NO: 15234085 NR Description: hypothetical protein [Arabidopsis thaliana]
  misc_feature (31)..(488): NCBI GI NO: 31203501 NR Description: ENSANGP00000010073 [Anopheles gambiae]
  misc_feature (1)..(488): NCBI GI NO: 16552402 NR Description: unnamed protein product [Homo sapiens]
  misc_feature (5)..(488): NCBI GI NO: 21739669 NR Description: hypothetical protein [Homo sapiens]
  misc_feature (5)..(488): NCBI GI NO: 24308177 NR Description: hypothetical protein FLJ10006 [Homo sapiens]
  misc_feature (1)..(488): NCBI GI NO: 30352010 NR Description: hypothetical protein 3000008H23 [Mus musculus]
  misc_feature (218)..(461): NCBI GI NO: 31241925 NR Description: ENSANGP00000012213 [Anopheles gambiae]
  misc_feature (5)..(369): NCBI GI NO: 7021194 NR Description: unnamed protein product [Homo sapiens]
MDYDDIQSDREPSPEPRRQDDDFDEDVDEWRGRDRSQTPVYDTDPSRSKPRKRLIKKSDAGKQAVEPELEDEDVEGYVPEAMFDEADTGRKRKKGKEGGSGKKEKRMKGEKSFGSSGGKSGSKFGSGKKGFGGKAGKDHDGEVKEMWDTIAGGDSEDDQEGVRNVDDDNFIDDTGVEPAYYGSDEPRSPVDAPQAEEGEEDEEIKDLFKIGKKKKKNERSPAEIAYLVETVMAELEVTAEEDAELNRQGKPAINKLKKLNLLTEVLSKKQLQLEFLDHGVLTLLKNWLEPLPDGSLPNINIRSEVLKILNDFPIDLEQYDRREQLKKSGLGKVIMFLSKSDEEISANRKLAKELVDKWSRPIFNKSTRFEDMRNVEDDRVPYRRPSVKKPANKSAGMESRDSDLDLELSQPRSGQSSSRQHASRPEATPLDFVVRPQSKIDPEEIRARAKQAAQDQQRMKMNKKLQQLRAPKKKQLQATKLSVEGRGMIKYL

SEQ ID NO: 8156 - protein, 411 aa, Glycine max
  peptide (1)..(411): Ceres Seq. ID no. 15168587
  misc_feature (146)..(407): Pfam Name: Pfam Description:  IWS1 C-terminus
  misc_feature (1)..(411): NCBI GI NO: 34895776 NR Description: P0434B04.3
  misc_feature (14)..(411): NCBI GI NO: 15222574 NR Description: expressed protein [Arabidopsis thaliana]
  misc_feature (112)..(411): NCBI GI NO: 15234085 NR Description: hypothetical protein [Arabidopsis thaliana]
  misc_feature (1)..(407): NCBI GI NO: 31203501 NR Description: ENSANGP00000010073 [Anopheles gambiae]
  misc_feature (1)..(407): NCBI GI NO: 16552402 NR Description: unnamed protein product [Homo sapiens]
  misc_feature (1)..(407): NCBI GI NO: 21739669 NR Description: hypothetical protein [Homo sapiens]
  misc_feature (1)..(407): NCBI GI NO: 24308177 NR Description: hypothetical protein FLJ10006 [Homo sapiens]
  misc_feature (1)..(407): NCBI GI NO: 30352010 NR Description: hypothetical protein 3000008H23 [Mus musculus]
  misc_feature (137)..(380): NCBI GI NO: 31241925 NR Description: ENSANGP00000012213 [Anopheles gambiae]
  misc_feature (1)..(288): NCBI GI NO: 7021194 NR Description: unnamed protein product [Homo sapiens]
MFDEADTGRKRKKGKEGGSGKKEKRMKGEKSFGSSGGKSGSKFGSGKKGFGGKAGKDHDGEVKEMWDTIAGGDSEDDQEGVRNVDDDNFIDDTGVEPAYYGSDEPRSPVDAPQAEEGEEDEEIKDLFKIGKKKKKNERSPAEIAYLVETVMAELEVTAEEDAELNRQGKPAINKLKKLNLLTEVLSKKQLQLEFLDHGVLTLLKNWLEPLPDGSLPNINIRSEVLKILNDFPIDLEQYDRREQLKKSGLGKVIMFLSKSDEEISANRKLAKELVDKWSRPIFNKSTRFEDMRNVEDDRVPYRRPSVKKPANKSAGMESRDSDLDLELSQPRSGQSSSRQHASRPEATPLDFVVRPQSKIDPEEIRARAKQAAQDQQRMKMNKKLQQLRAPKKKQLQATKLSVEGRGMIKYL

SEQ ID NO: 8157 - DNA, 1271 bp, Glycine max
  misc_feature (1)..(1271): Ceres Seq. ID no. 15171728
aatctcaatctcatcagttaactttacctaatacacaaaccccgttcctccgttcacgcactacctcagtcttctcttctcttttactaaaagaaccaacaatctctagaaccctctcagccaaaaaaaacaatgcagacccaccagaaccctcccacactggattccgacccgcagctcccgcagatcaaaatccaccacccctcctccccgcgccatcaccacccctcctccgccgccacccccacccccaccgccggcgcacgccgcaaaatcggcgtggccgtcgacctctccgacgagagcgcctacgcggtccgctgggccgtgcagcactacatccgccccggggacgccgtgatcctgctccacgtcagccctaccaacgtcctcttcggcgccgactggggctcgatcgacctctccatcaacactgaccccaactccgacgaagacgccgtcagcgccgtcaacagtaacgaccacgccaacgccggcaacagcaaacgcaagctcgaggacgacttcgacgccttcacggcgtcgaaggccgcggatctcgcgaagccgttgagagaatcgcaaattccgttcaagatccatattgtgaaggatcacgacatgaaggagaggctgtgcttggaggtggagaggcttgggttgagcgcggtgattatggggagtagagggtttggcgctgtgaggcgtggcagcgatgggaggcttgggagtgttagtgattactgcgttcatcactgtgtttgtcctgttgtggtggtgcgttatcccgatgataaggatgtggttgcggcggccaccacggcctcggccgtggtggcgctcaaggacggggatgagggcgagacggtgatccagccggtgccgcacaagaaagaggattagttggagccaactcatcacttcaaccctgtctctgaagaatgtttctaatccgaagggattggtggaaatggttgtagagtgctctctttctcttcctgtcaggttgtacttatagagcatttcctgcatatgaactgtggaaagattatggatgattttgtatggcttgatgtgatctcggttccattaggcctttgaagattgtttttggttccgaagtggtatatactctttcatgtagatgtacaagtttgcctgtgactgtttttggggttattttcttcccattctgtatgttgttggaaatcagattatcatgacgagcacttgtttagctatttagataattctatagagctgtgttggtg

SEQ ID NO: 8158 - protein, 256 aa, Glycine max
  peptide (1)..(256): Ceres Seq. ID no. 15171729
  misc_feature (46)..(217): Pfam Name: Pfam Description:  Universal stress protein family
  misc_feature (11)..(244): NCBI GI NO: 7486798 NR Description: hypothetical protein M4I22
  misc_feature (11)..(244): NCBI GI NO: 18416966 NR Description: expressed protein [Arabidopsis thaliana]
  misc_feature (1)..(253): NCBI GI NO: 28971968 NR Description: CHP-rich zinc finger protein-like
  misc_feature (1)..(253): NCBI GI NO: 33146953 NR Description: CHP-rich zinc finger protein-like
  misc_feature (7)..(251): NCBI GI NO: 34910112 NR Description: B1100D10.31
  misc_feature (32)..(246): NCBI GI NO: 25402657 NR Description: protein T23J18.3 [imported] - Arabidopsis thaliana
  misc_feature (32)..(246): NCBI GI NO: 30682187 NR Description: expressed protein [Arabidopsis thaliana]
  misc_feature (6)..(223): NCBI GI NO: 8885586 NR Description: gene_id:F24B18
  misc_feature (6)..(223): NCBI GI NO: 18423628 NR Description: expressed protein [Arabidopsis thaliana]
  misc_feature (138)..(242): NCBI GI NO: 15232490 NR Description: CHP-rich zinc finger protein, putative
MQTHQNPPTLDSDPQLPQIKIHHPSSPRHHHPSSAATPTPTAGARRKIGVAVDLSDESAYAVRWAVQHYIRPGDAVILLHVSPTNVLFGADWGSIDLSINTDPNSDEDAVSAVNSNDHANAGNSKRKLEDDFDAFTASKAADLAKPLRESQIPFKIHIVKDHDMKERLCLEVERLGLSAVIMGSRGFGAVRRGSDGRLGSVSDYCVHHCVCPVVVVRYPDDKDVVAAATTASAVVALKDGDEGETVIQPVPHKKED

SEQ ID NO: 8159 - protein, 144 aa, Glycine max
  peptide (1)..(144): Ceres Seq. ID no. 15171730
SQSHQLTLPNTQTPFLRSRTTSVFSSLLLKEPTISRTLSAKKNNADPPEPSHTGFRPAAPADQNPPPLLPAPSPPLLRRHPHPHRRRTPQNRRGRRPLRRERLRGPLGRAALHPPRGRRDPAPRQPYQRPLRRRLGLDRPLHQH

SEQ ID NO: 8160 - DNA, 1309 bp, Glycine max
  misc_feature (1)..(1309): Ceres Seq. ID no. 15171739
atatacttcccttctggcaactctccaacagcttcccctttctccccttctccagaacctccgcgtcgtccgatgggaacagaaggttacacttacatggggcgcagtttgaccgaactccgcatcaacgacgattcctcttcctccgccttcagcgactgcaacagtgacagatctggcgaattcgccaccgcttcttcgcagacgcggaggtttctgatcgcctgcgccaccgaaaattccgacgacttgattcgccaactcgtttctgatctccactcctcttccatcgactatcagaaacaagccgccatggaaatccggttactcgcgaagaacaagccggagaatcgcatcaaaatcgcgaaagccggcgcaatcaaaccgctaatttctctcattttgtctccggacctccagctccaggaatacggcgtcaccgcgattttgaacctctcgctctgcgacgagaacaaggaggtgatagcctcctccggcgcgatcaagccgctggtccgcgcgctgggcgcgggaaccccgacggcgaaggagaacgcggcgtgcgcgctgctaagactctcgcaggtggaggagagcaaggcggcgatcgggcggtccggcgcgattccacttctggtgagcctcctggagagtggcgggttccgcgcgaagaaggacgcatcgacagcgctgtactcgctgtgcatggtgaaggagaacaagatcagggcggtgaaggcggggatcatgaaggtgctggtggagctgatggcggacttcgagtcgaacatggtggacaagtcggcgtacgtggtgagcgtgctggtggcggtagcggaggcgagggcggcgctggtggaggaaggaggcgtgccggtgctggtggagatcgtcgaggttgggacgcagcggcagaaggaaatcgttgtggttattctcttacaggtttgcgaggacagcgtggcgtatcgcaccatggtcgctcgcgaaggtgcgattcctcctttggtcgctttgtctcagtccggcaccaatcgtgccaagcaaaaggtattattctcttcaacgccatttccattactcttctccgctcgtgacgtggcacccttcccttcaaaccggtttgatccctttttttatttataaggtgagaatcaaataactcacctcagccaagtcaactaaattaaacccttttgacaccagttcggtttggtaactagttacggaaaactatttttgtaccgatgtgacaaatacaattgttgaagattgaagaaccaaaatgcaatactattatttctttgcc

SEQ ID NO: 8161 - protein, 381 aa, Glycine max
  peptide (1)..(381): Ceres Seq. ID no. 15171740
  misc_feature (155)..(195): Pfam Name: Pfam Description:  Armadillo/beta-catenin-like repeat
  misc_feature (30)..(350): NCBI GI NO: 16226454 NR Description: AT3g01400/T13O15_4 [Arabidopsis thaliana]
  misc_feature (30)..(350): NCBI GI NO: 18395805 NR Description: expressed protein [Arabidopsis thaliana]
  misc_feature (30)..(350): NCBI GI NO: 21592960 NR Description: unknown [Arabidopsis thaliana]
  misc_feature (30)..(350): NCBI GI NO: 15237730 NR Description: expressed protein [Arabidopsis thaliana]
  misc_feature (30)..(350): NCBI GI NO: 26452835 NR Description: unknown protein [Arabidopsis thaliana]
  misc_feature (53)..(350): NCBI GI NO: 8843789 NR Description: phosphoinositide-specific phospholipase C-line
  misc_feature (44)..(350): NCBI GI NO: 34393600 NR Description: arm repeat-containing protein-like protein
  misc_feature (73)..(350): NCBI GI NO: 26452478 NR Description: unknown protein [Arabidopsis thaliana]
  misc_feature (69)..(350): NCBI GI NO: 28974687 NR Description: arm repeat-containing protein [Nicotiana tabacum]
  misc_feature (5)..(351): NCBI GI NO: 30681980 NR Description: expressed protein [Arabidopsis thaliana]
IYFPSGNSPTASPFSPSPEPPRRPMGTEGYTYMGRSLTELRINDDSSSSAFSDCNSDRSGEFATASSQTRRFLIACATENSDDLIRQLVSDLHSSSIDYQKQAAMEIRLLAKNKPENRIKIAKAGAIKPLISLILSPDLQLQEYGVTAILNLSLCDENKEVIASSGAIKPLVRALGAGTPTAKENAACALLRLSQVEESKAAIGRSGAIPLLVSLLESGGFRAKKDASTALYSLCMVKENKIRAVKAGIMKVLVELMADFESNMVDKSAYVVSVLVAVAEARAALVEEGGVPVLVEIVEVGTQRQKEIVVVILLQVCEDSVAYRTMVAREGAIPPLVALSQSGTNRAKQKVLFSSTPFPLLFSARDVAPFPSNRFDPFFYL

SEQ ID NO: 8162 - protein, 357 aa, Glycine max
  peptide (1)..(357): Ceres Seq. ID no. 15171741
  misc_feature (131)..(171): Pfam Name: Pfam Description:  Armadillo/beta-catenin-like repeat
  misc_feature (6)..(326): NCBI GI NO: 16226454 NR Description: AT3g01400/T13O15_4 [Arabidopsis thaliana]
  misc_feature (6)..(326): NCBI GI NO: 18395805 NR Description: expressed protein [Arabidopsis thaliana]
  misc_feature (6)..(326): NCBI GI NO: 21592960 NR Description: unknown [Arabidopsis thaliana]
  misc_feature (6)..(326): NCBI GI NO: 15237730 NR Description: expressed protein [Arabidopsis thaliana]
  misc_feature (6)..(326): NCBI GI NO: 26452835 NR Description: unknown protein [Arabidopsis thaliana]
  misc_feature (29)..(326): NCBI GI NO: 8843789 NR Description: phosphoinositide-specific phospholipase C-line
  misc_feature (20)..(326): NCBI GI NO: 34393600 NR Description: arm repeat-containing protein-like protein
  misc_feature (49)..(326): NCBI GI NO: 26452478 NR Description: unknown protein [Arabidopsis thaliana]
  misc_feature (45)..(326): NCBI GI NO: 28974687 NR Description: arm repeat-containing protein [Nicotiana tabacum]
  misc_feature (1)..(327): NCBI GI NO: 30681980 NR Description: expressed protein [Arabidopsis thaliana]
MGTEGYTYMGRSLTELRINDDSSSSAFSDCNSDRSGEFATASSQTRRFLIACATENSDDLIRQLVSDLHSSSIDYQKQAAMEIRLLAKNKPENRIKIAKAGAIKPLISLILSPDLQLQEYGVTAILNLSLCDENKEVIASSGAIKPLVRALGAGTPTAKENAACALLRLSQVEESKAAIGRSGAIPLLVSLLESGGFRAKKDASTALYSLCMVKENKIRAVKAGIMKVLVELMADFESNMVDKSAYVVSVLVAVAEARAALVEEGGVPVLVEIVEVGTQRQKEIVVVILLQVCEDSVAYRTMVAREGAIPPLVALSQSGTNRAKQKVLFSSTPFPLLFSARDVAPFPSNRFDPFFYL

SEQ ID NO: 8163 - protein, 349 aa, Glycine max
  peptide (1)..(349): Ceres Seq. ID no. 15171742
  misc_feature (123)..(163): Pfam Name: Pfam Description:  Armadillo/beta-catenin-like repeat
  misc_feature (1)..(318): NCBI GI NO: 16226454 NR Description: AT3g01400/T13O15_4 [Arabidopsis thaliana]
  misc_feature (1)..(318): NCBI GI NO: 18395805 NR Description: expressed protein [Arabidopsis thaliana]
  misc_feature (1)..(318): NCBI GI NO: 21592960 NR Description: unknown [Arabidopsis thaliana]
  misc_feature (1)..(318): NCBI GI NO: 15237730 NR Description: expressed protein [Arabidopsis thaliana]
  misc_feature (1)..(318): NCBI GI NO: 26452835 NR Description: unknown protein [Arabidopsis thaliana]
  misc_feature (21)..(318): NCBI GI NO: 8843789 NR Description: phosphoinositide-specific phospholipase C-line
  misc_feature (12)..(318): NCBI GI NO: 34393600 NR Description: arm repeat-containing protein-like protein
  misc_feature (41)..(318): NCBI GI NO: 26452478 NR Description: unknown protein [Arabidopsis thaliana]
  misc_feature (37)..(318): NCBI GI NO: 28974687 NR Description: arm repeat-containing protein [Nicotiana tabacum]
  misc_feature (1)..(319): NCBI GI NO: 30681980 NR Description: expressed protein [Arabidopsis thaliana]
MGRSLTELRINDDSSSSAFSDCNSDRSGEFATASSQTRRFLIACATENSDDLIRQLVSDLHSSSIDYQKQAAMEIRLLAKNKPENRIKIAKAGAIKPLISLILSPDLQLQEYGVTAILNLSLCDENKEVIASSGAIKPLVRALGAGTPTAKENAACALLRLSQVEESKAAIGRSGAIPLLVSLLESGGFRAKKDASTALYSLCMVKENKIRAVKAGIMKVLVELMADFESNMVDKSAYVVSVLVAVAEARAALVEEGGVPVLVEIVEVGTQRQKEIVVVILLQVCEDSVAYRTMVAREGAIPPLVALSQSGTNRAKQKVLFSSTPFPLLFSARDVAPFPSNRFDPFFYL

SEQ ID NO: 8164 - DNA, 1617 bp, Glycine max
  misc_feature (1)..(1617): Ceres Seq. ID no. 13582497
aacacctagaacatcctttccgaaaaaattagtgaataccagtttataaaaacattatggaagcacttatctagaaggcggatgaattatattattaagcttctagcaatcactgctatctcagttttcattcttgagttcctggttaacagcttcactgagaggaagctctatacgtggtgttttttgattgccggggccacagcttcattttatctttttaagtcaattccctggagatctggtataccgatatatgtttgcctagcatgttggtttttgtctcttttcacattgatgccagcagaaattcctgacaataatcaattagtagttagtagtggggttattattatcattataggaatagttgcaagatggctagatttgcatgctggtggaaggaagtattggctcagtatatgcaattgcaagttgaaaagttccaaattttcatctctattttacttacaggctcttttggttgctctatcttcagtgatggtgtatttatcaactgttcacagaactgaaaagcgagagttgcttgcatcgcaccaattgataaattggtctgttgctggtttttcaatggtgctcccgctgttctcagaaaatagcctcttatcccgacttacttcgatatttcttggctttgcacctccattccttcttctctccattggatacgaagctatattctatgctgctcttgctcttgtactgatggcttggatactatttgaaaatacaattctcaacttaaatattgtgaataagtcatctgattccactaaaagtgttacaaatcatctcatccatggatctgataatagatctttgcagttatctgatgtgaggattccattggtctttatggttttattcaatgttgctttttttggaacgggaaattttgcaagtattgctagttttgagatttcatctgtctatcggttcattaccatctttagtcccttcctgatggcagcgctactcatcttcaaattatttatacctttcttgcttgtaatatgcgtattcagtgcgattaccaaactaaaccaagttccaaggttgggatgctattttcttgttatattgttctcagacatgatgaccattcacttcttcttcctggttaggaatacaggaagttggatggaaattggaaatagtatcagtcattttggcatcatgagtgcccaagttgtttttgttctattactctttgccctcacaaatacatacacaaaagacatccactgtaactcagcagtatcatcgactcgtaaggcaaattaggtttcaccaaagtcgctctaaacgagctaccttattgccatggaaatgactactcattcttggtgtttgctttgatggttatgaccaacctggattgagaacgggcggcagtgatctggaactcagggaaaggcgagcaaacattgtgcctcaccatgtaaacaaagaactttcatataaactttttccttatattactgcctcttggtagttgatctgtacaggtcctggtcctggccctggcccgggtgatggaatttttgtttgattgtttactgtggtcaacgtaatgttaatgcacttttttcaccc

SEQ ID NO: 8165 - protein, 407 aa, Glycine max
  peptide (1)..(407): Ceres Seq. ID no. 15222748
  misc_feature (198)..(359): Pfam Name: PIG-N Pfam Description: Phosphatidylinositolglycan class N
  misc_feature (198)..(394): NCBI GI NO: 15232100 NR Description: phosphatidylinositolglycan family
  misc_feature (1)..(152): NCBI GI NO: 15232100 NR Description: phosphatidylinositolglycan family
  misc_feature (1)..(391): NCBI GI NO: 7305383 NR Description: phosphatidylinositol glycan, class N
  misc_feature (1)..(391): NCBI GI NO: 11360029 NR Description: hypothetical protein DKFZp434H0711
  misc_feature (1)..(391): NCBI GI NO: 6912500 NR Description: phosphatidylinositol glycan, class N
  misc_feature (1)..(391): NCBI GI NO: 20306653 NR Description: phosphatidylinositol glycan, class N
  misc_feature (130)..(394): NCBI GI NO: 40742505 NR Description: hypothetical protein AN7049.2
  misc_feature (4)..(383): NCBI GI NO: 19112040 NR Description: hypothetical protein [Schizosaccharomyces pombe]
  misc_feature (3)..(383): NCBI GI NO: 7505854 NR Description: hypothetical protein M01B12
  misc_feature (3)..(383): NCBI GI NO: 25143729 NR Description: Putative plasma membrane membrane protein
MNYIIKLLAITAISVFILEFLVNSFTERKLYTWCFLIAGATASFYLFKSIPWRSGIPIYVCLACWFLSLFTLMPAEIPDNNQLVVSSGVIIIIIGIVARWLDLHAGGRKYWLSICNCKLKSSKFSSLFYLQALLVALSSVMVYLSTVHRTEKRELLASHQLINWSVAGFSMVLPLFSENSLLSRLTSIFLGFAPPFLLLSIGYEAIFYAALALVLMAWILFENTILNLNIVNKSSDSTKSVTNHLIHGSDNRSLQLSDVRIPLVFMVLFNVAFFGTGNFASIASFEISSVYRFITIFSPFLMAALLIFKLFIPFLLVICVFSAITKLNQVPRLGCYFLVILFSDMMTIHFFFLVRNTGSWMEIGNSISHFGIMSAQVVFVLLLFALTNTYTKDIHCNSAVSSTRKAN

SEQ ID NO: 8166 - protein, 335 aa, Glycine max
  peptide (1)..(335): Ceres Seq. ID no. 15222749
  misc_feature (126)..(287): Pfam Name: PIG-N Pfam Description: Phosphatidylinositolglycan class N
  misc_feature (126)..(322): NCBI GI NO: 15232100 NR Description: phosphatidylinositolglycan family
  misc_feature (1)..(80): NCBI GI NO: 15232100 NR Description: phosphatidylinositolglycan family
  misc_feature (1)..(319): NCBI GI NO: 7305383 NR Description: phosphatidylinositol glycan, class N
  misc_feature (1)..(319): NCBI GI NO: 11360029 NR Description: hypothetical protein DKFZp434H0711
  misc_feature (1)..(319): NCBI GI NO: 6912500 NR Description: phosphatidylinositol glycan, class N
  misc_feature (1)..(319): NCBI GI NO: 20306653 NR Description: phosphatidylinositol glycan, class N
  misc_feature (58)..(322): NCBI GI NO: 40742505 NR Description: hypothetical protein AN7049.2
  misc_feature (1)..(311): NCBI GI NO: 19112040 NR Description: hypothetical protein [Schizosaccharomyces pombe]
  misc_feature (1)..(311): NCBI GI NO: 7505854 NR Description: hypothetical protein M01B12
  misc_feature (1)..(311): NCBI GI NO: 25143729 NR Description: Putative plasma membrane membrane protein
MPAEIPDNNQLVVSSGVIIIIIGIVARWLDLHAGGRKYWLSICNCKLKSSKFSSLFYLQALLVALSSVMVYLSTVHRTEKRELLASHQLINWSVAGFSMVLPLFSENSLLSRLTSIFLGFAPPFLLLSIGYEAIFYAALALVLMAWILFENTILNLNIVNKSSDSTKSVTNHLIHGSDNRSLQLSDVRIPLVFMVLFNVAFFGTGNFASIASFEISSVYRFITIFSPFLMAALLIFKLFIPFLLVICVFSAITKLNQVPRLGCYFLVILFSDMMTIHFFFLVRNTGSWMEIGNSISHFGIMSAQVVFVLLLFALTNTYTKDIHCNSAVSSTRKAN

SEQ ID NO: 8167 - protein, 267 aa, Glycine max
  peptide (1)..(267): Ceres Seq. ID no. 15222750
  misc_feature (58)..(219): Pfam Name: PIG-N Pfam Description: Phosphatidylinositolglycan class N
  misc_feature (58)..(254): NCBI GI NO: 15232100 NR Description: phosphatidylinositolglycan family
  misc_feature (1)..(12): NCBI GI NO: 15232100 NR Description: phosphatidylinositolglycan family
  misc_feature (1)..(251): NCBI GI NO: 7305383 NR Description: phosphatidylinositol glycan, class N
  misc_feature (1)..(251): NCBI GI NO: 11360029 NR Description: hypothetical protein DKFZp434H0711
  misc_feature (1)..(251): NCBI GI NO: 6912500 NR Description: phosphatidylinositol glycan, class N
  misc_feature (1)..(251): NCBI GI NO: 20306653 NR Description: phosphatidylinositol glycan, class N
  misc_feature (1)..(254): NCBI GI NO: 40742505 NR Description: hypothetical protein AN7049.2
  misc_feature (1)..(243): NCBI GI NO: 19112040 NR Description: hypothetical protein [Schizosaccharomyces pombe]
  misc_feature (1)..(243): NCBI GI NO: 7505854 NR Description: hypothetical protein M01B12
  misc_feature (1)..(243): NCBI GI NO: 25143729 NR Description: Putative plasma membrane membrane protein
MVYLSTVHRTEKRELLASHQLINWSVAGFSMVLPLFSENSLLSRLTSIFLGFAPPFLLLSIGYEAIFYAALALVLMAWILFENTILNLNIVNKSSDSTKSVTNHLIHGSDNRSLQLSDVRIPLVFMVLFNVAFFGTGNFASIASFEISSVYRFITIFSPFLMAALLIFKLFIPFLLVICVFSAITKLNQVPRLGCYFLVILFSDMMTIHFFFLVRNTGSWMEIGNSISHFGIMSAQVVFVLLLFALTNTYTKDIHCNSAVSSTRKAN

SEQ ID NO: 8168 - DNA, 1102 bp, Glycine max
  misc_feature (1)..(1102): Ceres Seq. ID no. 14312886
agaaagcggagacacattgataaataataaaaaaaaggcgggaaagaaagggtgggtcaaaattttgagagccacacccagctttgaatcctccaacaaaatctccgttccgggtttttgcaatcgggagagtgcgagagagacaatacactacacggttgctgcattattgctttcagaggaactcattgcagtcattgattgtaagcaatggaaaaaatgcctgaacaaggtgccaatgcatcattattgccttctaatggaattggatccaggttctccaatttgaacaagtctttcaaatattctcttagatctttgctcacttcatgctcaaaggaggaattttataaagcattttcaagtttctctaacattgaaaaggaattgctccatcgcctatttcttcaggtcattacttcgttgcatgaaaacttagaggatgggtttgagactgtctgtcttcaaacacaggcaggagctactcttgatgctgtggagaaaattgtagaagaacaagatctggatgtcttgttttcagataggagtaacataatggatgttgctgagaatctgtctatggcaaagaagaatgaaatccaacacttaaagcatatggttcaattgggagaggaacataatcaaatgttgcgcacccgactacaactccttaaggaaggcaatcaagtattgtctggtgcctcacaagctgttgagaagttcaaaagcatgaatttaaattatggggcaaacagcggcgatgagatccatgatgtataacatgtcttgctcatgctctcctgcaaattgactaaggttcattctgtggtgaatcattcccatgcttttatgttgtagcaatgcttctaaagattatattaattcacgagtaaatctacatcttagtccttgatattaaagtgtcatgtattttagaagctaagattttagaaatcgtgtattagttcctgaatttttaaaacaccaagtgaatgttaaacattgtatgagtgactttcgttcttttaaatgagccttctgggtcatcctttcaaacactttcataactgattggatcatgcatcatgaactagatattttc

SEQ ID NO: 8169 - protein, 189 aa, Glycine max
  peptide (1)..(189): Ceres Seq. ID no. 14312887
  misc_feature (20)..(173): NCBI GI NO: 18415295 NR Description: expressed protein [Arabidopsis thaliana]
  misc_feature (15)..(175): NCBI GI NO: 34905298 NR Description: P0577B11.20
  misc_feature (52)..(173): NCBI GI NO: 7487713 NR Description: hypothetical protein T5K18
MEKMPEQGANASLLPSNGIGSRFSNLNKSFKYSLRSLLTSCSKEEFYKAFSSFSNIEKELLHRLFLQVITSLHENLEDGFETVCLQTQAGATLDAVEKIVEEQDLDVLFSDRSNIMDVAENLSMAKKNEIQHLKHMVQLGEEHNQMLRTRLQLLKEGNQVLSGASQAVEKFKSMNLNYGANSGDEIHDV

SEQ ID NO: 8170 - protein, 186 aa, Glycine max
  peptide (1)..(186): Ceres Seq. ID no. 14312888
  misc_feature (17)..(170): NCBI GI NO: 18415295 NR Description: expressed protein [Arabidopsis thaliana]
  misc_feature (12)..(172): NCBI GI NO: 34905298 NR Description: P0577B11.20
  misc_feature (49)..(170): NCBI GI NO: 7487713 NR Description: hypothetical protein T5K18
MPEQGANASLLPSNGIGSRFSNLNKSFKYSLRSLLTSCSKEEFYKAFSSFSNIEKELLHRLFLQVITSLHENLEDGFETVCLQTQAGATLDAVEKIVEEQDLDVLFSDRSNIMDVAENLSMAKKNEIQHLKHMVQLGEEHNQMLRTRLQLLKEGNQVLSGASQAVEKFKSMNLNYGANSGDEIHDV

SEQ ID NO: 8171 - protein, 95 aa, Glycine max
  peptide (1)..(95): Ceres Seq. ID no. 14312889
ESGDTLINNKKKAGKKGWVKILRATPSFESSNKISVPGFCNRESARETIHYTVAALLLSEELIAVIDCKQWKKCLNKVPMHHYCLLMELDPGSPI

SEQ ID NO: 8172 - DNA, 941 bp, Glycine max
  misc_feature (1)..(941): Ceres Seq. ID no. 14312901
aaaaaaaaacatggaaaggatatagattatagaatacagaggcaccgacgtagcgacggtcaaggtccacaatccacaatccgcaaccgaataacccactacccacagatttctctctctctctctctgttggattggatcctaatatctgtgttccactttcagaggttgctccttcattcacgcccttgctctcttcaaatctattttcttcctctgctctatctatctcttgttatttttccctctcacgccaatcaccatgccttctccttcagatcaccaccgcccccaaccaaaacctaatcccaacctcctttctctgttcctcaaaccaatcatcatgctccttctcacctccctcttcttcctcttcctcggcttcgctgccttcctcctcctcaacctcttcctcctcggcggcgccttccaccgccttcgcttccgcccctccgttaccaccgcacccacctcctccaacggcctcccccctcgcgaaatcaacaagctcccccgctttcgtgtcgccaatggatccgagacccgacccgactccaattgcgtcgtctgcctggacgcattccataacgcccaatggtgccgaaagcttgctgcgtgcgggcacgtgtttcaccgcaggtgcgtcgacacgtggctccttaaggtcgccgcatgccccacgtgccgcacacccgtgggattcaatgccggtgctacggtacatgacccgcctcagcggtctgaccatttgcatacctgcggaactgactccaatgctctcaccacccttttatagcttgtaagttttcgtttttaagcctttcccaaaccatgtaaggatatcaagtaattgtttttttaatctatgtatatgaattgtagcaatagttttttctcccatttcgacgactattgggaagaaatgaaccaacttaattcac

SEQ ID NO: 8173 - protein, 177 aa, Glycine max
  peptide (1)..(177): Ceres Seq. ID no. 14312902
  misc_feature (100)..(141): Pfam Name: RING finger Pfam Description: Zinc finger, C3HC4 type
  misc_feature (1)..(145): NCBI GI NO: 21617980 NR Description: putative RING zinc finger protein
  misc_feature (2)..(145): NCBI GI NO: 15224210 NR Description: zinc finger
  misc_feature (2)..(145): NCBI GI NO: 15234713 NR Description: zinc finger
  misc_feature (10)..(170): NCBI GI NO: 15226289 NR Description: zinc finger
  misc_feature (5)..(145): NCBI GI NO: 15227929 NR Description: RING zinc finger protein -related
  misc_feature (70)..(145): NCBI GI NO: 29367571 NR Description: unknown [Oryza sativa (japonica cultivar-group)]
  misc_feature (70)..(145): NCBI GI NO: 33146607 NR Description: putative NEP1-interacting protein 2
  misc_feature (26)..(148): NCBI GI NO: 15238323 NR Description: zinc finger
  misc_feature (26)..(148): NCBI GI NO: 21593762 NR Description: unknown [Arabidopsis thaliana]
  misc_feature (73)..(145): NCBI GI NO: 23490777 NR Description: 23281-24001-related [Plasmodium yoelii yoelii]
MPSPSDHHRPQPKPNPNLLSLFLKPIIMLLLTSLFFLFLGFAAFLLLNLFLLGGAFHRLRFRPSVTTAPTSSNGLPPREINKLPRFRVANGSETRPDSNCVVCLDAFHNAQWCRKLAACGHVFHRRCVDTWLLKVAACPTCRTPVGFNAGATVHDPPQRSDHLHTCGTDSNALTTLL

SEQ ID NO: 8174 - protein, 150 aa, Glycine max
  peptide (1)..(150): Ceres Seq. ID no. 14312903
  misc_feature (73)..(114): Pfam Name: RING finger Pfam Description: Zinc finger, C3HC4 type
  misc_feature (1)..(118): NCBI GI NO: 21617980 NR Description: putative RING zinc finger protein
  misc_feature (1)..(118): NCBI GI NO: 15224210 NR Description: zinc finger
  misc_feature (1)..(118): NCBI GI NO: 15234713 NR Description: zinc finger
  misc_feature (1)..(143): NCBI GI NO: 15226289 NR Description: zinc finger
  misc_feature (1)..(118): NCBI GI NO: 15227929 NR Description: RING zinc finger protein -related
  misc_feature (43)..(118): NCBI GI NO: 29367571 NR Description: unknown [Oryza sativa (japonica cultivar-group)]
  misc_feature (43)..(118): NCBI GI NO: 33146607 NR Description: putative NEP1-interacting protein 2
  misc_feature (1)..(121): NCBI GI NO: 15238323 NR Description: zinc finger
  misc_feature (1)..(121): NCBI GI NO: 21593762 NR Description: unknown [Arabidopsis thaliana]
  misc_feature (46)..(118): NCBI GI NO: 23490777 NR Description: 23281-24001-related [Plasmodium yoelii yoelii]
MLLLTSLFFLFLGFAAFLLLNLFLLGGAFHRLRFRPSVTTAPTSSNGLPPREINKLPRFRVANGSETRPDSNCVVCLDAFHNAQWCRKLAACGHVFHRRCVDTWLLKVAACPTCRTPVGFNAGATVHDPPQRSDHLHTCGTDSNALTTLL

SEQ ID NO: 8175 - protein, 101 aa, Glycine max
  peptide (1)..(101): Ceres Seq. ID no. 14312904
KKKHGKDIDYRIQRHRRSDGQGPQSTIRNRITHYPQISLSLSLLDWILISVFHFQRLLLHSRPCSLQIYFLPLLYLSLVIFPSHANHHAFSFRSPPPPTKT

SEQ ID NO: 8176 - DNA, 1006 bp, Glycine max
  misc_feature (1)..(1006): Ceres Seq. ID no. 14315461
acagtatatgcaaacaaagcctccaccaatgtcgctgctgccgccgccgaaacctcaccggagctccggtaactcccctggcgacagcattccagactggatctccgaatcaatcaacggcggctccctccgccgcgtcgacctcaactccggcaccaacggctgggcgtcgccgccaggctccgtgttctccctccgctccgaaagttactttcagaaccgccaaaaatgtcccgccggcgactacctcctctcgccggcgggcatggactggctcaaatccgccgcgaaactcgaccacgtgctctcacgcgcggacaaccgcgtgatgcacgcgctgcgaagatgtcaaaccctaggtcgctccctaaagagcttcgtcttcgcggtgaacctccagatcccgggcgcgaaggagcaccacagcgcggtgttctacttcgcgaccgaggaaccggatccggtccgaaccggttcactcttaaaccggttcgtgcacggcgacgacgcgtttcggaaccagcggttcaagctggtgaaccggatcgcgaaggggccgtggatcgtgaagaaggccgtggggagccacagcgcgtgcttgttagggaaagcgttgaattgcgcttactacaaaggttcgaattacctcgaaattgacgtcgatatcggaagcagcgcgatcgcgaacgcgattctgcacctcgcgttggggtgcgtgacgacggtgacgatcgatatggggtttgtggtggaggcacaggcggaggatgagttgccggagcggttgatcggtgcgattagggtttgccagatggagatggcgtcggccacggtggttgaggcgttgcacgtgccgcgcggggttgggtgggccaaggtgaatcatcataagtctgcggatgagcttgctttggatgattagatatttgtttagtgatagtagtacgaagtttatgatttttttttatattttaattattcttcaatggattttaatttcttgttc

SEQ ID NO: 8177 - protein, 306 aa, Glycine max
  peptide (1)..(306): Ceres Seq. ID no. 14315462
  misc_feature (17)..(300): NCBI GI NO: 15238248 NR Description: expressed protein [Arabidopsis thaliana]
  misc_feature (17)..(300): NCBI GI NO: 22655107 NR Description: putative protein [Arabidopsis thaliana]
  misc_feature (17)..(300): NCBI GI NO: 21592409 NR Description: unknown [Arabidopsis thaliana]
  misc_feature (29)..(280): NCBI GI NO: 15238672 NR Description: expressed protein [Arabidopsis thaliana]
  misc_feature (29)..(302): NCBI GI NO: 15238674 NR Description: hypothetical protein [Arabidopsis thaliana]
  misc_feature (161)..(279): NCBI GI NO: 15238675 NR Description: expressed protein [Arabidopsis thaliana]
  misc_feature (31)..(145): NCBI GI NO: 15238675 NR Description: expressed protein [Arabidopsis thaliana]
  misc_feature (22)..(299): NCBI GI NO: 18390605 NR Description: expressed protein [Arabidopsis thaliana]
  misc_feature (22)..(299): NCBI GI NO: 25406892 NR Description: hypothetical protein
  misc_feature (53)..(299): NCBI GI NO: 21618178 NR Description: unknown [Arabidopsis thaliana]
QYMQTKPPPMSLLPPPKPHRSSGNSPGDSIPDWISESINGGSLRRVDLNSGTNGWASPPGSVFSLRSESYFQNRQKCPAGDYLLSPAGMDWLKSAAKLDHVLSRADNRVMHALRRCQTLGRSLKSFVFAVNLQIPGAKEHHSAVFYFATEEPDPVRTGSLLNRFVHGDDAFRNQRFKLVNRIAKGPWIVKKAVGSHSACLLGKALNCAYYKGSNYLEIDVDIGSSAIANAILHLALGCVTTVTIDMGFVVEAQAEDELPERLIGAIRVCQMEMASATVVEALHVPRGVGWAKVNHHKSADELALDD

SEQ ID NO: 8178 - protein, 304 aa, Glycine max
  peptide (1)..(304): Ceres Seq. ID no. 14315463
  misc_feature (15)..(298): NCBI GI NO: 15238248 NR Description: expressed protein [Arabidopsis thaliana]
  misc_feature (15)..(298): NCBI GI NO: 22655107 NR Description: putative protein [Arabidopsis thaliana]
  misc_feature (15)..(298): NCBI GI NO: 21592409 NR Description: unknown [Arabidopsis thaliana]
  misc_feature (27)..(278): NCBI GI NO: 15238672 NR Description: expressed protein [Arabidopsis thaliana]
  misc_feature (27)..(300): NCBI GI NO: 15238674 NR Description: hypothetical protein [Arabidopsis thaliana]
  misc_feature (159)..(277): NCBI GI NO: 15238675 NR Description: expressed protein [Arabidopsis thaliana]
  misc_feature (29)..(143): NCBI GI NO: 15238675 NR Description: expressed protein [Arabidopsis thaliana]
  misc_feature (20)..(297): NCBI GI NO: 18390605 NR Description: expressed protein [Arabidopsis thaliana]
  misc_feature (20)..(297): NCBI GI NO: 25406892 NR Description: hypothetical protein
  misc_feature (51)..(297): NCBI GI NO: 21618178 NR Description: unknown [Arabidopsis thaliana]
MQTKPPPMSLLPPPKPHRSSGNSPGDSIPDWISESINGGSLRRVDLNSGTNGWASPPGSVFSLRSESYFQNRQKCPAGDYLLSPAGMDWLKSAAKLDHVLSRADNRVMHALRRCQTLGRSLKSFVFAVNLQIPGAKEHHSAVFYFATEEPDPVRTGSLLNRFVHGDDAFRNQRFKLVNRIAKGPWIVKKAVGSHSACLLGKALNCAYYKGSNYLEIDVDIGSSAIANAILHLALGCVTTVTIDMGFVVEAQAEDELPERLIGAIRVCQMEMASATVVEALHVPRGVGWAKVNHHKSADELALDD

SEQ ID NO: 8179 - protein, 297 aa, Glycine max
  peptide (1)..(297): Ceres Seq. ID no. 14315464
  misc_feature (8)..(291): NCBI GI NO: 15238248 NR Description: expressed protein [Arabidopsis thaliana]
  misc_feature (8)..(291): NCBI GI NO: 22655107 NR Description: putative protein [Arabidopsis thaliana]
  misc_feature (8)..(291): NCBI GI NO: 21592409 NR Description: unknown [Arabidopsis thaliana]
  misc_feature (20)..(271): NCBI GI NO: 15238672 NR Description: expressed protein [Arabidopsis thaliana]
  misc_feature (20)..(293): NCBI GI NO: 15238674 NR Description: hypothetical protein [Arabidopsis thaliana]
  misc_feature (152)..(270): NCBI GI NO: 15238675 NR Description: expressed protein [Arabidopsis thaliana]
  misc_feature (22)..(136): NCBI GI NO: 15238675 NR Description: expressed protein [Arabidopsis thaliana]
  misc_feature (13)..(290): NCBI GI NO: 18390605 NR Description: expressed protein [Arabidopsis thaliana]
  misc_feature (13)..(290): NCBI GI NO: 25406892 NR Description: hypothetical protein
  misc_feature (44)..(290): NCBI GI NO: 21618178 NR Description: unknown [Arabidopsis thaliana]
MSLLPPPKPHRSSGNSPGDSIPDWISESINGGSLRRVDLNSGTNGWASPPGSVFSLRSESYFQNRQKCPAGDYLLSPAGMDWLKSAAKLDHVLSRADNRVMHALRRCQTLGRSLKSFVFAVNLQIPGAKEHHSAVFYFATEEPDPVRTGSLLNRFVHGDDAFRNQRFKLVNRIAKGPWIVKKAVGSHSACLLGKALNCAYYKGSNYLEIDVDIGSSAIANAILHLALGCVTTVTIDMGFVVEAQAEDELPERLIGAIRVCQMEMASATVVEALHVPRGVGWAKVNHHKSADELALDD

SEQ ID NO: 8180 - DNA, 759 bp, Glycine max
  misc_feature (1)..(759): Ceres Seq. ID no. 14302702
aaactcaaagatgtcataaggtcactcaaggtatcatcaataggcatagttatattaatgtgtgatgtgttagaggatatgcgcattggtgaagattgaaattagaagcaagaatgaggagggcatgcaggaaaatatggcgatcggtgccttgcacgagcaggaaaagcttgcgaaatgactctaggaaggacatggaggagattctgagggctaagctttcaactattaaggaagagccagaattgtgtgatgagaacttagcatcaccaagacatgtgtgtatggccaagaaacaagggaagaaggttcaaggaagtattcaacatctcgggagataagtatgtcacatttgatggattagcaagagcatgtgctaaggctggtgggttcccagagccagagatcattcactacaaccctaaagattttgattttgggaaaaagaaatcatttccattccgtgaccagcatttctttgcatcagttgagaaagcaaagagcgtgcttggattggaacctgaatttggacttgtagagggtctagcagactcgtacaacctggactttggtagaggaacatatcggaaagaggctgatttctcaacagatgacataattcttggcaagagtcttgttagcgtataaacttttctatttcaattttaagtatttcacttgtatttagaaaagctgttcggatttgctacattatgaagtcgtgaaatattcatgagcttttcgttcagtattttttcc

SEQ ID NO: 8181 - protein, 123 aa, Glycine max
  peptide (1)..(123): Ceres Seq. ID no. 14302703
  misc_feature (13)..(121): NCBI GI NO: 15217485 NR Description: RNA-binding protein -related
  misc_feature (13)..(121): NCBI GI NO: 17064988 NR Description: g5bf protein [Arabidopsis thaliana]
  misc_feature (13)..(121): NCBI GI NO: 25454619 NR Description: hypothetical protein g5bf
  misc_feature (13)..(121): NCBI GI NO: 25456171 NR Description: probable RNA binding protein
  misc_feature (13)..(121): NCBI GI NO: 21593201 NR Description: putative RNA-binding protein
  misc_feature (7)..(116): NCBI GI NO: 34398360 NR Description: 38 kDa ribosome-associated protein precursor
  misc_feature (14)..(116): NCBI GI NO: 17232323 NR Description: mRNA-binding protein [Nostoc sp. PCC 7120]
  misc_feature (14)..(119): NCBI GI NO: 16330056 NR Description: hypothetical protein [Synechocystis sp. PCC 6803]
  misc_feature (14)..(116): NCBI GI NO: 23040971 NR Description: hypothetical protein
  misc_feature (14)..(116): NCBI GI NO: 23128166 NR Description: hypothetical protein [Nostoc punctiforme]
MCVWPRNKGRRFKEVFNISGDKYVTFDGLARACAKAGGFPEPEIIHYNPKDFDFGKKKSFPFRDQHFFASVEKAKSVLGLEPEFGLVEGLADSYNLDFGRGTYRKEADFSTDDIILGKSLVSV

SEQ ID NO: 8182 - protein, 75 aa, Glycine max
  peptide (1)..(75): Ceres Seq. ID no. 14302704
MRRACRKIWRSVPCTSRKSLRNDSRKDMEEILRAKLSTIKEEPELCDENLASPRHVCMAKKQGKKVQGSIQHLGR

SEQ ID NO: 8183 - DNA, 951 bp, Glycine max
  misc_feature (1)..(951): Ceres Seq. ID no. 14315076
aaagaaaccaaagtctatttttttttttgtttctgagcctcccctcccctctctctaagatccccaaattgcttgtgaatgctagaaaccctagacagattcgattggatgcgctcccatttcacatcaagggcgagcgcattcggttcttgcaagcaagcctggtactaccgctgcctcggcctcgacccctgaatttgaaccattcatcaccacctttcttcattcattcacggttttccttttcgactcgatttgttgttttttttgttttgtttccttgacgatgttgacgatgagcaagcagaagaagaaccagaacgcgaagaggctgttgataagcatcaatgtgctggggagcgcggggcccattaggttcgtggtgaacgaggaggagcttgtggcggcggtcatcgacaccgcacttaagtcctacgcgcgtgagggcaggcttcccgtcctgggaaacaacaccaccggtttcgtgctttattgcccccatcttggatctgatgctttgagtccttgggagagaattggatcacatggggtgaggaatttcgtgctgtttaagaagccagagggtgtggcggatgtagatggaagtacagcactttctcgcagcagcagggggagtgggagctggaaggcttggttcaacaagtccctcaacctcaagatttctacccactaatgaataaatctctcggggaattgaacatgatgccttttgtggtgaatgccactaataatatccataatacgtagtatttcttttggttgtttttgttctcgctagccagagaaccctctctttaggaaattgttcaactttgacatttaggttttgattttgatggaatacaataagttttgattcctcacttccttgccattttttattcaattaaattaaacttaagatggtgaatgtgagctaatattccaagt

SEQ ID NO: 8184 - protein, 135 aa, Glycine max
  peptide (1)..(135): Ceres Seq. ID no. 14315077
  misc_feature (1)..(135): NCBI GI NO: 13359433 NR Description: putative senescence-associated protein
  misc_feature (1)..(135): NCBI GI NO: 18409673 NR Description: expressed protein [Arabidopsis thaliana]
  misc_feature (7)..(135): NCBI GI NO: 15220659 NR Description: expressed protein [Arabidopsis thaliana]
  misc_feature (1)..(119): NCBI GI NO: 16226338 NR Description: At1g70780/F5A18_4 [Arabidopsis thaliana]
  misc_feature (7)..(135): NCBI GI NO: 25372856 NR Description: T26J12.8 protein - Arabidopsis thaliana
  misc_feature (9)..(121): NCBI GI NO: 15240321 NR Description: expressed protein [Arabidopsis thaliana]
  misc_feature (9)..(121): NCBI GI NO: 21553538 NR Description: unknown [Arabidopsis thaliana]
  misc_feature (9)..(60): NCBI GI NO: 9757983 NR Description: gb|AAC00605
  misc_feature (15)..(114): NCBI GI NO: 10279678 NR Description: hypothetical protein [Catharanthus roseus]
MLTMSKQKKNQNAKRLLISINVLGSAGPIRFVVNEEELVAAVIDTALKSYAREGRLPVLGNNTTGFVLYCPHLGSDALSPWERIGSHGVRNFVLFKKPEGVADVDGSTALSRSSRGSGSWKAWFNKSLNLKISTH

SEQ ID NO: 8185 - protein, 132 aa, Glycine max
  peptide (1)..(132): Ceres Seq. ID no. 14315078
  misc_feature (1)..(132): NCBI GI NO: 13359433 NR Description: putative senescence-associated protein
  misc_feature (1)..(132): NCBI GI NO: 18409673 NR Description: expressed protein [Arabidopsis thaliana]
  misc_feature (4)..(132): NCBI GI NO: 15220659 NR Description: expressed protein [Arabidopsis thaliana]
  misc_feature (1)..(116): NCBI GI NO: 16226338 NR Description: At1g70780/F5A18_4 [Arabidopsis thaliana]
  misc_feature (4)..(132): NCBI GI NO: 25372856 NR Description: T26J12.8 protein - Arabidopsis thaliana
  misc_feature (6)..(118): NCBI GI NO: 15240321 NR Description: expressed protein [Arabidopsis thaliana]
  misc_feature (6)..(118): NCBI GI NO: 21553538 NR Description: unknown [Arabidopsis thaliana]
  misc_feature (6)..(57): NCBI GI NO: 9757983 NR Description: gb|AAC00605
  misc_feature (12)..(111): NCBI GI NO: 10279678 NR Description: hypothetical protein [Catharanthus roseus]
MSKQKKNQNAKRLLISINVLGSAGPIRFVVNEEELVAAVIDTALKSYAREGRLPVLGNNTTGFVLYCPHLGSDALSPWERIGSHGVRNFVLFKKPEGVADVDGSTALSRSSRGSGSWKAWFNKSLNLKISTH

SEQ ID NO: 8186 - protein, 93 aa, Glycine max
  peptide (1)..(93): Ceres Seq. ID no. 14315079
RNQSLFFFLFLSLPSPLSKIPKLLVNARNPRQIRLDALPFHIKGERIRFLQASLVLPLPRPRPLNLNHSSPPFFIHSRFSFSTRFVVFFVLFP

SEQ ID NO: 8187 - DNA, 1311 bp, Glycine max
  misc_feature (1)..(1311): Ceres Seq. ID no. 14315440
attcaaaacctcttccccttctcatctatcctcctcctaaaaattggtcaaaatctatccaatctctttgcatattccttcttatcatcatcttcttcttcttctctgttgcctctagaattgaaaagttcttcttcctgcccatagtctttgacacccttttccaacctctagattttttcttccctctataattatctccttcacagaaaccttcttatcccacatatcatcaattaccttgttcctctcaaagtttgattctttttctcttgaattggattgttataatttttgttcatacttacatgttatgcagttatgaatgattgagagacaacacaaatgtcttctccagtgatctccgagatcctcctctctggcttcaccataaactcttccctaagacgcaggacacacttggtgcaatctttctctgttgttttcctccactggttctacgttttctcatgaactaaataaattaacctcgtacatagtataaacatagtacgtaccagtgttcttttttcaaattcaatcattaaacctagctagcagattagggttattattgttcaaatagcagactactgcatggcttctcctggtggaagtggaacctattcatctggttccagttctcttcaaaactctggttctgaaggagacagagacatcatggaacagaggaagaggaagagaatgttgtccaatagggaatcggcacgtagatcgaggataaggaaacagcagcacctggaaggtctgagtgcccaattggatcagcttaaaaaggagaacgcacaaatcaacacaaacataagcatcacgacgcagatgtacctcaacgtggaagctgagaacgcgattctgagggctcaaatgggggaactgagcaacagattgaactctctgaacgaaatgataagtttcattaactccaccaacaacaactgcttgatgatgttcgatgaggcacaggagacgaccactcagttgttcaatgattgtggcttcatggattatgcttggaatggaataccaatcatggcttccgctgacaatgaaatgttgatcatgtattgatcttgagttgtagcacaacacccacgtcttctcttgttttaattttttttttttttttttattgtaatagtgatgtctattgttttcagtttatgttatgtttagggttgtcttgtcttgtgcgtatttcaagagggggattcttttttcttctcgaaaatgtaaaatatcgaccttttattttccagatagtgattttcgttcatttccactttttatttt

SEQ ID NO: 8188 - protein, 163 aa, Glycine max
  peptide (1)..(163): Ceres Seq. ID no. 14315441
  misc_feature (28)..(92): Pfam Name: Pfam Description:  bZIP transcription factor
  misc_feature (1)..(154): NCBI GI NO: 24460973 NR Description: bZIP transcription factor [Capsicum chinense]
  misc_feature (1)..(154): NCBI GI NO: 4457221 NR Description: putative bZIP DNA-binding protein
  misc_feature (1)..(130): NCBI GI NO: 16580130 NR Description: bZIP transcription factor BZI-2
  misc_feature (7)..(156): NCBI GI NO: 22597162 NR Description: bZIP transcription factor ATB2 [Glycine max]
  misc_feature (11)..(156): NCBI GI NO: 15236153 NR Description: bZIP family transcription factor
  misc_feature (1)..(117): NCBI GI NO: 9650828 NR Description: common plant regulatory factor 7
  misc_feature (11)..(120): NCBI GI NO: 1769891 NR Description: bZIP transcription factor [Arabidopsis thaliana]
  misc_feature (7)..(155): NCBI GI NO: 15222223 NR Description: bZIP transcription factor ATB2, putative
  misc_feature (1)..(116): NCBI GI NO: 10443481 NR Description: transcription factor GBF5 [Arabidopsis thaliana]
  misc_feature (1)..(116): NCBI GI NO: 15224118 NR Description: bZIP family transcription factor
MASPGGSGTYSSGSSSLQNSGSEGDRDIMEQRKRKRMLSNRESARRSRIRKQQHLEGLSAQLDQLKKENAQINTNISITTQMYLNVEAENAILRAQMGELSNRLNSLNEMISFINSTNNNCLMMFDEAQETTTQLFNDCGFMDYAWNGIPIMASADNEMLIMY

SEQ ID NO: 8189 - protein, 135 aa, Glycine max
  peptide (1)..(135): Ceres Seq. ID no. 14315442
  misc_feature (1)..(64): Pfam Name: Pfam Description:  bZIP transcription factor
  misc_feature (1)..(126): NCBI GI NO: 24460973 NR Description: bZIP transcription factor [Capsicum chinense]
  misc_feature (1)..(126): NCBI GI NO: 4457221 NR Description: putative bZIP DNA-binding protein
  misc_feature (1)..(102): NCBI GI NO: 16580130 NR Description: bZIP transcription factor BZI-2
  misc_feature (1)..(128): NCBI GI NO: 22597162 NR Description: bZIP transcription factor ATB2 [Glycine max]
  misc_feature (1)..(128): NCBI GI NO: 15236153 NR Description: bZIP family transcription factor
  misc_feature (1)..(89): NCBI GI NO: 9650828 NR Description: common plant regulatory factor 7
  misc_feature (1)..(92): NCBI GI NO: 1769891 NR Description: bZIP transcription factor [Arabidopsis thaliana]
  misc_feature (1)..(127): NCBI GI NO: 15222223 NR Description: bZIP transcription factor ATB2, putative
  misc_feature (1)..(88): NCBI GI NO: 10443481 NR Description: transcription factor GBF5 [Arabidopsis thaliana]
  misc_feature (1)..(88): NCBI GI NO: 15224118 NR Description: bZIP family transcription factor
MEQRKRKRMLSNRESARRSRIRKQQHLEGLSAQLDQLKKENAQINTNISITTQMYLNVEAENAILRAQMGELSNRLNSLNEMISFINSTNNNCLMMFDEAQETTTQLFNDCGFMDYAWNGIPIMASADNEMLIMY

SEQ ID NO: 8190 - protein, 127 aa, Glycine max
  peptide (1)..(127): Ceres Seq. ID no. 14315443
  misc_feature (1)..(56): Pfam Name: Pfam Description:  bZIP transcription factor
  misc_feature (1)..(118): NCBI GI NO: 24460973 NR Description: bZIP transcription factor [Capsicum chinense]
  misc_feature (1)..(118): NCBI GI NO: 4457221 NR Description: putative bZIP DNA-binding protein
  misc_feature (1)..(94): NCBI GI NO: 16580130 NR Description: bZIP transcription factor BZI-2
  misc_feature (1)..(120): NCBI GI NO: 22597162 NR Description: bZIP transcription factor ATB2 [Glycine max]
  misc_feature (1)..(120): NCBI GI NO: 15236153 NR Description: bZIP family transcription factor
  misc_feature (1)..(81): NCBI GI NO: 9650828 NR Description: common plant regulatory factor 7
  misc_feature (1)..(84): NCBI GI NO: 1769891 NR Description: bZIP transcription factor [Arabidopsis thaliana]
  misc_feature (1)..(119): NCBI GI NO: 15222223 NR Description: bZIP transcription factor ATB2, putative
  misc_feature (1)..(80): NCBI GI NO: 10443481 NR Description: transcription factor GBF5 [Arabidopsis thaliana]
  misc_feature (1)..(80): NCBI GI NO: 15224118 NR Description: bZIP family transcription factor
MLSNRESARRSRIRKQQHLEGLSAQLDQLKKENAQINTNISITTQMYLNVEAENAILRAQMGELSNRLNSLNEMISFINSTNNNCLMMFDEAQETTTQLFNDCGFMDYAWNGIPIMASADNEMLIMY

SEQ ID NO: 8191 - DNA, 1149 bp, Glycine max
  misc_feature (1)..(1149): Ceres Seq. ID no. 14316316
atattcctttcttttttgtttcctcaaaataaaaaataaaactttttattatctgcaggttttgcatttgtgtttctgatttttgtgtacctaatcccaatccgtttcttttcaatcttctcttcgaccccatttcctagatctgcttgtttcttccatcatcaactaatcatggttcttcacagagaactcgatcatctcttttcatcccctttcgttgaccctcccaaagatgatgcgaaatccagtggcatgtcaattgaaaagaagattgagttcctcgagagtttgactggaaaggtcacaaatcggaggtctcggaggtggttaaatgatcgtctcttgatggaactagtaccacgtttaaatgcagaggaaattagaggcttgtttgctccaccaccttggggtgatgaagttccaccttcaacattttccatgacgaacatggaggagtgggacagattcaggaatattgacatggataaagaggttaatataatccattccctggaaaactctatagaaaagaggaaaggtcacattgatgctgacaagatggcagtgttgaatggttggcatagaatcgattgtagaacaagagatgcgcttcgccgtagttgtctttctgagctcattgagggttatgaggaatgtgtacgagctttcataacagaaagcacagatggagatattcttgaactacaaattcaggatccttttcatagattgttactgcatggagtttgtgagttctacaatctggcgtcggatacagtgtcaggttataatggcgtggagtcgtcaaggattacaaagataaagaggaagaaaaagggttctcctgtgctcccaaatatcaccctgtcccattttctgaagatgtccaaggaaggaagttggtagtttcttcaggcagtgttgttcatacaataaaactgaaccttagtgttgtcccagggtgaacaatgtgcaatatttcgtatttattcagaatatcactgtaaattagttcgatgacctgtattttaattggtttataccatcggtctacgcaagttgttgattgttggtttacattgttgtagctgattattctgattttaacaaatactatatcttaaggttgaattttcagaagatctatac

SEQ ID NO: 8192 - protein, 244 aa, Glycine max
  peptide (1)..(244): Ceres Seq. ID no. 14316317
  misc_feature (13)..(244): NCBI GI NO: 18379075 NR Description: expressed protein [Arabidopsis thaliana]
  misc_feature (13)..(197): NCBI GI NO: 25372999 NR Description: hypothetical protein F15K9.15
MVLHRELDHLFSSPFVDPPKDDAKSSGMSIEKKIEFLESLTGKVTNRRSRRWLNDRLLMELVPRLNAEEIRGLFAPPPWGDEVPPSTFSMTNMEEWDRFRNIDMDKEVNIIHSLENSIEKRKGHIDADKMAVLNGWHRIDCRTRDALRRSCLSELIEGYEECVRAFITESTDGDILELQIQDPFHRLLLHGVCEFYNLASDTVSGYNGVESSRITKIKRKKKGSPVLPNITLSHFLKMSKEGSW

SEQ ID NO: 8193 - protein, 217 aa, Glycine max
  peptide (1)..(217): Ceres Seq. ID no. 14316318
  misc_feature (1)..(217): NCBI GI NO: 18379075 NR Description: expressed protein [Arabidopsis thaliana]
  misc_feature (1)..(170): NCBI GI NO: 25372999 NR Description: hypothetical protein F15K9.15
MSIEKKIEFLESLTGKVTNRRSRRWLNDRLLMELVPRLNAEEIRGLFAPPPWGDEVPPSTFSMTNMEEWDRFRNIDMDKEVNIIHSLENSIEKRKGHIDADKMAVLNGWHRIDCRTRDALRRSCLSELIEGYEECVRAFITESTDGDILELQIQDPFHRLLLHGVCEFYNLASDTVSGYNGVESSRITKIKRKKKGSPVLPNITLSHFLKMSKEGSW

SEQ ID NO: 8194 - protein, 186 aa, Glycine max
  peptide (1)..(186): Ceres Seq. ID no. 14316319
  misc_feature (1)..(186): NCBI GI NO: 18379075 NR Description: expressed protein [Arabidopsis thaliana]
  misc_feature (1)..(139): NCBI GI NO: 25372999 NR Description: hypothetical protein F15K9.15
MELVPRLNAEEIRGLFAPPPWGDEVPPSTFSMTNMEEWDRFRNIDMDKEVNIIHSLENSIEKRKGHIDADKMAVLNGWHRIDCRTRDALRRSCLSELIEGYEECVRAFITESTDGDILELQIQDPFHRLLLHGVCEFYNLASDTVSGYNGVESSRITKIKRKKKGSPVLPNITLSHFLKMSKEGSW

SEQ ID NO: 8195 - DNA, 1341 bp, Glycine max
  misc_feature (1)..(1341): Ceres Seq. ID no. 14315469
gaaattttccggaaatagaaaacataatttctctctctgtgttgggtgtgtctctgtttctctctctctctccgttgttgttgttgatccatggaagaggaacttcagaacccagaagaaagttgaaacctttgggctaaactccgatacccaattggctgaaagctccaatgcggtgttgttggaggaggagaccctccttgaagaaggaaaatcgtggatctgatgatggtggggacatgggtgatgaagatggtttcaggtggttgtagggttgttgtggggggcaacgatccggtggtggtgcggcagcagcatagacgacgatgcagcttcacttctcgcctagcatgagaagcatcacgatatcgagcaaaaatgggtttattgacttgatgaagatcaaggtcgcagcttgccacatttcctatcgaaccctcttccacaccatcctcatcctcgctttcttgttgccctttgtctttattctcactgctcttgttacccttgaaggtgtcaacaagtgctcctcattcgattgtttaggtaggcggttgggaccaaagcttcttggtagggttgatgatccggcgcagagactagttagagatttttacaatatccttaacgaagtaaagactagggaaattccatctgctctagagcttccggattcatttgatcaactggtttctgatatgaagagcaatcaatatgatgcgaaaacgtttgcattcatgttaaggggaatgatgcagaaatttgagagagaaatcagagaatctaaattttcagagctgatgaataaacattttgcagcaagttcagttcctaaagggattcattgtctgtctttgcgtttgactgatgaatattcgtcaaatgcccatgcacgcaaacaactgcctcctccagaattactacctacactgtctgacaactcttaccatcattttattgtttcaacggataacatcttggctgcttcggtagttgttacttctactgtgcagtcatctcagaaacctgagaatatagtcttccatgtcatcactgacaaaaaaacttatgctggtatgcactcatggtttgctctaaatccagccactcctgctatagttgaggtcagaggcattcaccagtttgactggttgacgagagaaaatgttccagtacttgaagcagtagaaaatcaaaatgggatcaggaatgataactggggttattgatttttcaattagcaaaatgtcaggttgatgttgttctggctggtttaataataactacattgatttctttgtaactcggttctctttttcagttcaaaggatcttatatatg

SEQ ID NO: 8196 - protein, 300 aa, Glycine max
  peptide (1)..(300): Ceres Seq. ID no. 14315470
  misc_feature (1)..(295): NCBI GI NO: 30678270 NR Description: glycosyltransferase family 8
  misc_feature (1)..(295): NCBI GI NO: 30685369 NR Description: glycosyltransferase family 8
  misc_feature (1)..(295): NCBI GI NO: 11358133 NR Description: hypothetical protein T20K14_80 - Arabidopsisthaliana
  misc_feature (24)..(295): NCBI GI NO: 6714484 NR Description: unknown protein [Arabidopsis thaliana]
  misc_feature (1)..(295): NCBI GI NO: 15239707 NR Description: glycosyltransferase family 8
  misc_feature (28)..(288): NCBI GI NO: 22331857 NR Description: glycosyltransferase family 8
  misc_feature (28)..(288): NCBI GI NO: 11358146 NR Description: hypothetical protein T20N10
  misc_feature (109)..(275): NCBI GI NO: 34910786 NR Description: P0042A10.22
  misc_feature (76)..(293): NCBI GI NO: 38423965 NR Description: putative glycosyltransferase
  misc_feature (90)..(289): NCBI GI NO: 14517362 NR Description: AT3g61130/T20K12_30 [Arabidopsis thaliana]
MQLHFSPSMRSITISSKNGFIDLMKIKVAACHISYRTLFHTILILAFLLPFVFILTALVTLEGVNKCSSFDCLGRRLGPKLLGRVDDPAQRLVRDFYNILNEVKTREIPSALELPDSFDQLVSDMKSNQYDAKTFAFMLRGMMQKFEREIRESKFSELMNKHFAASSVPKGIHCLSLRLTDEYSSNAHARKQLPPPELLPTLSDNSYHHFIVSTDNILAASVVVTSTVQSSQKPENIVFHVITDKKTYAGMHSWFALNPATPAIVEVRGIHQFDWLTRENVPVLEAVENQNGIRNDNWGY

SEQ ID NO: 8197 - protein, 292 aa, Glycine max
  peptide (1)..(292): Ceres Seq. ID no. 14315471
  misc_feature (1)..(287): NCBI GI NO: 30678270 NR Description: glycosyltransferase family 8
  misc_feature (1)..(287): NCBI GI NO: 30685369 NR Description: glycosyltransferase family 8
  misc_feature (1)..(287): NCBI GI NO: 11358133 NR Description: hypothetical protein T20K14_80 - Arabidopsisthaliana
  misc_feature (16)..(287): NCBI GI NO: 6714484 NR Description: unknown protein [Arabidopsis thaliana]
  misc_feature (1)..(287): NCBI GI NO: 15239707 NR Description: glycosyltransferase family 8
  misc_feature (20)..(280): NCBI GI NO: 22331857 NR Description: glycosyltransferase family 8
  misc_feature (20)..(280): NCBI GI NO: 11358146 NR Description: hypothetical protein T20N10
  misc_feature (101)..(267): NCBI GI NO: 34910786 NR Description: P0042A10.22
  misc_feature (68)..(285): NCBI GI NO: 38423965 NR Description: putative glycosyltransferase
  misc_feature (82)..(281): NCBI GI NO: 14517362 NR Description: AT3g61130/T20K12_30 [Arabidopsis thaliana]
MRSITISSKNGFIDLMKIKVAACHISYRTLFHTILILAFLLPFVFILTALVTLEGVNKCSSFDCLGRRLGPKLLGRVDDPAQRLVRDFYNILNEVKTREIPSALELPDSFDQLVSDMKSNQYDAKTFAFMLRGMMQKFEREIRESKFSELMNKHFAASSVPKGIHCLSLRLTDEYSSNAHARKQLPPPELLPTLSDNSYHHFIVSTDNILAASVVVTSTVQSSQKPENIVFHVITDKKTYAGMHSWFALNPATPAIVEVRGIHQFDWLTRENVPVLEAVENQNGIRNDNWGY

SEQ ID NO: 8198 - protein, 277 aa, Glycine max
  peptide (1)..(277): Ceres Seq. ID no. 14315472
  misc_feature (1)..(272): NCBI GI NO: 30678270 NR Description: glycosyltransferase family 8
  misc_feature (1)..(272): NCBI GI NO: 30685369 NR Description: glycosyltransferase family 8
  misc_feature (1)..(272): NCBI GI NO: 11358133 NR Description: hypothetical protein T20K14_80 - Arabidopsisthaliana
  misc_feature (1)..(272): NCBI GI NO: 6714484 NR Description: unknown protein [Arabidopsis thaliana]
  misc_feature (1)..(272): NCBI GI NO: 15239707 NR Description: glycosyltransferase family 8
  misc_feature (5)..(265): NCBI GI NO: 22331857 NR Description: glycosyltransferase family 8
  misc_feature (5)..(265): NCBI GI NO: 11358146 NR Description: hypothetical protein T20N10
  misc_feature (86)..(252): NCBI GI NO: 34910786 NR Description: P0042A10.22
  misc_feature (53)..(270): NCBI GI NO: 38423965 NR Description: putative glycosyltransferase
  misc_feature (67)..(266): NCBI GI NO: 14517362 NR Description: AT3g61130/T20K12_30 [Arabidopsis thaliana]
MKIKVAACHISYRTLFHTILILAFLLPFVFILTALVTLEGVNKCSSFDCLGRRLGPKLLGRVDDPAQRLVRDFYNILNEVKTREIPSALELPDSFDQLVSDMKSNQYDAKTFAFMLRGMMQKFEREIRESKFSELMNKHFAASSVPKGIHCLSLRLTDEYSSNAHARKQLPPPELLPTLSDNSYHHFIVSTDNILAASVVVTSTVQSSQKPENIVFHVITDKKTYAGMHSWFALNPATPAIVEVRGIHQFDWLTRENVPVLEAVENQNGIRNDNWGY

SEQ ID NO: 8199 - DNA, 2083 bp, Glycine max
  misc_feature (1)..(2083): Ceres Seq. ID no. 14315473
catacgcgcacactgagtcataacgctaatggactcgttctctttcaccactgttccatagagcaactcaaaaccacacacacaaaaaaacatgaatccccgttttgcccctctctctttctcaatcccttctcttcgaaaaacaccttctctcattggtgctaaccacacctccgctcgcttctgctcccgataaataataccacacaaaaaaaatcccaacttttttttttcttcttcttcttttatttcaattcaattcatttttttttgtgattttttctggttattgttattaatttctgtgagaagtgcacaatttgtttccatggatccaaccgtagcgaagcctggctttctcagaaacgttctggttcggttactcctcttcggcgttttcatcgtcgtcgtacggttcgcttacgtcatcaccctcgccggtgagtcctgcaccgtcggcgacttctgcttcttctctccgtcgatcaacctcgcaatcgccggcaccagatcaggcgccctcgcagcgcgcggaggagccgccgggccgccggagcgctatgccagcaaggactggatcaacggcgtccggttctactcgtcggctttccaggacatgatctccggtggcttcctctcgccggcggcgaaggcgctctgcgtggagacgccgaccggccgcgacgtcctcgcgctgcgcgagatcggcgtcatcgacgccgtcgggatctcgaagaaggcgtctccgccgcttgtgaaatccggcgaggctcgccggattccgttccccgatggctcgttcgacttcgtgttcgccggcgacggcgctttagaaaaatcgccgcggccggcggagttcgccgccgaaatctctcggacgctcaaacccgaagggtttgccgcgttccatgtaaaggccaatgacacttacagttacaattcattcgttgatttgttgaatttttgttgcaacgtggtgaaaataaacgacatgttagggtttgattcatccatacctcacataagagagatcgtggtgaagaaagtgcgtcacacaattgattctgaatccaattcaaactccaattccaatggaaaagaatgctctgttccggagtacaaggaaaagctggtgagaaatgcagaggctttgattgaagaggagccactgaagccatggctgactctaaagaaaaacgtgaagaacataaagtacctatcttcaatggttgatataagcttcaaggataggtatgtgtatgttgatgttggagctagaagctatggttccagcattggacgttggtttaggaaacagtacccgaaacagaacaagacctttcatgtgtatgcaattgaggctgataaaacgtttcatcaggagtatgaaacgaaaaagggtgttactttgttgccttatgctgcatgggtgaggaatgagagtttggtgtttgagattaaccgcgacccgggggagaaggagaaggagaaggagaaggagaaggttaagggtaagggaaggggaatggggaggattcaaccattgaaatcttcaggtggttttgatggtggtgaggttgagaagattcctgggttcgatttcgcagactggttgaagaacacggtttcggagaatgatttcgttgtgatgaagatggatgtggagggtactgagtttgatttgattccaagattgtttgaaactggggctatctgtttggtggatgagatttttcttgagtgccattacaataggtggcagaggtgttgccctggacagaggagccccaagtatgagaaaacttatgatcagtgcttgcagctcttcacttctctcagacaaagtggagttcttgttcatcaatggttttaattaactttgtagaattgcctgatggatgatgggtcaaaccctatatgcatgttcttagcttctgcatgtttcttctttttagttttcttatttttttcccaagccaatagagaagagagagagtgagagtgagagttctttattttttaaaatttctctacttgtaacagttgcaactgaaagtgaaaattaaaaccatccctttacaac

SEQ ID NO: 8200 - protein, 514 aa, Glycine max
  peptide (1)..(514): Ceres Seq. ID no. 14315474
  misc_feature (1)..(514): NCBI GI NO: 15241038 NR Description: expressed protein [Arabidopsis thaliana]
  misc_feature (71)..(514): NCBI GI NO: 34898214 NR Description: P0034A04.18
  misc_feature (10)..(362): NCBI GI NO: 15231806 NR Description: expressed protein [Arabidopsis thaliana]
  misc_feature (423)..(472): NCBI GI NO: 15231806 NR Description: expressed protein [Arabidopsis thaliana]
  misc_feature (78)..(241): NCBI GI NO: 15221752 NR Description: hypothetical protein [Arabidopsis thaliana]
  misc_feature (78)..(241): NCBI GI NO: 25403245 NR Description: protein F21J9.14 [imported] - Arabidopsis thaliana
  misc_feature (78)..(209): NCBI GI NO: 22328908 NR Description: expressed protein [Arabidopsis thaliana]
  misc_feature (78)..(209): NCBI GI NO: 7486528 NR Description: hypothetical protein F6I7
  misc_feature (63)..(161): NCBI GI NO: 19881630 NR Description: Hypothetical protein [Oryza sativa]
  misc_feature (83)..(222): NCBI GI NO: 15236844 NR Description: hypothetical protein [Arabidopsis thaliana]
MDPTVAKPGFLRNVLVRLLLFGVFIVVVRFAYVITLAGESCTVGDFCFFSPSINLAIAGTRSGALAARGGAAGPPERYASKDWINGVRFYSSAFQDMISGGFLSPAAKALCVETPTGRDVLALREIGVIDAVGISKKASPPLVKSGEARRIPFPDGSFDFVFAGDGALEKSPRPAEFAAEISRTLKPEGFAAFHVKANDTYSYNSFVDLLNFCCNVVKINDMLGFDSSIPHIREIVVKKVRHTIDSESNSNSNSNGKECSVPEYKEKLVRNAEALIEEEPLKPWLTLKKNVKNIKYLSSMVDISFKDRYVYVDVGARSYGSSIGRWFRKQYPKQNKTFHVYAIEADKTFHQEYETKKGVTLLPYAAWVRNESLVFEINRDPGEKEKEKEKEKVKGKGRGMGRIQPLKSSGGFDGGEVEKIPGFDFADWLKNTVSENDFVVMKMDVEGTEFDLIPRLFETGAICLVDEIFLECHYNRWQRCCPGQRSPKYEKTYDQCLQLFTSLRQSGVLVHQWF

SEQ ID NO: 8201 - protein, 418 aa, Glycine max
  peptide (1)..(418): Ceres Seq. ID no. 14315475
  misc_feature (1)..(418): NCBI GI NO: 15241038 NR Description: expressed protein [Arabidopsis thaliana]
  misc_feature (1)..(418): NCBI GI NO: 34898214 NR Description: P0034A04.18
  misc_feature (1)..(266): NCBI GI NO: 15231806 NR Description: expressed protein [Arabidopsis thaliana]
  misc_feature (327)..(376): NCBI GI NO: 15231806 NR Description: expressed protein [Arabidopsis thaliana]
  misc_feature (1)..(145): NCBI GI NO: 15221752 NR Description: hypothetical protein [Arabidopsis thaliana]
  misc_feature (1)..(145): NCBI GI NO: 25403245 NR Description: protein F21J9.14 [imported] - Arabidopsis thaliana
  misc_feature (1)..(113): NCBI GI NO: 22328908 NR Description: expressed protein [Arabidopsis thaliana]
  misc_feature (1)..(113): NCBI GI NO: 7486528 NR Description: hypothetical protein F6I7
  misc_feature (1)..(65): NCBI GI NO: 19881630 NR Description: Hypothetical protein [Oryza sativa]
  misc_feature (1)..(126): NCBI GI NO: 15236844 NR Description: hypothetical protein [Arabidopsis thaliana]
MISGGFLSPAAKALCVETPTGRDVLALREIGVIDAVGISKKASPPLVKSGEARRIPFPDGSFDFVFAGDGALEKSPRPAEFAAEISRTLKPEGFAAFHVKANDTYSYNSFVDLLNFCCNVVKINDMLGFDSSIPHIREIVVKKVRHTIDSESNSNSNSNGKECSVPEYKEKLVRNAEALIEEEPLKPWLTLKKNVKNIKYLSSMVDISFKDRYVYVDVGARSYGSSIGRWFRKQYPKQNKTFHVYAIEADKTFHQEYETKKGVTLLPYAAWVRNESLVFEINRDPGEKEKEKEKEKVKGKGRGMGRIQPLKSSGGFDGGEVEKIPGFDFADWLKNTVSENDFVVMKMDVEGTEFDLIPRLFETGAICLVDEIFLECHYNRWQRCCPGQRSPKYEKTYDQCLQLFTSLRQSGVLVHQWF

SEQ ID NO: 8202 - protein, 293 aa, Glycine max
  peptide (1)..(293): Ceres Seq. ID no. 14315476
  misc_feature (1)..(293): NCBI GI NO: 15241038 NR Description: expressed protein [Arabidopsis thaliana]
  misc_feature (1)..(293): NCBI GI NO: 34898214 NR Description: P0034A04.18
  misc_feature (1)..(141): NCBI GI NO: 15231806 NR Description: expressed protein [Arabidopsis thaliana]
  misc_feature (202)..(251): NCBI GI NO: 15231806 NR Description: expressed protein [Arabidopsis thaliana]
  misc_feature (1)..(20): NCBI GI NO: 15221752 NR Description: hypothetical protein [Arabidopsis thaliana]
  misc_feature (1)..(20): NCBI GI NO: 25403245 NR Description: protein F21J9.14 [imported] - Arabidopsis thaliana
MLGFDSSIPHIREIVVKKVRHTIDSESNSNSNSNGKECSVPEYKEKLVRNAEALIEEEPLKPWLTLKKNVKNIKYLSSMVDISFKDRYVYVDVGARSYGSSIGRWFRKQYPKQNKTFHVYAIEADKTFHQEYETKKGVTLLPYAAWVRNESLVFEINRDPGEKEKEKEKEKVKGKGRGMGRIQPLKSSGGFDGGEVEKIPGFDFADWLKNTVSENDFVVMKMDVEGTEFDLIPRLFETGAICLVDEIFLECHYNRWQRCCPGQRSPKYEKTYDQCLQLFTSLRQSGVLVHQWF

SEQ ID NO: 8203 - DNA, 1225 bp, Glycine max
  misc_feature (1)..(1225): Ceres Seq. ID no. 14315477
aaaaaaacgtgtcatgtgcctctctccttttcccccaaaatctgcttcagttcacgttcacgcttcgctacctgcgcctattcattgtctcttctcttcccctgctcaacgtttttcttctcccttcccccacccacctccactcttttcatttctattctcttcccaaacagaacgaccatcggaacaaacggcattttgtcaaacagttacgagactcagcattattcataggtgatagtactggcagtgattaagattgcaattgcacaatcagaatattttttatatacaatgttttcaaggtgactgacaacaattaagattgcaattgcaccaaggggacaaaacaaaacaatgagcagcgttttgcaagggaaacgcaagcgccaggacttggcttcaaggctctcggcctcaatgaataatgaggagggtcgtgtctacaacatcattcgcgggaggaaggagatggggatatggcaaggggacatcaaacgagaagccaacatccccgatagtttgttgaagaaatccatcaagatgcttatcaccaagaaactcgtcaaggaggttgtgaacgtgcagaacaggtccaagaagttgttgatggcatcggatttcgaaccctccaatgagatcagtggtggagagtggtacaccgaaggcaaactcgacacagaatttattgacaagctgtctgaggcttgctttagtagtattcgtcgcctgaaggtcgcgacttgtgagggcatccttgagtggattaggaaggcgggtggtggagtcagtaaagggcagatggagcagattttgaagaagttggttatggagaataaggtgcaggaagtgactagtgatggctctggggattttgagtctgttcctgttggtgaagtttgttatagattggtgaagaaggctgctggtgttggtgccatggcttctattccttgtggggtttgtcctaggattaattcttgtacacccgatggtgttatctcccctacaacttgtcaatattatcagaaatggttggacttctaaatgtgtcccattcaaatccaagtccttttttagtttgggattttacataccttttagttttgaattccatcttttttatttttttatttttcatatggcactttctagagtctttattgattttctgttcaatgtgatacttaaaagaattaattgattttccttttgcatttaaggg

SEQ ID NO: 8204 - protein, 229 aa, Glycine max
  peptide (1)..(229): Ceres Seq. ID no. 14315478
  misc_feature (8)..(228): Pfam Name: Pfam Description:  RNA polymerase Rpc34 subunit
  misc_feature (8)..(229): NCBI GI NO: 15237811 NR Description: hypothetical protein [Arabidopsis thaliana]
  misc_feature (12)..(228): NCBI GI NO: 31240289 NR Description: ENSANGP00000015349 [Anopheles gambiae]
  misc_feature (2)..(123): NCBI GI NO: 30353810 NR Description: Unknown (protein for MGC:56299) [Danio rerio]
  misc_feature (123)..(229): NCBI GI NO: 30353810 NR Description: Unknown (protein for MGC:56299) [Danio rerio]
  misc_feature (8)..(228): NCBI GI NO: 24648960 NR Description: CG5380-PA [Drosophila melanogaster]
  misc_feature (10)..(123): NCBI GI NO: 39794390 NR Description: Unknown (protein for MGC:76106)
  misc_feature (144)..(229): NCBI GI NO: 39794390 NR Description: Unknown (protein for MGC:76106)
  misc_feature (15)..(123): NCBI GI NO: 33598952 NR Description: DNA-directed RNA polymerase III 39 kDa polypeptideF
  misc_feature (144)..(229): NCBI GI NO: 33598952 NR Description: DNA-directed RNA polymerase III 39 kDa polypeptideF
  misc_feature (15)..(123): NCBI GI NO: 26325236 NR Description: unnamed protein product [Mus musculus]
MSSVLQGKRKRQDLASRLSASMNNEEGRVYNIIRGRKEMGIWQGDIKREANIPDSLLKKSIKMLITKKLVKEVVNVQNRSKKLLMASDFEPSNEISGGEWYTEGKLDTEFIDKLSEACFSSIRRLKVATCEGILEWIRKAGGGVSKGQMEQILKKLVMENKVQEVTSDGSGDFESVPVGEVCYRLVKKAAGVGAMASIPCGVCPRINSCTPDGVISPTTCQYYQKWLDF

SEQ ID NO: 8205 - protein, 208 aa, Glycine max
  peptide (1)..(208): Ceres Seq. ID no. 14315479
  misc_feature (1)..(207): Pfam Name: Pfam Description:  RNA polymerase Rpc34 subunit
  misc_feature (1)..(208): NCBI GI NO: 15237811 NR Description: hypothetical protein [Arabidopsis thaliana]
  misc_feature (1)..(207): NCBI GI NO: 31240289 NR Description: ENSANGP00000015349 [Anopheles gambiae]
  misc_feature (1)..(102): NCBI GI NO: 30353810 NR Description: Unknown (protein for MGC:56299) [Danio rerio]
  misc_feature (102)..(208): NCBI GI NO: 30353810 NR Description: Unknown (protein for MGC:56299) [Danio rerio]
  misc_feature (1)..(207): NCBI GI NO: 24648960 NR Description: CG5380-PA [Drosophila melanogaster]
  misc_feature (1)..(102): NCBI GI NO: 39794390 NR Description: Unknown (protein for MGC:76106)
  misc_feature (123)..(208): NCBI GI NO: 39794390 NR Description: Unknown (protein for MGC:76106)
  misc_feature (1)..(102): NCBI GI NO: 33598952 NR Description: DNA-directed RNA polymerase III 39 kDa polypeptideF
  misc_feature (123)..(208): NCBI GI NO: 33598952 NR Description: DNA-directed RNA polymerase III 39 kDa polypeptideF
  misc_feature (1)..(102): NCBI GI NO: 26325236 NR Description: unnamed protein product [Mus musculus]
MNNEEGRVYNIIRGRKEMGIWQGDIKREANIPDSLLKKSIKMLITKKLVKEVVNVQNRSKKLLMASDFEPSNEISGGEWYTEGKLDTEFIDKLSEACFSSIRRLKVATCEGILEWIRKAGGGVSKGQMEQILKKLVMENKVQEVTSDGSGDFESVPVGEVCYRLVKKAAGVGAMASIPCGVCPRINSCTPDGVISPTTCQYYQKWLDF

SEQ ID NO: 8206 - protein, 191 aa, Glycine max
  peptide (1)..(191): Ceres Seq. ID no. 14315480
  misc_feature (1)..(190): Pfam Name: Pfam Description:  RNA polymerase Rpc34 subunit
  misc_feature (1)..(191): NCBI GI NO: 15237811 NR Description: hypothetical protein [Arabidopsis thaliana]
  misc_feature (1)..(190): NCBI GI NO: 31240289 NR Description: ENSANGP00000015349 [Anopheles gambiae]
  misc_feature (1)..(85): NCBI GI NO: 30353810 NR Description: Unknown (protein for MGC:56299) [Danio rerio]
  misc_feature (85)..(191): NCBI GI NO: 30353810 NR Description: Unknown (protein for MGC:56299) [Danio rerio]
  misc_feature (1)..(190): NCBI GI NO: 24648960 NR Description: CG5380-PA [Drosophila melanogaster]
  misc_feature (1)..(85): NCBI GI NO: 39794390 NR Description: Unknown (protein for MGC:76106)
  misc_feature (106)..(191): NCBI GI NO: 39794390 NR Description: Unknown (protein for MGC:76106)
  misc_feature (1)..(85): NCBI GI NO: 33598952 NR Description: DNA-directed RNA polymerase III 39 kDa polypeptideF
  misc_feature (106)..(191): NCBI GI NO: 33598952 NR Description: DNA-directed RNA polymerase III 39 kDa polypeptideF
  misc_feature (1)..(85): NCBI GI NO: 26325236 NR Description: unnamed protein product [Mus musculus]
MGIWQGDIKREANIPDSLLKKSIKMLITKKLVKEVVNVQNRSKKLLMASDFEPSNEISGGEWYTEGKLDTEFIDKLSEACFSSIRRLKVATCEGILEWIRKAGGGVSKGQMEQILKKLVMENKVQEVTSDGSGDFESVPVGEVCYRLVKKAAGVGAMASIPCGVCPRINSCTPDGVISPTTCQYYQKWLDF

SEQ ID NO: 8207 - DNA, 1440 bp, Glycine max
  misc_feature (1)..(1440): Ceres Seq. ID no. 14312907
aactctcagcgcccagcctacagcctccaggtgtgttttgttttgcagatccaacactctctctatttatatccaactgtaccatctcccacttccttattctcaaccctttttatcttttcatcaattcaattcaaaccacgccttcccctgttcacaaccttgcccacacactgcattgttctaattaaacatgtcaccctcactgttaccaccatcacaacacaaccaccatttctaactcaacaacaaccaaaaaaaaaaagattctggagcatcatttcttggattctggttcgcgttggtcacatccatcaaacacccctatactctttcttggcgtgcgtcaggtattcatttttacggcaaccctgacagagtaataagacagttaccgtgttgtacgtgtccttcaaacgtcacccacttcaacacataaaccatcgtttttcccaccagatttatattcattcgtcgtatttaaacccaccacaccaaccaaccatacattatcgttgcaattgttgttacaagcttaggttagggtctgtttggtgataatttagaatcttagatggggaattgccaagctgcggaagcggctacggttgtgattcagcatcctgggaacaagatcgagagggtttattggtcgcttagcgcacacgaggttatgaactcgaatcctgggcactatgttgcgcttgtcgtgtcctcgcccacgctcaaggccgagaatggcgctccgatgaagcagcttaagcttctccgacccgacgatactttgcatattggccaggtttatcggttgatcagcttcgaagatgtgttgaaggagtttgcttccaagaaatgtggtaaacttgggaaattgctcaaggagacgggtagtcatgggattcagatgaagcacaaggactctagagctacaaatcctagcccaaattccaaaaccgaattcggttccattaagggtttctccatttttgtcaaactcactgaccatgaaacttgcggaatgttgatgttgtgtgtggtccaatatatctatcctcttcagcaaaattgcttccttttcgtgtattgattattatatatgtttttataaacacgctctggcacgagcagcgtctgcgatcagttataaacccctcgagaaaataatgctatatgttatctacaaactccacagtccacagcagatgagataacctatctaggctacaagataaaaacaaaagtcctgcactcaattcaaatcttagatccgacatgccccagatagtgcctagctccactaggcaccattaacagattaatgtttgtatgtagcttggttgttttgcttggatggaatcacgggtcaatggtgtaatcactttatcccttgcttttttcattcaattctgcctttaattcaaaagacagggtatttgttct

SEQ ID NO: 8208 - protein, 170 aa, Glycine max
  peptide (1)..(170): Ceres Seq. ID no. 14312908
  misc_feature (1)..(125): NCBI GI NO: 15240787 NR Description: expressed protein [Arabidopsis thaliana]
  misc_feature (18)..(93): NCBI GI NO: 37533268 NR Description: hypothetical protein
  misc_feature (1)..(19): NCBI GI NO: 37533268 NR Description: hypothetical protein
  misc_feature (1)..(100): NCBI GI NO: 15241996 NR Description: expressed protein [Arabidopsis thaliana]
  misc_feature (1)..(99): NCBI GI NO: 15240611 NR Description: expressed protein [Arabidopsis thaliana]
  misc_feature (1)..(104): NCBI GI NO: 18406580 NR Description: expressed protein [Arabidopsis thaliana]
  misc_feature (1)..(104): NCBI GI NO: 21553451 NR Description: unknown [Arabidopsis thaliana]
  misc_feature (1)..(99): NCBI GI NO: 15218556 NR Description: expressed protein [Arabidopsis thaliana]
  misc_feature (1)..(99): NCBI GI NO: 25402604 NR Description: protein T10O24.15
  misc_feature (1)..(56): NCBI GI NO: 34904920 NR Description: OSJNBa0077M12.2
MGNCQAAEAATVVIQHPGNKIERVYWSLSAHEVMNSNPGHYVALVVSSPTLKAENGAPMKQLKLLRPDDTLHIGQVYRLISFEDVLKEFASKKCGKLGKLLKETGSHGIQMKHKDSRATNPSPNSKTEFGSIKGFSIFVKLTDHETCGMLMLCVVQYIYPLQQNCFLFVY

SEQ ID NO: 8209 - protein, 137 aa, Glycine max
  peptide (1)..(137): Ceres Seq. ID no. 14312909
  misc_feature (1)..(92): NCBI GI NO: 15240787 NR Description: expressed protein [Arabidopsis thaliana]
  misc_feature (1)..(60): NCBI GI NO: 37533268 NR Description: hypothetical protein
  misc_feature (1)..(67): NCBI GI NO: 15241996 NR Description: expressed protein [Arabidopsis thaliana]
  misc_feature (1)..(66): NCBI GI NO: 15240611 NR Description: expressed protein [Arabidopsis thaliana]
  misc_feature (1)..(71): NCBI GI NO: 18406580 NR Description: expressed protein [Arabidopsis thaliana]
  misc_feature (1)..(71): NCBI GI NO: 21553451 NR Description: unknown [Arabidopsis thaliana]
  misc_feature (1)..(66): NCBI GI NO: 15218556 NR Description: expressed protein [Arabidopsis thaliana]
  misc_feature (1)..(66): NCBI GI NO: 25402604 NR Description: protein T10O24.15
  misc_feature (1)..(23): NCBI GI NO: 34904920 NR Description: OSJNBa0077M12.2
MNSNPGHYVALVVSSPTLKAENGAPMKQLKLLRPDDTLHIGQVYRLISFEDVLKEFASKKCGKLGKLLKETGSHGIQMKHKDSRATNPSPNSKTEFGSIKGFSIFVKLTDHETCGMLMLCVVQYIYPLQQNCFLFVY

SEQ ID NO: 8210 - protein, 124 aa, Glycine max
  peptide (1)..(124): Ceres Seq. ID no. 14312910
NSQRPAYSLQVCFVLQIQHSLYLYPTVPSPTSLFSTLFIFSSIQFKPRLPLFTTLPTHCIVLIKHVTLTVTTITTQPPFLTQQQPKKKRFWSIISWILVRVGHIHQTPLYSFLACVRYSFLRQP

SEQ ID NO: 8211 - DNA, 1860 bp, Glycine max
  misc_feature (1)..(1860): Ceres Seq. ID no. 15172549
ggcgatgtaaacagagtggagcagctccaactgccaaccaactctcctttgacttctccgctttctttctttccttctttctatttccttcttttcattcactctttcacattcactccctttcttccttccttccgtcattcccttcaaacccttccattctcctcaccatggcttcgccctttctccccgccaaaaccaattccgccaccctctccttctccgccgcagtccccggccgccgcctccacttcgcggcgtctccgtcgcattcccctcgacggaggtcctccctgacggtgaagtcgaagatcagggagatcttcatgcccgccctcagctccaccatgacggagggaaaaatcgtctcgtgggtcaagtccgagggcgacgtcctctccaaaggtgacagcgtcgtcgtcgtcgagtccgacaaggccgacatggacgtcgagacgttctacaatggcatcctcgccgtcatcgttgtcgccgagggccagaccgcccccgtcggtgcccccatcggcctccttgcggagaccgaggccgaagttgccgaggccatggcagccgccaattctgctccaactccacctcccaaagcttccgatacttctccggcgccggcaccggcgccggaagtctctgattcaccacgtaaggcggttgcaacaccgtatgccaagaagctcgcgaagcagcacaaagtgaacataggttcggttgtcgggactggtccgtttggaagagtcactcctgctgacgtggagaaggccgccggtattttgccggcggagagcaatgtagctccggcggcggtggattcggctccaccgaaagctgctgctgcggctccggcggcatcctcggcttcaattccaggttctagtgttgtggcctttacgacaatgcaatctgcggttgcgaagaacatggtggagagtctctctgtgccgacgttccgtgttgggtacccagttaccactgatgcacttgatgctctgtatgagaaggtgagaaaaaagggtgtgaccatgacagcgattctggccaaggcagctgcaatggcactcgttcagcacccagtggtgaatgcctcgtgcaaagatgggaagaactttgcctataatagtaacattaacattgctgttgctgtggcaaccaatggtggtttgattacaccggttcttcaggatgcagataagttggacttgtatcttttgtcccaaaaatggaaagaactagtggaaaaagctcgtgccaagcaattgcaacctcatgaatataattcaggaactttcacactttcaaatttgggaatgtttggagttgacaggtttgacgccatacttcctccaggccagggggctatcatggcggttggagcatcaaaacctactgtcctagcagataaggatggtttctttactgtaaaaagtaaaatgctggtaaatgtaactgctgatcaccgaataatctatggggctgacttggctgcattccttcagacattctcaaaaatcattgagaaccctgaatgcctaacattgtagtcattcaacactttgacataattatctatcttcgatcatccacaagggattacgagttgatagctttcactgagcagactctagcgaaatatacctcattatgtgattatcttgtaatttcacagttttattgttatatatttccagggtctttctgaaggaacattttcttgattttcaatgggaggaacaactttgattttttttcccgctgaaggaaattgtaaaccaatatctatggcaagaaacaaggagagtgaattatgcttatgacttaccaataaaaaaacctagtattctttcc

SEQ ID NO: 8212 - protein, 517 aa, Glycine max
  peptide (1)..(517): Ceres Seq. ID no. 15172550
  misc_feature (293)..(517): Pfam Name: catalytic domain Pfam Description: 2-oxoacid dehydrogenases acyltransferase
  misc_feature (58)..(517): NCBI GI NO: 15230922 NR Description: dihydrolipoamide S-acetyltransferase
  misc_feature (98)..(517): NCBI GI NO: 9279589 NR Description: dihydrolipoamide S-acetyltransferase
  misc_feature (161)..(517): NCBI GI NO: 21954074 NR Description: putative dihydrolipoamide S-acetyltransferase
  misc_feature (98)..(516): NCBI GI NO: 15218630 NR Description: dihydrolipoamide S-acetyltransferase -related
  misc_feature (98)..(516): NCBI GI NO: 21536525 NR Description: dihydrolipoamide S-acetyltransferase, putative
  misc_feature (98)..(516): NCBI GI NO: 25286434 NR Description: protein F12K21.24
  misc_feature (104)..(517): NCBI GI NO: 23123757 NR Description: hypothetical protein [Nostoc punctiforme]
  misc_feature (104)..(517): NCBI GI NO: 22298842 NR Description: dihydrolipoamide S-acetyltransferase
  misc_feature (104)..(517): NCBI GI NO: 17231098 NR Description: dihydrolipoamide S-acetyltransferase
  misc_feature (104)..(517): NCBI GI NO: 23041883 NR Description: hypothetical protein
RCKQSGAAPTANQLSFDFSAFFLSFFLFPSFHSLFHIHSLSSFLPSFPSNPSILLTMASPFLPAKTNSATLSFSAAVPGRRLHFAASPSHSPRRRSSLTVKSKIREIFMPALSSTMTEGKIVSWVKSEGDVLSKGDSVVVVESDKADMDVETFYNGILAVIVVAEGQTAPVGAPIGLLAETEAEVAEAMAAANSAPTPPPKASDTSPAPAPAPEVSDSPRKAVATPYAKKLAKQHKVNIGSVVGTGPFGRVTPADVEKAAGILPAESNVAPAAVDSAPPKAAAAAPAASSASIPGSSVVAFTTMQSAVAKNMVESLSVPTFRVGYPVTTDALDALYEKVRKKGVTMTAILAKAAAMALVQHPVVNASCKDGKNFAYNSNINIAVAVATNGGLITPVLQDADKLDLYLLSQKWKELVEKARAKQLQPHEYNSGTFTLSNLGMFGVDRFDAILPPGQGAIMAVGASKPTVLADKDGFFTVKSKMLVNVTADHRIIYGADLAAFLQTFSKIIENPECLTL

SEQ ID NO: 8213 - protein, 461 aa, Glycine max
  peptide (1)..(461): Ceres Seq. ID no. 15172551
  misc_feature (237)..(461): Pfam Name: catalytic domain Pfam Description: 2-oxoacid dehydrogenases acyltransferase
  misc_feature (2)..(461): NCBI GI NO: 15230922 NR Description: dihydrolipoamide S-acetyltransferase
  misc_feature (42)..(461): NCBI GI NO: 9279589 NR Description: dihydrolipoamide S-acetyltransferase
  misc_feature (105)..(461): NCBI GI NO: 21954074 NR Description: putative dihydrolipoamide S-acetyltransferase
  misc_feature (42)..(460): NCBI GI NO: 15218630 NR Description: dihydrolipoamide S-acetyltransferase -related
  misc_feature (42)..(460): NCBI GI NO: 21536525 NR Description: dihydrolipoamide S-acetyltransferase, putative
  misc_feature (42)..(460): NCBI GI NO: 25286434 NR Description: protein F12K21.24
  misc_feature (48)..(461): NCBI GI NO: 23123757 NR Description: hypothetical protein [Nostoc punctiforme]
  misc_feature (48)..(461): NCBI GI NO: 22298842 NR Description: dihydrolipoamide S-acetyltransferase
  misc_feature (48)..(461): NCBI GI NO: 17231098 NR Description: dihydrolipoamide S-acetyltransferase
  misc_feature (48)..(461): NCBI GI NO: 23041883 NR Description: hypothetical protein
MASPFLPAKTNSATLSFSAAVPGRRLHFAASPSHSPRRRSSLTVKSKIREIFMPALSSTMTEGKIVSWVKSEGDVLSKGDSVVVVESDKADMDVETFYNGILAVIVVAEGQTAPVGAPIGLLAETEAEVAEAMAAANSAPTPPPKASDTSPAPAPAPEVSDSPRKAVATPYAKKLAKQHKVNIGSVVGTGPFGRVTPADVEKAAGILPAESNVAPAAVDSAPPKAAAAAPAASSASIPGSSVVAFTTMQSAVAKNMVESLSVPTFRVGYPVTTDALDALYEKVRKKGVTMTAILAKAAAMALVQHPVVNASCKDGKNFAYNSNINIAVAVATNGGLITPVLQDADKLDLYLLSQKWKELVEKARAKQLQPHEYNSGTFTLSNLGMFGVDRFDAILPPGQGAIMAVGASKPTVLADKDGFFTVKSKMLVNVTADHRIIYGADLAAFLQTFSKIIENPECLTL

SEQ ID NO: 8214 - protein, 409 aa, Glycine max
  peptide (1)..(409): Ceres Seq. ID no. 15172552
  misc_feature (185)..(409): Pfam Name: catalytic domain Pfam Description: 2-oxoacid dehydrogenases acyltransferase
  misc_feature (1)..(409): NCBI GI NO: 15230922 NR Description: dihydrolipoamide S-acetyltransferase
  misc_feature (1)..(409): NCBI GI NO: 9279589 NR Description: dihydrolipoamide S-acetyltransferase
  misc_feature (53)..(409): NCBI GI NO: 21954074 NR Description: putative dihydrolipoamide S-acetyltransferase
  misc_feature (1)..(408): NCBI GI NO: 15218630 NR Description: dihydrolipoamide S-acetyltransferase -related
  misc_feature (1)..(408): NCBI GI NO: 21536525 NR Description: dihydrolipoamide S-acetyltransferase, putative
  misc_feature (1)..(408): NCBI GI NO: 25286434 NR Description: protein F12K21.24
  misc_feature (1)..(409): NCBI GI NO: 23123757 NR Description: hypothetical protein [Nostoc punctiforme]
  misc_feature (1)..(409): NCBI GI NO: 22298842 NR Description: dihydrolipoamide S-acetyltransferase
  misc_feature (1)..(409): NCBI GI NO: 17231098 NR Description: dihydrolipoamide S-acetyltransferase
  misc_feature (1)..(409): NCBI GI NO: 23041883 NR Description: hypothetical protein
MPALSSTMTEGKIVSWVKSEGDVLSKGDSVVVVESDKADMDVETFYNGILAVIVVAEGQTAPVGAPIGLLAETEAEVAEAMAAANSAPTPPPKASDTSPAPAPAPEVSDSPRKAVATPYAKKLAKQHKVNIGSVVGTGPFGRVTPADVEKAAGILPAESNVAPAAVDSAPPKAAAAAPAASSASIPGSSVVAFTTMQSAVAKNMVESLSVPTFRVGYPVTTDALDALYEKVRKKGVTMTAILAKAAAMALVQHPVVNASCKDGKNFAYNSNINIAVAVATNGGLITPVLQDADKLDLYLLSQKWKELVEKARAKQLQPHEYNSGTFTLSNLGMFGVDRFDAILPPGQGAIMAVGASKPTVLADKDGFFTVKSKMLVNVTADHRIIYGADLAAFLQTFSKIIENPECLTL

SEQ ID NO: 8215 - DNA, 1138 bp, Glycine max
  misc_feature (1)..(1138): Ceres Seq. ID no. 14315410
actggaatatttttcacgtttgatttgaccattaaattggagataggatttttgtgcgggccaagaaagatacattcatcgttcaacaatcttcaaacaaacaaaaaataaagtgtcttagaaatgacacgatccttggcaatggcttcttcatcaatgttatgtccgaagctggggagttgtgcagtgtcacatacaaagttccaagcttttcatctctcttcaatgttctctccactgggtcgaggccttgtctcaccttggagtggtttaaagcatctgggtatctcagctaaagcaaagcctcttattcacatagatagaaagggtgggtgtaagggtaaggtggtttatgcttctctctttggggttggagctcctgaggctttggtaattggggtcgttgctttgttggtttttggccctaaaggtcttgctgaggttgctagaaatctgggaaaaacattgcgtacatttcaacccaccattaaagagcttcaggatgtttcaagggaatttaagagtactcttgaacgggagattggtcttgatgacaatttaagtccaacccagaacacatacaattccaacatacgcaataccacaccaacttcatcatccacttccactgttgaccctaatggcacgccagatcctactaaagcatacagctctgaggagtatcttaagattacagaggagcagctgaaggcatctgctgcacaacagcaggggcaaacaccttccaaggaaggtgacaatgagcctcaaatccagccttctggttagtcttttttgtggaacataggcactttttttttttttctccctctttccaccctctttgttcttcacctttctttgatatgtcaacagctgaggaaacagctactactgtacctccacctcagaagccagaaagtgagacgtaaactctgggttcataagcatagggagttaaaataatttgtccaattatcgcttcaatgcccggaagtgggcagtactattggcacaagagatgagaagggtcaggcaattttgttaccagctagtcattagaatcatgtaaaatgtaaagaacaaaaccattaacgattagtatgtttccaaattaattgtagttatatttgtcatc

SEQ ID NO: 8216 - protein, 221 aa, Glycine max
  peptide (1)..(221): Ceres Seq. ID no. 14315411
  misc_feature (83)..(175): Pfam Name: Pfam Description:  mttA/Hcf106 family
  misc_feature (1)..(219): NCBI GI NO: 15277532 NR Description: HCF106 [Pisum sativum]
  misc_feature (5)..(221): NCBI GI NO: 15237156 NR Description: HCF106 (gb|AAD32652.1) [Arabidopsis thaliana]
  misc_feature (75)..(214): NCBI GI NO: 7489747 NR Description: HCF106 protein precursor, chloroplast - maize
  misc_feature (75)..(220): NCBI GI NO: 7542514 NR Description: HCF106C precursor protein [Zea mays]
  misc_feature (79)..(168): NCBI GI NO: 23129516 NR Description: hypothetical protein [Nostoc punctiforme]
  misc_feature (79)..(139): NCBI GI NO: 22298928 NR Description: ORF_ID:tsl1385~hypothetical protein
  misc_feature (79)..(168): NCBI GI NO: 16329622 NR Description: hypothetical protein [Synechocystis sp. PCC 6803]
  misc_feature (80)..(162): NCBI GI NO: 37522572 NR Description: hypothetical protein gsr3003
  misc_feature (79)..(170): NCBI GI NO: 15241912 NR Description: Tha4 protein - like [Arabidopsis thaliana]
MTRSLAMASSSMLCPKLGSCAVSHTKFQAFHLSSMFSPLGRGLVSPWSGLKHLGISAKAKPLIHIDRKGGCKGKVVYASLFGVGAPEALVIGVVALLVFGPKGLAEVARNLGKTLRTFQPTIKELQDVSREFKSTLEREIGLDDNLSPTQNTYNSNIRNTTPTSSSTSTVDPNGTPDPTKAYSSEEYLKITEEQLKASAAQQQGQTPSKEGDNEPQIQPSG

SEQ ID NO: 8217 - protein, 215 aa, Glycine max
  peptide (1)..(215): Ceres Seq. ID no. 14315412
  misc_feature (77)..(169): Pfam Name: Pfam Description:  mttA/Hcf106 family
  misc_feature (1)..(213): NCBI GI NO: 15277532 NR Description: HCF106 [Pisum sativum]
  misc_feature (1)..(215): NCBI GI NO: 15237156 NR Description: HCF106 (gb|AAD32652.1) [Arabidopsis thaliana]
  misc_feature (69)..(208): NCBI GI NO: 7489747 NR Description: HCF106 protein precursor, chloroplast - maize
  misc_feature (69)..(214): NCBI GI NO: 7542514 NR Description: HCF106C precursor protein [Zea mays]
  misc_feature (73)..(162): NCBI GI NO: 23129516 NR Description: hypothetical protein [Nostoc punctiforme]
  misc_feature (73)..(133): NCBI GI NO: 22298928 NR Description: ORF_ID:tsl1385~hypothetical protein
  misc_feature (73)..(162): NCBI GI NO: 16329622 NR Description: hypothetical protein [Synechocystis sp. PCC 6803]
  misc_feature (74)..(156): NCBI GI NO: 37522572 NR Description: hypothetical protein gsr3003
  misc_feature (73)..(164): NCBI GI NO: 15241912 NR Description: Tha4 protein - like [Arabidopsis thaliana]
MASSSMLCPKLGSCAVSHTKFQAFHLSSMFSPLGRGLVSPWSGLKHLGISAKAKPLIHIDRKGGCKGKVVYASLFGVGAPEALVIGVVALLVFGPKGLAEVARNLGKTLRTFQPTIKELQDVSREFKSTLEREIGLDDNLSPTQNTYNSNIRNTTPTSSSTSTVDPNGTPDPTKAYSSEEYLKITEEQLKASAAQQQGQTPSKEGDNEPQIQPSG

SEQ ID NO: 8218 - protein, 210 aa, Glycine max
  peptide (1)..(210): Ceres Seq. ID no. 14315413
  misc_feature (72)..(164): Pfam Name: Pfam Description:  mttA/Hcf106 family
  misc_feature (1)..(208): NCBI GI NO: 15277532 NR Description: HCF106 [Pisum sativum]
  misc_feature (1)..(210): NCBI GI NO: 15237156 NR Description: HCF106 (gb|AAD32652.1) [Arabidopsis thaliana]
  misc_feature (64)..(203): NCBI GI NO: 7489747 NR Description: HCF106 protein precursor, chloroplast - maize
  misc_feature (64)..(209): NCBI GI NO: 7542514 NR Description: HCF106C precursor protein [Zea mays]
  misc_feature (68)..(157): NCBI GI NO: 23129516 NR Description: hypothetical protein [Nostoc punctiforme]
  misc_feature (68)..(128): NCBI GI NO: 22298928 NR Description: ORF_ID:tsl1385~hypothetical protein
  misc_feature (68)..(157): NCBI GI NO: 16329622 NR Description: hypothetical protein [Synechocystis sp. PCC 6803]
  misc_feature (69)..(151): NCBI GI NO: 37522572 NR Description: hypothetical protein gsr3003
  misc_feature (68)..(159): NCBI GI NO: 15241912 NR Description: Tha4 protein - like [Arabidopsis thaliana]
MLCPKLGSCAVSHTKFQAFHLSSMFSPLGRGLVSPWSGLKHLGISAKAKPLIHIDRKGGCKGKVVYASLFGVGAPEALVIGVVALLVFGPKGLAEVARNLGKTLRTFQPTIKELQDVSREFKSTLEREIGLDDNLSPTQNTYNSNIRNTTPTSSSTSTVDPNGTPDPTKAYSSEEYLKITEEQLKASAAQQQGQTPSKEGDNEPQIQPSG

SEQ ID NO: 8219 - DNA, 1255 bp, Glycine max
  misc_feature (1)..(1255): Ceres Seq. ID no. 14312882
aaaaaagcccatgttatcttgttcttttcctccactatgttttttttttttgcaattatctttcttatttaaaagatgaagcaagcaaacagaatcccctcttttgatcttggtttcaatattcatcatcaaatcactggtcctccttttatagaaatcttagatctgcttttaacacaaggttttggtggagaagaagaagcaaagacgacggtgtataaatacaagagtagaagaagaagaagaagcaattagagggagagttagtgagcaaggtggatcgaaggcaagggaagaggtctctccctcctcatgaggagaaaaaagaagctttcaactttcctattattcatccaacaccatctcaaaatcgaaaggaacaagcttcaccatcacccttttcactcctcatgagtaacaacaaaaacaacaccttcttccccaccccacatggccaaataagcacttctgaatttgttaatagccaaaatccgccccaggctacaaatcaaggcattgatgatattaggaaaaagcactatagaggagttaggcagagaccatggggcaaatgggcagcagaaataagagaccctaagaaagcagctagagtgtggcttggcacctttgacacggcagaggctgcagctatggcttatgatgctgctgcattgaggttcaaaggaaacaaagccaaactcaattttcctgaacgtgttgttatgccaatacaaccacaaacaaataacaataattccacttcttcatcagctcctactacacaatcatcttcttctcttccaccaccacaatctctacataataatagttctctttcagcagaagggtttccaaatcttgaggagtatgcaaggttgctgagttgtagcgatgatgatgattttcaacgtgttgcattggggctctaccagcatcacaataatgaggattttatttgtggttcatcacaaccaccaccagtgccgttttttgtgtcctcttcttcttcttcttctgcaatgacatcgtcatattctgattttttgggccaaggagggagtactggttttgatgaagggaacaagagggggtcgtagttttatgtctctgaattttgagcactgcatgcaggttgcttccacaacaattaaggaagttcaaatctctcatctcttatatgttcttttgtttttattattccaattacaaaataacacctgaggtataaaatctataatactcatctttcgtcttt

SEQ ID NO: 8220 - protein, 228 aa, Glycine max
  peptide (1)..(228): Ceres Seq. ID no. 14312883
  misc_feature (41)..(103): Pfam Name: Pfam Description:  AP2 domain
  misc_feature (1)..(153): NCBI GI NO: 15240754 NR Description: AP2 domain transcription factor, putative
  misc_feature (1)..(141): NCBI GI NO: 15240379 NR Description: AP2 domain transcription factor family
  misc_feature (37)..(187): NCBI GI NO: 15240604 NR Description: AP2 domain transcription factor family
  misc_feature (19)..(209): NCBI GI NO: 15238232 NR Description: AP2 domain transcription factor, putative
  misc_feature (1)..(157): NCBI GI NO: 38347164 NR Description: OSJNBa0039C07.10
  misc_feature (24)..(109): NCBI GI NO: 15240610 NR Description: putative protein; protein id: At5g50080.1
  misc_feature (40)..(109): NCBI GI NO: 34221731 NR Description: putative AP2 domain transcription factor
  misc_feature (1)..(133): NCBI GI NO: 15226153 NR Description: AP2 domain transcription factor family
  misc_feature (38)..(145): NCBI GI NO: 34908616 NR Description: P0677H08.8
  misc_feature (41)..(161): NCBI GI NO: 33519168 NR Description: AP2 domain-containing protein AP29
MSNNKNNTFFPTPHGQISTSEFVNSQNPPQATNQGIDDIRKKHYRGVRQRPWGKWAAEIRDPKKAARVWLGTFDTAEAAAMAYDAAALRFKGNKAKLNFPERVVMPIQPQTNNNNSTSSSAPTTQSSSSLPPPQSLHNNSSLSAEGFPNLEEYARLLSCSDDDDFQRVALGLYQHHNNEDFICGSSQPPPVPFFVSSSSSSSAMTSSYSDFLGQGGSTGFDEGNKRGS

SEQ ID NO: 8221 - protein, 148 aa, Glycine max
  peptide (1)..(148): Ceres Seq. ID no. 14312884
  misc_feature (1)..(73): NCBI GI NO: 15240754 NR Description: AP2 domain transcription factor, putative
  misc_feature (1)..(61): NCBI GI NO: 15240379 NR Description: AP2 domain transcription factor family
  misc_feature (1)..(107): NCBI GI NO: 15240604 NR Description: AP2 domain transcription factor family
  misc_feature (1)..(129): NCBI GI NO: 15238232 NR Description: AP2 domain transcription factor, putative
  misc_feature (1)..(77): NCBI GI NO: 38347164 NR Description: OSJNBa0039C07.10
  misc_feature (1)..(29): NCBI GI NO: 15240610 NR Description: putative protein; protein id: At5g50080.1
  misc_feature (1)..(29): NCBI GI NO: 34221731 NR Description: putative AP2 domain transcription factor
  misc_feature (1)..(53): NCBI GI NO: 15226153 NR Description: AP2 domain transcription factor family
  misc_feature (1)..(65): NCBI GI NO: 34908616 NR Description: P0677H08.8
  misc_feature (1)..(81): NCBI GI NO: 33519168 NR Description: AP2 domain-containing protein AP29
MAYDAAALRFKGNKAKLNFPERVVMPIQPQTNNNNSTSSSAPTTQSSSSLPPPQSLHNNSSLSAEGFPNLEEYARLLSCSDDDDFQRVALGLYQHHNNEDFICGSSQPPPVPFFVSSSSSSSAMTSSYSDFLGQGGSTGFDEGNKRGS

SEQ ID NO: 8222 - protein, 124 aa, Glycine max
  peptide (1)..(124): Ceres Seq. ID no. 14312885
  misc_feature (1)..(49): NCBI GI NO: 15240754 NR Description: AP2 domain transcription factor, putative
  misc_feature (1)..(37): NCBI GI NO: 15240379 NR Description: AP2 domain transcription factor family
  misc_feature (1)..(83): NCBI GI NO: 15240604 NR Description: AP2 domain transcription factor family
  misc_feature (1)..(105): NCBI GI NO: 15238232 NR Description: AP2 domain transcription factor, putative
  misc_feature (1)..(53): NCBI GI NO: 38347164 NR Description: OSJNBa0039C07.10
  misc_feature (1)..(29): NCBI GI NO: 15226153 NR Description: AP2 domain transcription factor family
  misc_feature (1)..(41): NCBI GI NO: 34908616 NR Description: P0677H08.8
  misc_feature (1)..(57): NCBI GI NO: 33519168 NR Description: AP2 domain-containing protein AP29
  misc_feature (1)..(32): NCBI GI NO: 18400321 NR Description: AP2 domain protein RAP2.2 [Arabidopsis thaliana]
  misc_feature (1)..(32): NCBI GI NO: 30683059 NR Description: AP2 domain protein RAP2.2 [Arabidopsis thaliana]
MPIQPQTNNNNSTSSSAPTTQSSSSLPPPQSLHNNSSLSAEGFPNLEEYARLLSCSDDDDFQRVALGLYQHHNNEDFICGSSQPPPVPFFVSSSSSSSAMTSSYSDFLGQGGSTGFDEGNKRGS

SEQ ID NO: 8223 - DNA, 1495 bp, Glycine max
  misc_feature (1)..(1495): Ceres Seq. ID no. 14312152
atcttcaacttgttcaactctctcaaaaccaaataaaatctttcacaactcaaaactcaagctccaaattttcactttacacctttgaattcattttttcacacatggacgagatcgacgtgcctccgttcttcgtgtgccctatttcattagagctcatgaaggaccccgtgacggtctccaccggcatcacctacgaccgcgacagcatcgagaagtggctcttcgccgaggtgaagaacgacacgtgtcccgtcacgaagcagcccctcctcccggacctcactccgaaccacacgctccgcagactcatccaagcctggtgcaccgtcaacgcctcccacggcgtccagagaatccccacaccaaaaccaccggtcgacaaaaccctcatcgagaaactcctccgcaacacctcggcttcggactccccgagcctccagctccggtccctccgaaccctcaagtccattgcctcggaatcccaatcaaacaaacgctgcatcgaatctgcagaaggcgcagttaatttcctagcaacaattataaccaccaccaccaccaccaccaccaacctactcgatgatgacatcgagttggaaataaaaacaagtacagcccacgaagcattgagccttttacacagcattcagctgtcagagtccggtttgaaggctctgttgaaccatccagaatttataaactctctaaccaagatgatgcaaagagggatctacgagtcacgcgcctacgctgttttcttgctgaattccttgtccgaggtggcggatccggcgcagttgattaacctaaaaactgatttgttcactgaattggttcaggttcttaaggatcaggtttcggagaaggtctcgaaggcgaccctgcaggcattgattcaggtgtgttcgtggggcagaaatagggtgaaggctgtggaggctggagctgtgccggttctggtggagcttcttctcgaatgcaacgagagaaaaccgatagaaatggtgctggttttgttggagattttatgtcagagtgctgacgggagggcggggctgttggcccacgcggcgggggtggtgatcgtggcgaagaagattctgagggtttcaacgatggcgaacgatagggcggcgaagattctgctttcggtgtgcagattttcccccacgccgggcttggtgcaggagatggtgcagcttggggtggtggcaaagctttgtctggtgctgcaggtggatagtgggaacaaagcaaaagagatagctagggagattctcaaattgcatgctagggcttggaggaattcgccttgcatctcacaatttgcttgcttcgtttccaatgagttcgtgaaagaaagaaaatccactttgtttttgttttgttcgtgacaccattggatgtaatcgattatttaagaaactaattccttctgtgagatctagtttgcggtgaaagaaaaccgaaagtaaatcacagttgagttttc

SEQ ID NO: 8224 - protein, 464 aa, Glycine max
  peptide (1)..(464): Ceres Seq. ID no. 14312153
  misc_feature (39)..(114): Pfam Name: Pfam Description:  U-box domain
  misc_feature (36)..(440): NCBI GI NO: 25408431 NR Description: hypothetical protein At2g35930
  misc_feature (36)..(440): NCBI GI NO: 30686609 NR Description: expressed protein [Arabidopsis thaliana]
  misc_feature (37)..(440): NCBI GI NO: 21741126 NR Description: OSJNBa0070M12.4
  misc_feature (35)..(326): NCBI GI NO: 15231222 NR Description: expressed protein [Arabidopsis thaliana]
  misc_feature (39)..(441): NCBI GI NO: 34908566 NR Description: P0505D12.10
  misc_feature (190)..(440): NCBI GI NO: 15231222 NR Description: expressed protein [Arabidopsis thaliana]
  misc_feature (38)..(444): NCBI GI NO: 18402223 NR Description: expressed protein [Arabidopsis thaliana]
  misc_feature (38)..(439): NCBI GI NO: 38346713 NR Description: OSJNBa0086O06.11
  misc_feature (38)..(434): NCBI GI NO: 15222819 NR Description: expressed protein [Arabidopsis thaliana]
  misc_feature (38)..(434): NCBI GI NO: 26451730 NR Description: unknown protein [Arabidopsis thaliana]
LQLVQLSQNQIKSFTTQNSSSKFSLYTFEFIFSHMDEIDVPPFFVCPISLELMKDPVTVSTGITYDRDSIEKWLFAEVKNDTCPVTKQPLLPDLTPNHTLRRLIQAWCTVNASHGVQRIPTPKPPVDKTLIEKLLRNTSASDSPSLQLRSLRTLKSIASESQSNKRCIESAEGAVNFLATIITTTTTTTTNLLDDDIELEIKTSTAHEALSLLHSIQLSESGLKALLNHPEFINSLTKMMQRGIYESRAYAVFLLNSLSEVADPAQLINLKTDLFTELVQVLKDQVSEKVSKATLQALIQVCSWGRNRVKAVEAGAVPVLVELLLECNERKPIEMVLVLLEILCQSADGRAGLLAHAAGVVIVAKKILRVSTMANDRAAKILLSVCRFSPTPGLVQEMVQLGVVAKLCLVLQVDSGNKAKEIAREILKLHARAWRNSPCISQFACFVSNEFVKERKSTLFLFCS

SEQ ID NO: 8225 - protein, 430 aa, Glycine max
  peptide (1)..(430): Ceres Seq. ID no. 14312154
  misc_feature (5)..(80): Pfam Name: Pfam Description:  U-box domain
  misc_feature (2)..(406): NCBI GI NO: 25408431 NR Description: hypothetical protein At2g35930
  misc_feature (2)..(406): NCBI GI NO: 30686609 NR Description: expressed protein [Arabidopsis thaliana]
  misc_feature (3)..(406): NCBI GI NO: 21741126 NR Description: OSJNBa0070M12.4
  misc_feature (1)..(292): NCBI GI NO: 15231222 NR Description: expressed protein [Arabidopsis thaliana]
  misc_feature (5)..(407): NCBI GI NO: 34908566 NR Description: P0505D12.10
  misc_feature (156)..(406): NCBI GI NO: 15231222 NR Description: expressed protein [Arabidopsis thaliana]
  misc_feature (4)..(410): NCBI GI NO: 18402223 NR Description: expressed protein [Arabidopsis thaliana]
  misc_feature (4)..(405): NCBI GI NO: 38346713 NR Description: OSJNBa0086O06.11
  misc_feature (4)..(400): NCBI GI NO: 15222819 NR Description: expressed protein [Arabidopsis thaliana]
  misc_feature (4)..(400): NCBI GI NO: 26451730 NR Description: unknown protein [Arabidopsis thaliana]
MDEIDVPPFFVCPISLELMKDPVTVSTGITYDRDSIEKWLFAEVKNDTCPVTKQPLLPDLTPNHTLRRLIQAWCTVNASHGVQRIPTPKPPVDKTLIEKLLRNTSASDSPSLQLRSLRTLKSIASESQSNKRCIESAEGAVNFLATIITTTTTTTTNLLDDDIELEIKTSTAHEALSLLHSIQLSESGLKALLNHPEFINSLTKMMQRGIYESRAYAVFLLNSLSEVADPAQLINLKTDLFTELVQVLKDQVSEKVSKATLQALIQVCSWGRNRVKAVEAGAVPVLVELLLECNERKPIEMVLVLLEILCQSADGRAGLLAHAAGVVIVAKKILRVSTMANDRAAKILLSVCRFSPTPGLVQEMVQLGVVAKLCLVLQVDSGNKAKEIAREILKLHARAWRNSPCISQFACFVSNEFVKERKSTLFLFCS

SEQ ID NO: 8226 - protein, 412 aa, Glycine max
  peptide (1)..(412): Ceres Seq. ID no. 14312155
  misc_feature (1)..(62): Pfam Name: Pfam Description:  U-box domain
  misc_feature (1)..(388): NCBI GI NO: 25408431 NR Description: hypothetical protein At2g35930
  misc_feature (1)..(388): NCBI GI NO: 30686609 NR Description: expressed protein [Arabidopsis thaliana]
  misc_feature (1)..(388): NCBI GI NO: 21741126 NR Description: OSJNBa0070M12.4
  misc_feature (1)..(274): NCBI GI NO: 15231222 NR Description: expressed protein [Arabidopsis thaliana]
  misc_feature (1)..(389): NCBI GI NO: 34908566 NR Description: P0505D12.10
  misc_feature (138)..(388): NCBI GI NO: 15231222 NR Description: expressed protein [Arabidopsis thaliana]
  misc_feature (1)..(392): NCBI GI NO: 18402223 NR Description: expressed protein [Arabidopsis thaliana]
  misc_feature (1)..(387): NCBI GI NO: 38346713 NR Description: OSJNBa0086O06.11
  misc_feature (1)..(382): NCBI GI NO: 15222819 NR Description: expressed protein [Arabidopsis thaliana]
  misc_feature (1)..(382): NCBI GI NO: 26451730 NR Description: unknown protein [Arabidopsis thaliana]
MKDPVTVSTGITYDRDSIEKWLFAEVKNDTCPVTKQPLLPDLTPNHTLRRLIQAWCTVNASHGVQRIPTPKPPVDKTLIEKLLRNTSASDSPSLQLRSLRTLKSIASESQSNKRCIESAEGAVNFLATIITTTTTTTTNLLDDDIELEIKTSTAHEALSLLHSIQLSESGLKALLNHPEFINSLTKMMQRGIYESRAYAVFLLNSLSEVADPAQLINLKTDLFTELVQVLKDQVSEKVSKATLQALIQVCSWGRNRVKAVEAGAVPVLVELLLECNERKPIEMVLVLLEILCQSADGRAGLLAHAAGVVIVAKKILRVSTMANDRAAKILLSVCRFSPTPGLVQEMVQLGVVAKLCLVLQVDSGNKAKEIAREILKLHARAWRNSPCISQFACFVSNEFVKERKSTLFLFCS

SEQ ID NO: 8227 - DNA, 1754 bp, Glycine max
  misc_feature (1)..(1754): Ceres Seq. ID no. 15171626
acacgcaactatttctgactacgttttgctctacgcctctccctctctctcaaaaatcgttctcttcgattttagggttttgttttgctgctgcctccgttccccccttctcataaacaacgcgttttctcttctgcttcgtatctattctttgcttttggttttggttgattcaaggccttcacagcattcgttgcggcattttaatcaatttatccaagcaggactgaatgaactaatggagtctaaaggtgggaaaaagaagtctagtagtagtagtagtaaatcattgttctacgaagctcccctcggatacagcattgaagacgttagaccaaacggtggaatcaagaaattcagatctgctgcttactccaactgcgctcgcaaaccttcctgatatccatccagattgatagttcattgcatgcaaccatagttttattaggttttttcttctttgttttcaattaggtttttgctgctctccttcaaactccgtctttccgaatcctctctttgtgattgtgttctgttctgcttcctaccgcgatagtttctcttctgaagcatggccatggcggtttctgcaattggttttgaaggtttcgagaagaggctggaaatatcctttttccagccgggactttttgctgaccctgagggaatgggtttaagagctcttgcaaagtcccagttggatgagatacttacaccggctgcttgcaccattgtttcatctctcagaaatgatcatgtcgactcctatgttctgtctgagtccagtctctttgtttatgcctacaagatcatcatcaaaacctgtggtactacaaagctactgcttgcaatcccacccatattgaaatttgctgaaatgctttccctcaatgttagatctgtgaattacaccaggggaagtttcatctttcccggtgctcagccctatccccatcgcaacttttctgaggaagttgctattcttgatggctactttggcaagcttagtgcaggaagcaatgcttatattttgggtggccaagacaaatcacagaactggcatgtctactctgcttctgcagattctgtaactccatgcgacaatgtttacactctagagatgtgcatgactggcctggatagagagaaagcacaggttttctacaaagaacaatctgcttcagctgccattatgactgttaattctggcattagaaaaattcttccagattctgagatttgtgactttgactttgagccatgtggttattcaatgaactctgttgaaggtgctgctgtttctaccattcatgttaccccagaagatggtttcagttatgcaagctttgagactgttgggtatgacttcaaagtggtgaatctgaacgaaatggttaagagggtattggcatgttttctcccaactgagttctctgttgcagttcatgtggatggtgcaagcaagttgtttgatcagacgtgttttctggatgttaagggatactgtcgcgaagagaggagccacgaagggcttggaatgggtggttctcttgtctaccaaaaatttgccaagacttgtgactgtggttcacctagatcaactctgaagtgctggaaagaggaagatgaagaagagtagttttcttaagtgtctttattatgtccttgcgaaaataagtccggttttccagacagtgattgtttttctttggtgttttttcccttttatgttagaccattgttagggcgtttgg

SEQ ID NO: 8228 - protein, 355 aa, Glycine max
  peptide (1)..(355): Ceres Seq. ID no. 15171627
  misc_feature (5)..(335): Pfam Name: Pfam Description:  Adenosylmethionine decarboxylase
  misc_feature (1)..(355): NCBI GI NO: 19526455 NR Description: S-adenosylmethionine decarboxylase [Glycine max]
  misc_feature (3)..(355): NCBI GI NO: 15213963 NR Description: S-adenosylmethionine decarboxylase proenzyme
  misc_feature (3)..(355): NCBI GI NO: 3913420 NR Description: S-adenosylmethionine decarboxylase proenzyme
  misc_feature (3)..(355): NCBI GI NO: 18157335 NR Description: S-adenosylmethionine decarboxylase
  misc_feature (1)..(355): NCBI GI NO: 6014931 NR Description: S-adenosylmethionine decarboxylase proenzyme
  misc_feature (2)..(355): NCBI GI NO: 7436597 NR Description: adenosylmethionine decarboxylase (EC 4
  misc_feature (2)..(355): NCBI GI NO: 3913423 NR Description: S-adenosylmethionine decarboxylase proenzyme
  misc_feature (1)..(355): NCBI GI NO: 3913419 NR Description: S-adenosylmethionine decarboxylase proenzyme
  misc_feature (1)..(355): NCBI GI NO: 31980105 NR Description: S-adenosylmethionine decarboxylase proenzyme
  misc_feature (1)..(354): NCBI GI NO: 1076676 NR Description: adenosylmethionine decarboxylase (EC 4
MAMAVSAIGFEGFEKRLEISFFQPGLFADPEGMGLRALAKSQLDEILTPAACTIVSSLRNDHVDSYVLSESSLFVYAYKIIIKTCGTTKLLLAIPPILKFAEMLSLNVRSVNYTRGSFIFPGAQPYPHRNFSEEVAILDGYFGKLSAGSNAYILGGQDKSQNWHVYSASADSVTPCDNVYTLEMCMTGLDREKAQVFYKEQSASAAIMTVNSGIRKILPDSEICDFDFEPCGYSMNSVEGAAVSTIHVTPEDGFSYASFETVGYDFKVVNLNEMVKRVLACFLPTEFSVAVHVDGASKLFDQTCFLDVKGYCREERSHEGLGMGGSLVYQKFAKTCDCGSPRSTLKCWKEEDEEE

SEQ ID NO: 8229 - protein, 353 aa, Glycine max
  peptide (1)..(353): Ceres Seq. ID no. 15171628
  misc_feature (3)..(333): Pfam Name: Pfam Description:  Adenosylmethionine decarboxylase
  misc_feature (1)..(353): NCBI GI NO: 19526455 NR Description: S-adenosylmethionine decarboxylase [Glycine max]
  misc_feature (1)..(353): NCBI GI NO: 15213963 NR Description: S-adenosylmethionine decarboxylase proenzyme
  misc_feature (1)..(353): NCBI GI NO: 3913420 NR Description: S-adenosylmethionine decarboxylase proenzyme
  misc_feature (1)..(353): NCBI GI NO: 18157335 NR Description: S-adenosylmethionine decarboxylase
  misc_feature (1)..(353): NCBI GI NO: 6014931 NR Description: S-adenosylmethionine decarboxylase proenzyme
  misc_feature (1)..(353): NCBI GI NO: 7436597 NR Description: adenosylmethionine decarboxylase (EC 4
  misc_feature (1)..(353): NCBI GI NO: 3913423 NR Description: S-adenosylmethionine decarboxylase proenzyme
  misc_feature (1)..(353): NCBI GI NO: 3913419 NR Description: S-adenosylmethionine decarboxylase proenzyme
  misc_feature (1)..(353): NCBI GI NO: 31980105 NR Description: S-adenosylmethionine decarboxylase proenzyme
  misc_feature (1)..(352): NCBI GI NO: 1076676 NR Description: adenosylmethionine decarboxylase (EC 4
MAVSAIGFEGFEKRLEISFFQPGLFADPEGMGLRALAKSQLDEILTPAACTIVSSLRNDHVDSYVLSESSLFVYAYKIIIKTCGTTKLLLAIPPILKFAEMLSLNVRSVNYTRGSFIFPGAQPYPHRNFSEEVAILDGYFGKLSAGSNAYILGGQDKSQNWHVYSASADSVTPCDNVYTLEMCMTGLDREKAQVFYKEQSASAAIMTVNSGIRKILPDSEICDFDFEPCGYSMNSVEGAAVSTIHVTPEDGFSYASFETVGYDFKVVNLNEMVKRVLACFLPTEFSVAVHVDGASKLFDQTCFLDVKGYCREERSHEGLGMGGSLVYQKFAKTCDCGSPRSTLKCWKEEDEEE

SEQ ID NO: 8230 - protein, 323 aa, Glycine max
  peptide (1)..(323): Ceres Seq. ID no. 15171629
  misc_feature (1)..(303): Pfam Name: Pfam Description:  Adenosylmethionine decarboxylase
  misc_feature (1)..(323): NCBI GI NO: 19526455 NR Description: S-adenosylmethionine decarboxylase [Glycine max]
  misc_feature (1)..(323): NCBI GI NO: 15213963 NR Description: S-adenosylmethionine decarboxylase proenzyme
  misc_feature (1)..(323): NCBI GI NO: 3913420 NR Description: S-adenosylmethionine decarboxylase proenzyme
  misc_feature (1)..(323): NCBI GI NO: 18157335 NR Description: S-adenosylmethionine decarboxylase
  misc_feature (1)..(323): NCBI GI NO: 6014931 NR Description: S-adenosylmethionine decarboxylase proenzyme
  misc_feature (1)..(323): NCBI GI NO: 7436597 NR Description: adenosylmethionine decarboxylase (EC 4
  misc_feature (1)..(323): NCBI GI NO: 3913423 NR Description: S-adenosylmethionine decarboxylase proenzyme
  misc_feature (1)..(323): NCBI GI NO: 3913419 NR Description: S-adenosylmethionine decarboxylase proenzyme
  misc_feature (1)..(323): NCBI GI NO: 31980105 NR Description: S-adenosylmethionine decarboxylase proenzyme
  misc_feature (1)..(322): NCBI GI NO: 1076676 NR Description: adenosylmethionine decarboxylase (EC 4
MGLRALAKSQLDEILTPAACTIVSSLRNDHVDSYVLSESSLFVYAYKIIIKTCGTTKLLLAIPPILKFAEMLSLNVRSVNYTRGSFIFPGAQPYPHRNFSEEVAILDGYFGKLSAGSNAYILGGQDKSQNWHVYSASADSVTPCDNVYTLEMCMTGLDREKAQVFYKEQSASAAIMTVNSGIRKILPDSEICDFDFEPCGYSMNSVEGAAVSTIHVTPEDGFSYASFETVGYDFKVVNLNEMVKRVLACFLPTEFSVAVHVDGASKLFDQTCFLDVKGYCREERSHEGLGMGGSLVYQKFAKTCDCGSPRSTLKCWKEEDEEE

SEQ ID NO: 8231 - DNA, 1134 bp, Glycine max
  misc_feature (1)..(1134): Ceres Seq. ID no. 14315438
atgttctttgtttgattgaggcttctgaacagtttctgacaccgaaattcagccacaaagttgaccatcttgggatggatgagaatatcatcatgttccaccatttccccacattgatacaacaaggagattccaacaattgaaaactccttatcatctttctcttgcaacatcgtttcgcggttcctttgccgtgatttcaattgttgcataagaaaacatcactcactacttctttcctctcctttttcattcaatttctctgattgacacaattgccgcccagatcagtgattgacccaattgagaaaaaaaccttaaaagttccgggttttttttttctttaattgttgctggttttgcaggtggcccagttgggaattcaagatggttctgtgatttaacaagtgccctcttgaaatactacccgagtgagatacttcgatttaactccctctgttgatggctgaaactcaattgaagtgattcactggactactttatcatcttggtctgaggttgaagctatttaatttctgaatttccgtgagtttcttaatccctgagtatggccgggagccaagatcagttagagatcaagtttcggttgagtgatggtacggatattggccccaaaagttattctgctgctactagtattgtaacactaaaagaaagtgttcttgctcaatggccaaaagataaggagtatggaccaagaactgtaaaagatttgaagttaattagtgctggaaaagtattggagaacaacaaaacagtgggagactgtcagagtccattgtgtgatctacctggtggagttacaacaatgcatgtggttgtgcaaccaccttctgtggaggaagatatgaaagtagcaagcgaagcaaagcagagcaaatgtgtttgtgtgatattatagtgtccagattgaatagaaggtgtcatctatttaggtggttaaaagttacacttgtattcattttaaaagtaatctatggctttcaaaagatttcctcatacacaaactgtttcgttgcatgcctcattgtctaattgatgtaaatgctgattgaaatgagaactctaaaattattctcgtgcttcagctagatgcaaagtgcacctagagtt

SEQ ID NO: 8232 - protein, 117 aa, Glycine max
  peptide (1)..(117): Ceres Seq. ID no. 14315439
  misc_feature (8)..(95): Pfam Name: Pfam Description:  Ubiquitin family
  misc_feature (1)..(115): NCBI GI NO: 18417680 NR Description: expressed protein [Arabidopsis thaliana]
  misc_feature (1)..(117): NCBI GI NO: 15232032 NR Description: ubiquitin family [Arabidopsis thaliana]
  misc_feature (1)..(99): NCBI GI NO: 11358132 NR Description: hypothetical protein T20K14_70 - Arabidopsisthaliana
  misc_feature (1)..(117): NCBI GI NO: 15219188 NR Description: ubiquitin family [Arabidopsis thaliana]
  misc_feature (5)..(117): NCBI GI NO: 4097587 NR Description: NTGP5 [Nicotiana tabacum]
  misc_feature (3)..(117): NCBI GI NO: 21592966 NR Description: ubiquitin-fusion protein, putative
  misc_feature (3)..(117): NCBI GI NO: 15218145 NR Description: expressed protein [Arabidopsis thaliana]
  misc_feature (1)..(99): NCBI GI NO: 25402954 NR Description: protein F2E2.12 [imported] - Arabidopsis thaliana
  misc_feature (5)..(117): NCBI GI NO: 15234839 NR Description: ubiquitin family [Arabidopsis thaliana]
  misc_feature (2)..(117): NCBI GI NO: 38347220 NR Description: OSJNBa0055C08.14
MAGSQDQLEIKFRLSDGTDIGPKSYSAATSIVTLKESVLAQWPKDKEYGPRTVKDLKLISAGKVLENNKTVGDCQSPLCDLPGGVTTMHVVVQPPSVEEDMKVASEAKQSKCVCVIL

SEQ ID NO: 8233 - DNA, 1468 bp, Glycine max
  misc_feature (1)..(1468): Ceres Seq. ID no. 14312817
cacatttagctaccacgaaacctaatttcaatttctctgtgaagagtcattttccgatgaaacgcaccgttcggcccctcttcgcgctcctcctcctcctcgtattcgccgccacgctcacctcacgcgccgtcctccgccgcggcatcctctccatcgagctcgaatcccgcgtccggatccgccgccatattccgccgccgccgcagctcaacgccacgctcctccaccacgcagccgtcgaaattggcgaggagaagttcaagcaggagatccagagcctccttgatggcaacttcggcagccacgcgcgccaccgcaccttcgtctcctggcgccgcttcatccaccacgaccgcggcagcgccggagtcaccgccgccaaactcccggcgactatccggtcgccgctcttctaccgctcctggctcgacttccggaaggtcctccacgactggttccggaagcgacgattccaacccggtatcatgtccgggttgactcggtcaattaagcttccaattgattcacacaacaacaacaacaaactacaaaccaataacaaaaacaaatactcttcctgtgccgtagttggaaacagcggaattttgttgaatagagactatggtagtgaaattgattcccatgagtttgtgataaggttgaacaatgctagagttgatcactttgagaccaaggttggaaaaaaaactagcatttcattcatgaatagtaacatcttgcatttgtgtgctagaaggggagggtgtttctgccacccttatggtgaccgtgttccgattgttatgtacatttgtcaagccttgcatttcatggactacactgtgtgcaatgcttctcacaaggctcctttgttggtgactgatcctaggtttgatgtgttgtgtgcgaggattgtgaagtactattcgttgaagaggtttgtggaggagagtgggaagggtttggagaagtggggagaggctcatgatggttctctttttcactactcttcagggatgcaggctgtgatgctggctttggggatttgtgatagggttagcatttttgggtttgggaaatcgacttctgctaagcaccattaccacactaaccagaaggctgagcttcacttgcatgactatgaggctgagtatgcgttttatagggaccttgtggatgggaaaaggcctataccctttcttgaggataggtttaaggttcctcctgttgtcatgtatcaatgatgggtgctgaactgctgctgctgctgcaagtggtggtggagggcctctgtgaattgttgttctgttattgtaatacttgtgaaatgcacagatagtggaaagcaaaatactgattcaagattcgtttttgttgtttgtgttgtactgtccaacatgaagcctcaaggcaacaccaagtgtaaattttgttggttagatcaatacagttctttgactccatc

SEQ ID NO: 8234 - protein, 414 aa, Glycine max
  peptide (1)..(414): Ceres Seq. ID no. 14312818
  misc_feature (132)..(396): Pfam Name: sialyltransferase Pfam Description: Glycosyltransferase family 29
  misc_feature (19)..(413): NCBI GI NO: 15223174 NR Description: sialyltransferase family [Arabidopsis thaliana]
  misc_feature (19)..(413): NCBI GI NO: 34908454 NR Description: P0683F02.18
  misc_feature (154)..(414): NCBI GI NO: 21743080 NR Description: OSJNBb0002J11.10
  misc_feature (301)..(413): NCBI GI NO: 28416597 NR Description: At1g08280 [Arabidopsis thaliana]
  misc_feature (135)..(242): NCBI GI NO: 13928968 NR Description: sialyltransferase 5 [Rattus norvegicus]
  misc_feature (323)..(383): NCBI GI NO: 13928968 NR Description: sialyltransferase 5 [Rattus norvegicus]
  misc_feature (135)..(320): NCBI GI NO: 5902082 NR Description: sialyltransferase 4B; sialyltransferase 4B
  misc_feature (135)..(242): NCBI GI NO: 26343773 NR Description: unnamed protein product [Mus musculus]
  misc_feature (323)..(383): NCBI GI NO: 5902082 NR Description: sialyltransferase 4B; sialyltransferase 4B
  misc_feature (323)..(383): NCBI GI NO: 26343773 NR Description: unnamed protein product [Mus musculus]
HLATTKPNFNFSVKSHFPMKRTVRPLFALLLLLVFAATLTSRAVLRRGILSIELESRVRIRRHIPPPPQLNATLLHHAAVEIGEEKFKQEIQSLLDGNFGSHARHRTFVSWRRFIHHDRGSAGVTAAKLPATIRSPLFYRSWLDFRKVLHDWFRKRRFQPGIMSGLTRSIKLPIDSHNNNNKLQTNNKNKYSSCAVVGNSGILLNRDYGSEIDSHEFVIRLNNARVDHFETKVGKKTSISFMNSNILHLCARRGGCFCHPYGDRVPIVMYICQALHFMDYTVCNASHKAPLLVTDPRFDVLCARIVKYYSLKRFVEESGKGLEKWGEAHDGSLFHYSSGMQAVMLALGICDRVSIFGFGKSTSAKHHYHTNQKAELHLHDYEAEYAFYRDLVDGKRPIPFLEDRFKVPPVVMYQ

SEQ ID NO: 8235 - protein, 396 aa, Glycine max
  peptide (1)..(396): Ceres Seq. ID no. 14312819
  misc_feature (114)..(378): Pfam Name: sialyltransferase Pfam Description: Glycosyltransferase family 29
  misc_feature (1)..(395): NCBI GI NO: 15223174 NR Description: sialyltransferase family [Arabidopsis thaliana]
  misc_feature (1)..(395): NCBI GI NO: 34908454 NR Description: P0683F02.18
  misc_feature (136)..(396): NCBI GI NO: 21743080 NR Description: OSJNBb0002J11.10
  misc_feature (283)..(395): NCBI GI NO: 28416597 NR Description: At1g08280 [Arabidopsis thaliana]
  misc_feature (117)..(224): NCBI GI NO: 13928968 NR Description: sialyltransferase 5 [Rattus norvegicus]
  misc_feature (305)..(365): NCBI GI NO: 13928968 NR Description: sialyltransferase 5 [Rattus norvegicus]
  misc_feature (117)..(302): NCBI GI NO: 5902082 NR Description: sialyltransferase 4B; sialyltransferase 4B
  misc_feature (117)..(224): NCBI GI NO: 26343773 NR Description: unnamed protein product [Mus musculus]
  misc_feature (305)..(365): NCBI GI NO: 5902082 NR Description: sialyltransferase 4B; sialyltransferase 4B
  misc_feature (305)..(365): NCBI GI NO: 26343773 NR Description: unnamed protein product [Mus musculus]
MKRTVRPLFALLLLLVFAATLTSRAVLRRGILSIELESRVRIRRHIPPPPQLNATLLHHAAVEIGEEKFKQEIQSLLDGNFGSHARHRTFVSWRRFIHHDRGSAGVTAAKLPATIRSPLFYRSWLDFRKVLHDWFRKRRFQPGIMSGLTRSIKLPIDSHNNNNKLQTNNKNKYSSCAVVGNSGILLNRDYGSEIDSHEFVIRLNNARVDHFETKVGKKTSISFMNSNILHLCARRGGCFCHPYGDRVPIVMYICQALHFMDYTVCNASHKAPLLVTDPRFDVLCARIVKYYSLKRFVEESGKGLEKWGEAHDGSLFHYSSGMQAVMLALGICDRVSIFGFGKSTSAKHHYHTNQKAELHLHDYEAEYAFYRDLVDGKRPIPFLEDRFKVPPVVMYQ

SEQ ID NO: 8236 - protein, 252 aa, Glycine max
  peptide (1)..(252): Ceres Seq. ID no. 14312820
  misc_feature (1)..(234): Pfam Name: sialyltransferase Pfam Description: Glycosyltransferase family 29
  misc_feature (1)..(251): NCBI GI NO: 15223174 NR Description: sialyltransferase family [Arabidopsis thaliana]
  misc_feature (1)..(251): NCBI GI NO: 34908454 NR Description: P0683F02.18
  misc_feature (1)..(252): NCBI GI NO: 21743080 NR Description: OSJNBb0002J11.10
  misc_feature (139)..(251): NCBI GI NO: 28416597 NR Description: At1g08280 [Arabidopsis thaliana]
  misc_feature (1)..(80): NCBI GI NO: 13928968 NR Description: sialyltransferase 5 [Rattus norvegicus]
  misc_feature (161)..(221): NCBI GI NO: 13928968 NR Description: sialyltransferase 5 [Rattus norvegicus]
  misc_feature (1)..(158): NCBI GI NO: 5902082 NR Description: sialyltransferase 4B; sialyltransferase 4B
  misc_feature (1)..(80): NCBI GI NO: 26343773 NR Description: unnamed protein product [Mus musculus]
  misc_feature (161)..(221): NCBI GI NO: 5902082 NR Description: sialyltransferase 4B; sialyltransferase 4B
  misc_feature (161)..(221): NCBI GI NO: 26343773 NR Description: unnamed protein product [Mus musculus]
MSGLTRSIKLPIDSHNNNNKLQTNNKNKYSSCAVVGNSGILLNRDYGSEIDSHEFVIRLNNARVDHFETKVGKKTSISFMNSNILHLCARRGGCFCHPYGDRVPIVMYICQALHFMDYTVCNASHKAPLLVTDPRFDVLCARIVKYYSLKRFVEESGKGLEKWGEAHDGSLFHYSSGMQAVMLALGICDRVSIFGFGKSTSAKHHYHTNQKAELHLHDYEAEYAFYRDLVDGKRPIPFLEDRFKVPPVVMYQ

SEQ ID NO: 8237 - DNA, 1341 bp, Glycine max
  misc_feature (1)..(1341): Ceres Seq. ID no. 14312163
gcttcgttgcttggttggttcaattgtatcagtatatactcagaagccatgatattagttgatggcattccattttctacccattcatctcaccctcagggaaaggatattctacttgatttgttggaaaatcccattctggtatcagcctcaaactctttgaaggctaactcagagaggaagttctcagtatctgatgagtctagtccagagagatcaaaatgggtttatatattccagagagaatatgctaccgttgaccccgcccttgttgattttgttggcaccgatgaagcaacaacgtgtgttggccttgttattcggaaccaaaagaatggaatgacgtcagttgcccatatggattcaccaaaaattgtagaaatgggcctctcccaaatgttatcatcactcgtcgacaacagtttggagactgagtttgatgtgcatcttattggggggtttgaagatgtctcactgcaagtctggccagggtcttctgctttgttagagaattttcaatatatagtttccactcagtgaaagagtaattgtagctggatctattgaacttttttgcagcatgcaaatggtagcacagtatcagaaagccctgcagatttggatggttattcctttcctctgtgtttaaagattgttcacactttatggtcaagagaggagaagtttcacatccgaactatctgtgttcttggacataataccagaagggattctgatggaaacacatacccctttttcaatggatttgtggcggagactacaacaggaatcatcatcccagctatctttgatagaacttctagatgtccagatgaaattgtcagaagaatacgagtatccgtgtcttatgaagatgccaactggaacggaaagttactagaaacatatgattctggcattgactgtttcaaaatcgctccttgtcgctggactcttcgccaaaatcatattgcttcatcacttctgaactattctgattccgaaattctttcaatatgttctacatcacctactgctgaagcctcagattttgtggagaatttaaaaaggcagtggaattatttgatcgagcatccacactggacagaaacctttcccaagaaacagcctcgcacttttgcaaggagttcttctgatggaaggtggataaggtgttgatgacattccaaggttgcgtaggctaatccttgtcaataattagattgccttattaaaatggtcatctctcattaaacgtttcatttctcattcctgttaagttatcaaattgcagccatctttagttttgaactaatatgatatttaattatcattgtgctg

SEQ ID NO: 8238 - protein, 179 aa, Glycine max
  peptide (1)..(179): Ceres Seq. ID no. 14312164
  misc_feature (17)..(160): NCBI GI NO: 18406532 NR Description: expressed protein [Arabidopsis thaliana]
  misc_feature (17)..(160): NCBI GI NO: 21554202 NR Description: unknown [Arabidopsis thaliana]
  misc_feature (114)..(160): NCBI GI NO: 7486430 NR Description: hypothetical protein At2g44420
  misc_feature (64)..(156): NCBI GI NO: 38382972 NR Description: Unknown (protein for MGC:77869) [Danio rerio]
  misc_feature (76)..(156): NCBI GI NO: 27735049 NR Description: N-terminal Asn amidase [Homo sapiens]
  misc_feature (76)..(156): NCBI GI NO: 33150674 NR Description: N-terminal asparagine amidohydrolase
ASLLGWFNCISIYSEAMILVDGIPFSTHSSHPQGKDILLDLLENPILVSASNSLKANSERKFSVSDESSPERSKWVYIFQREYATVDPALVDFVGTDEATTCVGLVIRNQKNGMTSVAHMDSPKIVEMGLSQMLSSLVDNSLETEFDVHLIGGFEDVSLQVWPGSSALLENFQYIVSTQ

SEQ ID NO: 8239 - protein, 163 aa, Glycine max
  peptide (1)..(163): Ceres Seq. ID no. 14312165
  misc_feature (1)..(144): NCBI GI NO: 18406532 NR Description: expressed protein [Arabidopsis thaliana]
  misc_feature (1)..(144): NCBI GI NO: 21554202 NR Description: unknown [Arabidopsis thaliana]
  misc_feature (98)..(144): NCBI GI NO: 7486430 NR Description: hypothetical protein At2g44420
  misc_feature (48)..(140): NCBI GI NO: 38382972 NR Description: Unknown (protein for MGC:77869) [Danio rerio]
  misc_feature (60)..(140): NCBI GI NO: 27735049 NR Description: N-terminal Asn amidase [Homo sapiens]
  misc_feature (60)..(140): NCBI GI NO: 33150674 NR Description: N-terminal asparagine amidohydrolase
MILVDGIPFSTHSSHPQGKDILLDLLENPILVSASNSLKANSERKFSVSDESSPERSKWVYIFQREYATVDPALVDFVGTDEATTCVGLVIRNQKNGMTSVAHMDSPKIVEMGLSQMLSSLVDNSLETEFDVHLIGGFEDVSLQVWPGSSALLENFQYIVSTQ

SEQ ID NO: 8240 - DNA, 1372 bp, Glycine max
  misc_feature (1)..(1372): Ceres Seq. ID no. 15171606
aaaaaaaaaaaaattttaacctcaccctctttacccacaccctctctctctctctctctgtcacgcacagagaaaaactcagacacccacgttcacacttcgcacacaccatctctcactgttctttcttcttcctctttttcttttttttttttcttttctcttaatggaatgatggaacacaacatcatcgtcaacaacaacgtgatcgcaccgtttgtcataaaaacctacaatatggtgaacgatcccaccaccgataaactcatcacgtggggcccagccaacaacagcttcatcgtcctcgatcccctcgacttctcccactccctcctccctactttcttcaagcacaacaacttctccagcttcgttcgccaactcaacacctatggtttcagaaaggtggatccggatcggtgggagttcgcgaacgagtggttcctgcgaggacaaaagcacttattgaggaacatcgtgcggaagaagcacggtggagctgggaggaccaattccaattcgcattattcgcatcccttgaagctggaggagttggacgacgaggctatggtgatggagatagcgaggttgaaggaggagcaaaaagcgttggaggaagagcttcatgaaatgaacaagaggttagagacaacagaaaaacgaccacaacaaatgatggcttttctgtgtaaggttgtcgaggacccgcagattctttctcggattctccgagaaagagaaaagaaacacctgggagagaaaaagcgacgcctcattccgcctccgccgccgacggcagcgacgtcgtcgtcgtcgtcctccggcatcaagacagagttcgaagaagacgaaggtaattataatatcaagtcttcgtcgccggagacagggttggaaatcgacaacaatagtaacaatatttgttcgccgccgccgctggggtgttggggtgaacagggttgttatgggtacaattgcgcctccgtgccggcacctttgacggtggtagcgccggcgtttccgacgatgggaggagggtatttgaggcgtggggggttttggggggaaatggcggcggaggggaatgcggtgccgccttatccgttttcgttgttggaagggggcttttagatttagttttaggttatgaaatgaatgaattattactgccacaaaatttcatcttggattttctgtcgtattgaaagttctatccttttttgtgcgttgattctgtgtaaagaaaaaaggttgggaaaaagagtaaaaaggtagtgggaaaattgttagatatttatagttgtgttcggtttcaggttttttttttcataaatattgtttttaaataaatgctttgcggatggtgtagacc

SEQ ID NO: 8241 - protein, 376 aa, Glycine max
  peptide (1)..(376): Ceres Seq. ID no. 15171607
  misc_feature (71)..(248): Pfam Name: Pfam Description:  HSF-type DNA-binding
  misc_feature (66)..(376): NCBI GI NO: 15230127 NR Description: heat shock transcription factor family
  misc_feature (72)..(273): NCBI GI NO: 28971956 NR Description: putative heat shock transcription factor
  misc_feature (72)..(273): NCBI GI NO: 33087081 NR Description: heat stress protein
  misc_feature (70)..(248): NCBI GI NO: 34910182 NR Description: putative heat shock transcription factor
  misc_feature (72)..(310): NCBI GI NO: 729774 NR Description: HEAT SHOCK FACTOR PROTEIN HSF30
  misc_feature (72)..(262): NCBI GI NO: 15225255 NR Description: heat shock transcription factor family
  misc_feature (72)..(307): NCBI GI NO: 37534406 NR Description: putative auxin-induced protein
  misc_feature (65)..(247): NCBI GI NO: 29126355 NR Description: putative heat shock transcription factor
  misc_feature (68)..(245): NCBI GI NO: 25296101 NR Description: heat shock transcription factor HSF3
  misc_feature (68)..(245): NCBI GI NO: 27261140 NR Description: HSF3 DNA-binding domain/ VP16 activation domainfusion
KKKKILTSPSLPTPSLSLSLSRTEKNSDTHVHTSHTPSLTVLSSSSFSFFFFFSLNGMMEHNIIVNNNVIAPFVIKTYNMVNDPTTDKLITWGPANNSFIVLDPLDFSHSLLPTFFKHNNFSSFVRQLNTYGFRKVDPDRWEFANEWFLRGQKHLLRNIVRKKHGGAGRTNSNSHYSHPLKLEELDDEAMVMEIARLKEEQKALEEELHEMNKRLETTEKRPQQMMAFLCKVVEDPQILSRILREREKKHLGEKKRRLIPPPPPTAATSSSSSSGIKTEFEEDEGNYNIKSSSPETGLEIDNNSNNICSPPPLGCWGEQGCYGYNCASVPAPLTVVAPAFPTMGGGYLRRGGFWGEMAAEGNAVPPYPFSLLEGGF

SEQ ID NO: 8242 - protein, 319 aa, Glycine max
  peptide (1)..(319): Ceres Seq. ID no. 15171608
  misc_feature (14)..(191): Pfam Name: Pfam Description:  HSF-type DNA-binding
  misc_feature (9)..(319): NCBI GI NO: 15230127 NR Description: heat shock transcription factor family
  misc_feature (15)..(216): NCBI GI NO: 28971956 NR Description: putative heat shock transcription factor
  misc_feature (15)..(216): NCBI GI NO: 33087081 NR Description: heat stress protein
  misc_feature (13)..(191): NCBI GI NO: 34910182 NR Description: putative heat shock transcription factor
  misc_feature (15)..(253): NCBI GI NO: 729774 NR Description: HEAT SHOCK FACTOR PROTEIN HSF30
  misc_feature (15)..(205): NCBI GI NO: 15225255 NR Description: heat shock transcription factor family
  misc_feature (15)..(250): NCBI GI NO: 37534406 NR Description: putative auxin-induced protein
  misc_feature (8)..(190): NCBI GI NO: 29126355 NR Description: putative heat shock transcription factor
  misc_feature (11)..(188): NCBI GI NO: 25296101 NR Description: heat shock transcription factor HSF3
  misc_feature (11)..(188): NCBI GI NO: 30686034 NR Description: heat shock transcription factor 3 (HSF3)
MMEHNIIVNNNVIAPFVIKTYNMVNDPTTDKLITWGPANNSFIVLDPLDFSHSLLPTFFKHNNFSSFVRQLNTYGFRKVDPDRWEFANEWFLRGQKHLLRNIVRKKHGGAGRTNSNSHYSHPLKLEELDDEAMVMEIARLKEEQKALEEELHEMNKRLETTEKRPQQMMAFLCKVVEDPQILSRILREREKKHLGEKKRRLIPPPPPTAATSSSSSSGIKTEFEEDEGNYNIKSSSPETGLEIDNNSNNICSPPPLGCWGEQGCYGYNCASVPAPLTVVAPAFPTMGGGYLRRGGFWGEMAAEGNAVPPYPFSLLEGGF

SEQ ID NO: 8243 - protein, 318 aa, Glycine max
  peptide (1)..(318): Ceres Seq. ID no. 15171609
  misc_feature (13)..(190): Pfam Name: Pfam Description:  HSF-type DNA-binding
  misc_feature (8)..(318): NCBI GI NO: 15230127 NR Description: heat shock transcription factor family
  misc_feature (14)..(215): NCBI GI NO: 28971956 NR Description: putative heat shock transcription factor
  misc_feature (14)..(215): NCBI GI NO: 33087081 NR Description: heat stress protein
  misc_feature (12)..(190): NCBI GI NO: 34910182 NR Description: putative heat shock transcription factor
  misc_feature (14)..(252): NCBI GI NO: 729774 NR Description: HEAT SHOCK FACTOR PROTEIN HSF30
  misc_feature (14)..(204): NCBI GI NO: 15225255 NR Description: heat shock transcription factor family
  misc_feature (14)..(249): NCBI GI NO: 37534406 NR Description: putative auxin-induced protein
  misc_feature (7)..(189): NCBI GI NO: 29126355 NR Description: putative heat shock transcription factor
  misc_feature (10)..(187): NCBI GI NO: 25296101 NR Description: heat shock transcription factor HSF3
  misc_feature (10)..(187): NCBI GI NO: 27261140 NR Description: HSF3 DNA-binding domain/ VP16 activation domainfusion
MEHNIIVNNNVIAPFVIKTYNMVNDPTTDKLITWGPANNSFIVLDPLDFSHSLLPTFFKHNNFSSFVRQLNTYGFRKVDPDRWEFANEWFLRGQKHLLRNIVRKKHGGAGRTNSNSHYSHPLKLEELDDEAMVMEIARLKEEQKALEEELHEMNKRLETTEKRPQQMMAFLCKVVEDPQILSRILREREKKHLGEKKRRLIPPPPPTAATSSSSSSGIKTEFEEDEGNYNIKSSSPETGLEIDNNSNNICSPPPLGCWGEQGCYGYNCASVPAPLTVVAPAFPTMGGGYLRRGGFWGEMAAEGNAVPPYPFSLLEGGF

SEQ ID NO: 8244 - DNA, 1282 bp, Glycine max
  misc_feature (1)..(1282): Ceres Seq. ID no. 12608114
attacctaccactgtcactatgaatgctctcttttgtttttcaccttctttttttttttttgtgtgttcatcttcaacttcatcctaaccttttacacatcatattttcggcttagaacaaccaaaagcaagttcacattgtcttgtcttttcgggtagtggctgtagaggaaacactcctgttttgtgcgcatattgatattggaatagtctttctctgaaccccatttttgcaaaaaggaagaaagagaaagagagagagagagagagagaagagatatacactgccaagaagaagaacatgaaaattcagtgcgatgtgtgtgagaaagccccggcaaccgtgatttgctgcgcagatgaggcagctttgtgtgccaaatgtgacgttgaagttcatgctgcaaacaagcttgcaagcaagcaccagaggcttctccttcaatctttatctaacaagcttcccagatgtgacatatgtcaagataagccagctttcatattttgtgttgaggacagagcactcttctgtaaagactgtgatgaacctattcatttagccagtagcctttctgcaaaccaccagcgcttccttgctactggtatccgggtggctttgggttctaattgcaccaaaggcaatgaaaaaggtcacgtggaaccatctaaaccaaaagcacaagaagttcctgcgaaaattccttctcagcaagtgcctagcttcacatcctcttgggcagttgatgacttgttggaattaacagactttgaatcaccagacaaagttcagaagcaatcccttgagtttggagaacttgaatggctagcagatgtaggcctttttggtgaacagtttcctcatgaagctttagcggcggctgaagttcctcagcttccaatgactagcagtgttggctcacacaaagcccccaaatccttgttgtcttacaaaaagcctaggattgaagtcctagatgaagatgatgatgagcacttcaccgtaccagatctcggataaagcacatggtcatgtaaacaattgcctgaatcagtaggcagtaggttgacgagttgtatatgcatactaggtgcagatgttaatgaactcttcaatgtgcctggtctagctgaagctcaggaccatgaggactattgcatgaatctgtagattgatgagctgtatatgcatacttctcttaggacagtaagtaatgaagtatgttaactagcttgtggagttgataaatatctcattttaggagctatgaatggtttgattttt

SEQ ID NO: 8245 - protein, 238 aa, Glycine max
  peptide (1)..(238): Ceres Seq. ID no. 12608115
  misc_feature (1)..(47): Pfam Name: Pfam Description:  B-box zinc finger
  misc_feature (1)..(238): NCBI GI NO: 15221367 NR Description: salt-tolerance protein; protein id: At1g06040
  misc_feature (1)..(238): NCBI GI NO: 18402646 NR Description: salt tolerance-like protein; protein id:At2g31380
  misc_feature (1)..(238): NCBI GI NO: 25408150 NR Description: hypothetical protein At2g31380
  misc_feature (1)..(162): NCBI GI NO: 30679541 NR Description: salt-tolerance protein [Arabidopsis thaliana]
  misc_feature (1)..(192): NCBI GI NO: 3618314 NR Description: zinc finger protein
  misc_feature (1)..(198): NCBI GI NO: 3618310 NR Description: zinc finger protein
  misc_feature (1)..(130): NCBI GI NO: 17433085 NR Description: Zinc finger protein constans-like 7
  misc_feature (1)..(130): NCBI GI NO: 18412037 NR Description: CONSTANS B-box zinc finger family protein
  misc_feature (1)..(152): NCBI GI NO: 34903708 NR Description: putative zinc-finger protein
  misc_feature (1)..(139): NCBI GI NO: 15222289 NR Description: CONSTANS B-box zinc finger family protein
MKIQCDVCEKAPATVICCADEAALCAKCDVEVHAANKLASKHQRLLLQSLSNKLPRCDICQDKPAFIFCVEDRALFCKDCDEPIHLASSLSANHQRFLATGIRVALGSNCTKGNEKGHVEPSKPKAQEVPAKIPSQQVPSFTSSWAVDDLLELTDFESPDKVQKQSLEFGELEWLADVGLFGEQFPHEALAAAEVPQLPMTSSVGSHKAPKSLLSYKKPRIEVLDEDDDEHFTVPDLG

SEQ ID NO: 8246 - DNA, 1068 bp, Glycine max
  misc_feature (1)..(1068): Ceres Seq. ID no. 14305778
acattaaagtccacgcacatagatttgctttcacatccatcacctacaccaccaaaaccaaatcaagccgtgaagacgtgaaagaaaaaacaaatttatcttactctacaattattttaaacaaatttaattctctaatcttatcttagggaacatattcattgtgcttcaaattggctaagaaaataaaattaaaaataattaataaagtattaaattctgccctctttcgtatcctacactatccgcaaagggcgagaatccgcgacgtcgttttcaaacacggcttccatagtgaaggactgattcaataattgacgagtggtttgtttggtttgataggcatagacgacaaccaagtacagagaagtaaagagagttttgctttttgaaatggcagcgtcgtcgtcgtcggagaagcaagtggtgctgataggcatagacgacagcgagcagagcacgtacgcgctgaattgggctttggatcacttcttcccgagcccaatcttcaagctcgttctcatccactcaaggcccaccgccacctccgccgtgggcttcgccggccctggagccgctgagatcttgcctattgtagattccgatttgagaaagattgccgccagagtcctcgaaaccgccaaacaactttgcttcaacaaatccgtgaatgatgtgacagcggaagtggtggaaggtgatcctagaaatgttctttgtgatgctgtggataagtaccgtgctgcaatattggttgtgggcagccatggttatggggctataaaaagggcggttttaggtagtgtcagtgactactgtgctcatcatgctcactgcactgtgatgatcgtgaaaaagccaaaaatcaaacactgatctgtaatggctgcgtctatatagtacaacaataaacataaccggccctttcagccaaagaaaaaaaataatgttcacagaaattcgtaactatgcttgttgtatggatactacatattgtccttatggtttgatacgttgaggtacagcttatttttaaagatggaagtatggaaccatcaaaaagttatt

SEQ ID NO: 8247 - protein, 160 aa, Glycine max
  peptide (1)..(160): Ceres Seq. ID no. 14305779
  misc_feature (12)..(154): Pfam Name: Pfam Description:  Universal stress protein family
  misc_feature (14)..(160): NCBI GI NO: 38016525 NR Description: fiber protein Fb19 [Gossypium barbadense]
  misc_feature (9)..(159): NCBI GI NO: 18407428 NR Description: expressed protein [Arabidopsis thaliana]
  misc_feature (9)..(159): NCBI GI NO: 21555580 NR Description: unknown [Arabidopsis thaliana]
  misc_feature (1)..(159): NCBI GI NO: 22831145 NR Description: universal stress protein USP1-like protein
  misc_feature (2)..(159): NCBI GI NO: 20067187 NR Description: putative universal stress protein USP1
  misc_feature (6)..(157): NCBI GI NO: 30681321 NR Description: ER6 protein -related [Arabidopsis thaliana]
  misc_feature (1)..(157): NCBI GI NO: 18399413 NR Description: ethylene-responsive protein -related
  misc_feature (6)..(157): NCBI GI NO: 25402571 NR Description: hypothetical protein
  misc_feature (1)..(157): NCBI GI NO: 30681955 NR Description: ethylene-responsive protein -related
  misc_feature (1)..(117): NCBI GI NO: 15239780 NR Description: hypothetical protein [Arabidopsis thaliana]
MAASSSSEKQVVLIGIDDSEQSTYALNWALDHFFPSPIFKLVLIHSRPTATSAVGFAGPGAAEILPIVDSDLRKIAARVLETAKQLCFNKSVNDVTAEVVEGDPRNVLCDAVDKYRAAILVVGSHGYGAIKRAVLGSVSDYCAHHAHCTVMIVKKPKIKH

SEQ ID NO: 8248 - DNA, 921 bp, Glycine max
  misc_feature (1)..(921): Ceres Seq. ID no. 14316363
aatcttgttcacgttacacgttttccatctctcttcttcctttttctcttcctttcttttagttctgttattgcaattttgccaggcctataatgcaaagttaaccaacatttgattccattctttctgtttccttcttcaaatatctttgtatcttgttttgcaagtaaaacaagaacaaccttatttgtatatattttagaaacttcattatttgacagtatattcacccatagttgaatttcaatggggaaaggaggtggttgctttccaagcaaaacaaaggcaccaatttctggagcagaaaaggatccaattattgttgaaagtctaattccaacaaatgatccaagtagcacaagccaagaggtggaagcaccagcaccagcaccagcagcagtgaaaaagctgaaaattttcattgtgttctactcaacttatggccatgtggagtcattggcaaggtccttgaagaaaggggttgattcaattgaaggcgttgaaggggtgttgtaccgcgtgctggagacgctgccaaaggaggttctggaactcatgaaggcacctgagaaggatgagacagtgccactcatatctgaagacaagttggtggaggctgatggcttgctgtttggttttccaacaaggtatggcagcatggcggcgcagatgaaggtgtttttcgattcgaccggtcagttgtggagagagcagaagctggcaggggtgcctgctggcttctttgtcagcactggcactcagggtggaggccaagaaaccacagcgtaagaaggccttttattttctgccttcattgatgcatgcataaataagagccttgctcttcattttattttctttaatggaacttcagaattttatctatgtatataaataaattgatagaatttaattagaaag

SEQ ID NO: 8249 - protein, 180 aa, Glycine max
  peptide (1)..(180): Ceres Seq. ID no. 14316364
  misc_feature (12)..(180): NCBI GI NO: 21593010 NR Description: minor allergen [Arabidopsis thaliana]
  misc_feature (12)..(180): NCBI GI NO: 15234512 NR Description: quinone reductase family [Arabidopsis thaliana]
  misc_feature (1)..(180): NCBI GI NO: 18087679 NR Description: putative reductase [Oryza sativa]
  misc_feature (56)..(180): NCBI GI NO: 5031275 NR Description: unknown [Prunus armeniaca]
  misc_feature (56)..(180): NCBI GI NO: 12484052 NR Description: quinone-oxidoreductase QR2
  misc_feature (55)..(179): NCBI GI NO: 34910128 NR Description: putative 1,4-benzoquinone reductase
  misc_feature (56)..(179): NCBI GI NO: 21068664 NR Description: putative quinone oxidoreductase [Cicer arietinum]
  misc_feature (55)..(180): NCBI GI NO: 2564066 NR Description: LEDI-3 protein [Lithospermum erythrorhizon]
  misc_feature (56)..(180): NCBI GI NO: 30687535 NR Description: quinone reductase family [Arabidopsis thaliana]
  misc_feature (56)..(180): NCBI GI NO: 15239652 NR Description: quinone reductase, putative [Arabidopsis thaliana]
MGKGGGCFPSKTKAPISGAEKDPIIVESLIPTNDPSSTSQEVEAPAPAPAAVKKLKIFIVFYSTYGHVESLARSLKKGVDSIEGVEGVLYRVLETLPKEVLELMKAPEKDETVPLISEDKLVEADGLLFGFPTRYGSMAAQMKVFFDSTGQLWREQKLAGVPAGFFVSTGTQGGGQETTA

SEQ ID NO: 8250 - DNA, 1061 bp, Glycine max
  misc_feature (1)..(1061): Ceres Seq. ID no. 14305871
aacattctatgttctgtgccattcctccctctcacttcaccccaccactcaaacaaaggaacccatctcttcaccgtcttccttctcctagaaagcccaaagcctccaccctaagaatttcctctcttggcgctggtttcttcgatgacatcgtccaaattgctcataacaaggttctgattgcagctggtgtctctgtggcgattggtcagctttctaagccattcacttctgtttttctgtatggcaaagggtttgatatcagagcagttgttcaagctggagggttcccttcatcacactcttctgcaacagtggctagtgcaacattatttggccttgagagaggcttctccgatcctatttttggtcttgcagttgtgtatgccggtctcattatgtatgatgctcagggtgtaagaagagaagtagggattcatgccaagacattgaacaaaatactgctccaaatgcaagccaactctttacattccaaagatagagataatttgattaactctcaaccaggactatcaaaacctctaaaagttggtcttgataagtcccttttgtcccaagaagccacttctttggaaccacaagaaacaaatagaggtctattggttaaatcaggaagcaaaataaggcaaacagatgcagatgaaatctcatcaaagttggccattgatggtataccccaactaaaagaatctattggtcatacagagattgaagtcatagctggtgctttactaggctttttggtggctttggctgtgtataatttcaagtaaaatcttgctttttgatgaataatttcatagcatatcttacaacaagtagattattaaattgaaaatcaagctgagttggaaattaaaaggccaagttgacaacaggtttaggttatcatttagcaaaacatttaaggtttgtatatgacctaacagaacaggacattagttaaagatgaaaacccatccaaacagggggttacacacgtacttctcttttcctatgtattgcggtgccttatataaaatttatcaattattgatttt

SEQ ID NO: 8251 - protein, 263 aa, Glycine max
  peptide (1)..(263): Ceres Seq. ID no. 14305872
  misc_feature (52)..(189): Pfam Name: Pfam Description:  Divergent PAP2 family
  misc_feature (20)..(189): NCBI GI NO: 18399713 NR Description: expressed protein [Arabidopsis thaliana]
  misc_feature (20)..(189): NCBI GI NO: 11994410 NR Description: emb|CAB71107
  misc_feature (52)..(175): NCBI GI NO: 15672981 NR Description: hypothetical protein
  misc_feature (234)..(259): NCBI GI NO: 15672981 NR Description: hypothetical protein
  misc_feature (51)..(154): NCBI GI NO: 15615964 NR Description: BH3402~unknown conserved protein
  misc_feature (233)..(260): NCBI GI NO: 15615964 NR Description: BH3402~unknown conserved protein
  misc_feature (52)..(175): NCBI GI NO: 23112372 NR Description: hypothetical protein
  misc_feature (233)..(257): NCBI GI NO: 23112372 NR Description: hypothetical protein
  misc_feature (56)..(166): NCBI GI NO: 23099802 NR Description: hypothetical protein
  misc_feature (217)..(259): NCBI GI NO: 23099802 NR Description: hypothetical protein
HSMFCAIPPSHFTPPLKQRNPSLHRLPSPRKPKASTLRISSLGAGFFDDIVQIAHNKVLIAAGVSVAIGQLSKPFTSVFLYGKGFDIRAVVQAGGFPSSHSSATVASATLFGLERGFSDPIFGLAVVYAGLIMYDAQGVRREVGIHAKTLNKILLQMQANSLHSKDRDNLINSQPGLSKPLKVGLDKSLLSQEATSLEPQETNRGLLVKSGSKIRQTDADEISSKLAIDGIPQLKESIGHTEIEVIAGALLGFLVALAVYNFK

SEQ ID NO: 8252 - protein, 261 aa, Glycine max
  peptide (1)..(261): Ceres Seq. ID no. 14305873
  misc_feature (50)..(187): Pfam Name: Pfam Description:  Divergent PAP2 family
  misc_feature (18)..(187): NCBI GI NO: 18399713 NR Description: expressed protein [Arabidopsis thaliana]
  misc_feature (18)..(187): NCBI GI NO: 11994410 NR Description: emb|CAB71107
  misc_feature (50)..(173): NCBI GI NO: 15672981 NR Description: hypothetical protein
  misc_feature (232)..(257): NCBI GI NO: 15672981 NR Description: hypothetical protein
  misc_feature (49)..(152): NCBI GI NO: 15615964 NR Description: BH3402~unknown conserved protein
  misc_feature (231)..(258): NCBI GI NO: 15615964 NR Description: BH3402~unknown conserved protein
  misc_feature (50)..(173): NCBI GI NO: 23112372 NR Description: hypothetical protein
  misc_feature (231)..(255): NCBI GI NO: 23112372 NR Description: hypothetical protein
  misc_feature (54)..(164): NCBI GI NO: 23099802 NR Description: hypothetical protein
  misc_feature (215)..(257): NCBI GI NO: 23099802 NR Description: hypothetical protein
MFCAIPPSHFTPPLKQRNPSLHRLPSPRKPKASTLRISSLGAGFFDDIVQIAHNKVLIAAGVSVAIGQLSKPFTSVFLYGKGFDIRAVVQAGGFPSSHSSATVASATLFGLERGFSDPIFGLAVVYAGLIMYDAQGVRREVGIHAKTLNKILLQMQANSLHSKDRDNLINSQPGLSKPLKVGLDKSLLSQEATSLEPQETNRGLLVKSGSKIRQTDADEISSKLAIDGIPQLKESIGHTEIEVIAGALLGFLVALAVYNFK

SEQ ID NO: 8253 - protein, 131 aa, Glycine max
  peptide (1)..(131): Ceres Seq. ID no. 14305874
  misc_feature (1)..(57): Pfam Name: Pfam Description:  Divergent PAP2 family
  misc_feature (1)..(57): NCBI GI NO: 18399713 NR Description: expressed protein [Arabidopsis thaliana]
  misc_feature (1)..(57): NCBI GI NO: 11994410 NR Description: emb|CAB71107
  misc_feature (1)..(43): NCBI GI NO: 15672981 NR Description: hypothetical protein
  misc_feature (102)..(127): NCBI GI NO: 15672981 NR Description: hypothetical protein
  misc_feature (1)..(22): NCBI GI NO: 15615964 NR Description: BH3402~unknown conserved protein
  misc_feature (101)..(128): NCBI GI NO: 15615964 NR Description: BH3402~unknown conserved protein
  misc_feature (1)..(43): NCBI GI NO: 23112372 NR Description: hypothetical protein
  misc_feature (101)..(125): NCBI GI NO: 23112372 NR Description: hypothetical protein
  misc_feature (1)..(34): NCBI GI NO: 23099802 NR Description: hypothetical protein
  misc_feature (85)..(127): NCBI GI NO: 23099802 NR Description: hypothetical protein
MYDAQGVRREVGIHAKTLNKILLQMQANSLHSKDRDNLINSQPGLSKPLKVGLDKSLLSQEATSLEPQETNRGLLVKSGSKIRQTDADEISSKLAIDGIPQLKESIGHTEIEVIAGALLGFLVALAVYNFK

SEQ ID NO: 8254 - DNA, 672 bp, Glycine max
  misc_feature (1)..(672): Ceres Seq. ID no. 14316515
attccaacttatcatactatcacattattatcaaccttataatcttcctcttagcaccaaccatgactacccagtttctcattctctcccttctcatctcatgccacgtcctcactgcaaccctagccgaagaaaccggctttgtaggttcactagaccgcaaggcattaggtctagataaaaaagacaaggtcagtcatttccggttctacttccacgagaggttcaccggaagcaacgccacctcggtcaccgtcgttcctccgctgccccagtacaactccaccaccaacttcgggttggtggggatcaccgacaacgccttgaccgtgggacccgaacccgggtccaaggtggtcggaaagatcgaggggttgtacgcgggcacctcacaatcggagttcaatttattgattgttgtgaattttgccttgaccgaaggaaagtataatggcagcaccatcaccgtggtggggcggaaccgcctctccctcaagattagggagatgcctgtgattggaggaagtggggtttttaaatttgccactgggtatgttgaaaccagcactctctatgttgatgctgataggtctaccattgagtacaacatttatgtttcacattactgatcaatttgtggtaactttatgttacaaaacttcttctatgtac

SEQ ID NO: 8255 - protein, 208 aa, Glycine max
  peptide (1)..(208): Ceres Seq. ID no. 14316516
  misc_feature (60)..(207): Pfam Name: Pfam Description:  Dirigent-like protein
  misc_feature (26)..(208): NCBI GI NO: 15239779 NR Description: disease resistance response protein-related/dirigent protein-related
  misc_feature (31)..(208): NCBI GI NO: 15217886 NR Description: disease resistance response protein-related/dirigent protein-related
  misc_feature (25)..(208): NCBI GI NO: 22135914 NR Description: unknown protein [Arabidopsis thaliana]
  misc_feature (25)..(208): NCBI GI NO: 15222673 NR Description: disease resistance response protein-related/dirigent protein-related
  misc_feature (26)..(208): NCBI GI NO: 15231302 NR Description: disease resistance response protein-related/dirigent protein-related
  misc_feature (21)..(207): NCBI GI NO: 15238980 NR Description: disease resistance response protein-related
  misc_feature (21)..(207): NCBI GI NO: 15218836 NR Description: disease resistance response protein-related/dirigent protein-related
  misc_feature (21)..(208): NCBI GI NO: 15231318 NR Description: disease resistance response protein-related/dirigent protein-related
  misc_feature (21)..(207): NCBI GI NO: 15238982 NR Description: disease resistance response protein-related
  misc_feature (21)..(207): NCBI GI NO: 15219966 NR Description: disease resistance response protein-related
SNLSYYHIIINLIIFLLAPTMTTQFLILSLLISCHVLTATLAEETGFVGSLDRKALGLDKKDKVSHFRFYFHERFTGSNATSVTVVPPLPQYNSTTNFGLVGITDNALTVGPEPGSKVVGKIEGLYAGTSQSEFNLLIVVNFALTEGKYNGSTITVVGRNRLSLKIREMPVIGGSGVFKFATGYVETSTLYVDADRSTIEYNIYVSHY

SEQ ID NO: 8256 - protein, 188 aa, Glycine max
  peptide (1)..(188): Ceres Seq. ID no. 14316517
  misc_feature (40)..(187): Pfam Name: Pfam Description:  Dirigent-like protein
  misc_feature (6)..(188): NCBI GI NO: 15239779 NR Description: disease resistance response protein-related/dirigent protein-related
  misc_feature (11)..(188): NCBI GI NO: 15217886 NR Description: disease resistance response protein-related/dirigent protein-related
  misc_feature (5)..(188): NCBI GI NO: 22135914 NR Description: unknown protein [Arabidopsis thaliana]
  misc_feature (5)..(188): NCBI GI NO: 15222673 NR Description: disease resistance response protein-related/dirigent protein-related
  misc_feature (6)..(188): NCBI GI NO: 15231302 NR Description: disease resistance response protein-related/dirigent protein-related
  misc_feature (1)..(187): NCBI GI NO: 15238980 NR Description: disease resistance response protein-related
  misc_feature (1)..(187): NCBI GI NO: 15218836 NR Description: disease resistance response protein-related/dirigent protein-related
  misc_feature (1)..(188): NCBI GI NO: 15231318 NR Description: disease resistance response protein-related/dirigent protein-related
  misc_feature (1)..(187): NCBI GI NO: 15238982 NR Description: disease resistance response protein-related
  misc_feature (1)..(187): NCBI GI NO: 15219966 NR Description: disease resistance response protein-related
MTTQFLILSLLISCHVLTATLAEETGFVGSLDRKALGLDKKDKVSHFRFYFHERFTGSNATSVTVVPPLPQYNSTTNFGLVGITDNALTVGPEPGSKVVGKIEGLYAGTSQSEFNLLIVVNFALTEGKYNGSTITVVGRNRLSLKIREMPVIGGSGVFKFATGYVETSTLYVDADRSTIEYNIYVSHY

SEQ ID NO: 8257 - DNA, 1012 bp, Glycine max
  misc_feature (1)..(1012): Ceres Seq. ID no. 14315448
acagactcaggaaccaatagacaaatatctattaacaaaacaacgcaacgcttctctttctttctttctatccctacttcgcctctgtttcatttggcccattgtttctcacaagccacactctttgtttgaagcttaaactccctctaagccccatccttaatttactcaatctcatcaatgtttcatcatctggagttcttcttttgagggctttagcagattccattccttgagtctcatgctggatatgccaatccttttatcctcatttctgatatccttgtttgcatgatcacatcttttccaaggattttaaaaccatgggtagaggtagaggaaagggtaaaaaactaactgttaccaattttgaggatcctgcaagtggtgaggatgaaaaagttcccacgcaaaagagaagagggaggccacaaaaaccactaaaggatgactttgatgaagaagaggtagagaaaatagaagatgacagtgacaatgttaagaatggagtctctaacaaagagatgaaaagtcccactgcaacagaaaatggaaggaaaagaaagcgaaactcacaggtaaaagagaaattagactcagttgaggaagaaaatggcattggcaatggatcaaacaccactgatgagttgacaaagaccaatggttttaggcataatggaagcaggcgcaaaagcacgccccgtcgagctgctgaagcaggtgttcagtgcaagtaaggatcataaaagttgtgcattagctttcttccttttcatattatcagttaaaatcatgagaagataggaagtgcggtgtagtatcatttattttatttacttgttttgtttctttgttctcacttttagtttcctttttcctcggtgagtctgatttgaggggttccatttggtgataccctatcattaattcctttttctttatttcaatcatgaatttgagagtttacaatgctggctgttgtcttataatgctataacacttcgaatttctc

SEQ ID NO: 8258 - protein, 137 aa, Glycine max
  peptide (1)..(137): Ceres Seq. ID no. 14315449
  misc_feature (1)..(136): NCBI GI NO: 15230905 NR Description: expressed protein [Arabidopsis thaliana]
  misc_feature (1)..(136): NCBI GI NO: 18405905 NR Description: expressed protein [Arabidopsis thaliana]
  misc_feature (1)..(136): NCBI GI NO: 21537173 NR Description: unknown [Arabidopsis thaliana]
  misc_feature (1)..(137): NCBI GI NO: 33088054 NR Description: unknown [Setaria italica]
MGRGRGKGKKLTVTNFEDPASGEDEKVPTQKRRGRPQKPLKDDFDEEEVEKIEDDSDNVKNGVSNKEMKSPTATENGRKRKRNSQVKEKLDSVEEENGIGNGSNTTDELTKTNGFRHNGSRRKSTPRRAAEAGVQCK

SEQ ID NO: 8259 - protein, 70 aa, Glycine max
  peptide (1)..(70): Ceres Seq. ID no. 14315450
  misc_feature (1)..(69): NCBI GI NO: 15230905 NR Description: expressed protein [Arabidopsis thaliana]
  misc_feature (1)..(69): NCBI GI NO: 18405905 NR Description: expressed protein [Arabidopsis thaliana]
  misc_feature (1)..(69): NCBI GI NO: 21537173 NR Description: unknown [Arabidopsis thaliana]
  misc_feature (1)..(70): NCBI GI NO: 33088054 NR Description: unknown [Setaria italica]
MKSPTATENGRKRKRNSQVKEKLDSVEEENGIGNGSNTTDELTKTNGFRHNGSRRKSTPRRAAEAGVQCK

SEQ ID NO: 8260 - DNA, 1274 bp, Glycine max
  misc_feature (1)..(1274): Ceres Seq. ID no. 15171735
gaatcagacaagagaagttgataagaacaaacaaaacaacaaccaaaccgtttattttttcttttttcttctctcaacactctcacttcctatctaatttttttcgttccgtcgtttcatcctcgcgagcgtgcatttgcattgcattgctctctctctcacaaaacgacgacgacgacgtcgccaccgcgcaccgttttggttttcctttctcttccgtcgtttgcttccgcaaatagcctttcgcatgggaaacgctaacggcagagaagacggatccattccccccgccgccgccgatccctccgccgccgcacgtggaactcacgcgccgccggtctctctccctccggttcgcgccttctcctccgattcaatggccaatagcccgccgcacagccctcgccgctccagatcgccgatcctcttcggtcctcaggttcctctagctccattacaacgaggtaatggccctccttttctcaatcaaatgtggcagaatgagtctcatggtattgttaatcaccctcctgagcaagggatccctgtcatgattacatggaactatggtggtaacaatgtggctgtggagggatcttgggataactggacatctaggaaggcattacagcgagctggcaaggatcactcattccttatagtccttccaccaggtatatatcattacaggttcattgctgatggtgaagagagatttatcccagagctacctaatgtagctgatgagatggggcatgtctgcaatcttcttgatgttaatgattatgtgccagaaaaccccgatggtgtgtctgagtttgaagcaccaccctcccccgaatccagttatggccaagcatttccagctgaagaagactttgcaaaagagccaatggctgttccttcgcaactgcatcttactgtcctaggtatggaaaactctgacataggttcctcttcaaagccccaacatgttgtgctaaatcatgtcttcatagagaaaaatttggcctcaaagtctgttgttgccctgggactcactcacaggttccagtccaaatatgtgacagttgtcctttacaaaccgctcaagaggtgaaatatataacgcttgtcaattatataaacctttttttcttttttttggtagcctcagtctgtaaagatgaaaatttaaataatactcctcaacgggtggtatatgaaggtcttgtgtctatatatgcttgaggcttctgttcgaattggtaaattaaactttttgtttttcaatt

SEQ ID NO: 8261 - protein, 283 aa, Glycine max
  peptide (1)..(283): Ceres Seq. ID no. 15171736
  misc_feature (194)..(281): Pfam Name: Pfam Description:  5'-AMP-activated protein kinase
  misc_feature (1)..(283): NCBI GI NO: 32364486 NR Description: AKIN beta1 [Medicago truncatula]
  misc_feature (1)..(283): NCBI GI NO: 5702015 NR Description: GAL83 protein [Solanum tuberosum]
  misc_feature (1)..(283): NCBI GI NO: 15242175 NR Description: AMPKBI
  misc_feature (1)..(283): NCBI GI NO: 6686782 NR Description: AKIN gamma [Arabidopsis thaliana]
  misc_feature (37)..(241): NCBI GI NO: 29725558 NR Description: SNF1 kinase complex anchoring protein
  misc_feature (1)..(283): NCBI GI NO: 6686784 NR Description: AKIN beta2 [Arabidopsis thaliana]
  misc_feature (20)..(283): NCBI GI NO: 15234895 NR Description: kinase like protein [Arabidopsis thaliana]
  misc_feature (1)..(283): NCBI GI NO: 32364488 NR Description: AKIN beta2 [Medicago truncatula]
  misc_feature (2)..(283): NCBI GI NO: 22324436 NR Description: AKIN beta1-like protein
  misc_feature (60)..(283): NCBI GI NO: 11935162 NR Description: SNF1-related kinase complex anchoring protein SIP1
MGNANGREDGSIPPAAADPSAAARGTHAPPVSLPPVRAFSSDSMANSPPHSPRRSRSPILFGPQVPLAPLQRGNGPPFLNQMWQNESHGIVNHPPEQGIPVMITWNYGGNNVAVEGSWDNWTSRKALQRAGKDHSFLIVLPPGIYHYRFIADGEERFIPELPNVADEMGHVCNLLDVNDYVPENPDGVSEFEAPPSPESSYGQAFPAEEDFAKEPMAVPSQLHLTVLGMENSDIGSSSKPQHVVLNHVFIEKNLASKSVVALGLTHRFQSKYVTVVLYKPLKR

SEQ ID NO: 8262 - protein, 240 aa, Glycine max
  peptide (1)..(240): Ceres Seq. ID no. 15171737
  misc_feature (151)..(238): Pfam Name: Pfam Description:  5'-AMP-activated protein kinase
  misc_feature (1)..(240): NCBI GI NO: 32364486 NR Description: AKIN beta1 [Medicago truncatula]
  misc_feature (1)..(240): NCBI GI NO: 5702015 NR Description: GAL83 protein [Solanum tuberosum]
  misc_feature (1)..(240): NCBI GI NO: 15242175 NR Description: AMPKBI
  misc_feature (1)..(240): NCBI GI NO: 6686782 NR Description: AKIN gamma [Arabidopsis thaliana]
  misc_feature (1)..(198): NCBI GI NO: 29725558 NR Description: SNF1 kinase complex anchoring protein
  misc_feature (1)..(240): NCBI GI NO: 6686784 NR Description: AKIN beta2 [Arabidopsis thaliana]
  misc_feature (1)..(240): NCBI GI NO: 15234895 NR Description: kinase like protein [Arabidopsis thaliana]
  misc_feature (1)..(240): NCBI GI NO: 32364488 NR Description: AKIN beta2 [Medicago truncatula]
  misc_feature (1)..(240): NCBI GI NO: 22324436 NR Description: AKIN beta1-like protein
  misc_feature (17)..(240): NCBI GI NO: 11935162 NR Description: SNF1-related kinase complex anchoring protein SIP1
MANSPPHSPRRSRSPILFGPQVPLAPLQRGNGPPFLNQMWQNESHGIVNHPPEQGIPVMITWNYGGNNVAVEGSWDNWTSRKALQRAGKDHSFLIVLPPGIYHYRFIADGEERFIPELPNVADEMGHVCNLLDVNDYVPENPDGVSEFEAPPSPESSYGQAFPAEEDFAKEPMAVPSQLHLTVLGMENSDIGSSSKPQHVVLNHVFIEKNLASKSVVALGLTHRFQSKYVTVVLYKPLKR

SEQ ID NO: 8263 - protein, 202 aa, Glycine max
  peptide (1)..(202): Ceres Seq. ID no. 15171738
  misc_feature (113)..(200): Pfam Name: Pfam Description:  5'-AMP-activated protein kinase
  misc_feature (1)..(202): NCBI GI NO: 32364486 NR Description: AKIN beta1 [Medicago truncatula]
  misc_feature (1)..(202): NCBI GI NO: 5702015 NR Description: GAL83 protein [Solanum tuberosum]
  misc_feature (1)..(202): NCBI GI NO: 15242175 NR Description: AMPKBI
  misc_feature (1)..(202): NCBI GI NO: 6686782 NR Description: AKIN gamma [Arabidopsis thaliana]
  misc_feature (1)..(160): NCBI GI NO: 29725558 NR Description: SNF1 kinase complex anchoring protein
  misc_feature (1)..(202): NCBI GI NO: 6686784 NR Description: AKIN beta2 [Arabidopsis thaliana]
  misc_feature (1)..(202): NCBI GI NO: 15234895 NR Description: kinase like protein [Arabidopsis thaliana]
  misc_feature (1)..(202): NCBI GI NO: 32364488 NR Description: AKIN beta2 [Medicago truncatula]
  misc_feature (1)..(202): NCBI GI NO: 22324436 NR Description: AKIN beta1-like protein
  misc_feature (1)..(202): NCBI GI NO: 11935162 NR Description: SNF1-related kinase complex anchoring protein SIP1
MWQNESHGIVNHPPEQGIPVMITWNYGGNNVAVEGSWDNWTSRKALQRAGKDHSFLIVLPPGIYHYRFIADGEERFIPELPNVADEMGHVCNLLDVNDYVPENPDGVSEFEAPPSPESSYGQAFPAEEDFAKEPMAVPSQLHLTVLGMENSDIGSSSKPQHVVLNHVFIEKNLASKSVVALGLTHRFQSKYVTVVLYKPLKR

SEQ ID NO: 8264 - DNA, 1345 bp, Glycine max
  misc_feature (1)..(1345): Ceres Seq. ID no. 15178206
cacctttcttctctcttgctataatcattttcaaccaaacccaaacccaaacccctttctctcataaacaaagcaacaaaggttcatcccagttaggagttaggacctctcttcctttttcatttcctcgaatcccaaacaccacaaaaaccaaaacccacctaaaaaatgcaatcattcccctccactctcgcatgctttactttttcaacgtcactagtactagtactactcttatttctactacctttttctcgggccggtttactctccgaaccggtaagcgaccccaaccagccactcgaaccgggctccaacacggtccctgccttccccgtccagacccaggccctcacctgccgcctcgacctctccgacgagctattcggcggagtcaaggacgcctgcggcaaagacctcgaccggagccgctgctgccccgtcctcgccgcctggctcttcgccgcccacgcccgcaccgccctcgacgtctccgccgccccgcctccatcctccggcgaccttccgatgatgcccgacgactcacaaaaatgcgtcaactcgctccaggactcgcttctctcccgcaacatacgaatccctcagtccaacgccacgtgcgacgccattctctgcttctgcggcatcaggctccaccaaatcacgtcgctgacttgcaacgctgcgtttaacgtctcgctttctcacagaaacgccactccaaccgccgcggttcgcaacctggagaataattgtcgtaactcctcttacgctggttgcactaaatgcctcggtgccctacaaaaggtgaaggggtataaaaatgagacgaagggaagtgatagagtgaagaaaatgttcaaccgggactgtcaattgatggggttaacgtggcttcttgcaaagaacaaaacggcgtacatacccaccgtttcggcggtgctgcgtgcgatgatgtacagtgcgcaccctcacgagtccaagtgtagtcccgaccaggagaacatgccgctggccgttgattcgcttcagttcgagagcggccacgcgccatcgcggccgtccaagttttgcgtgacgattttgcccctcttggttctcttattttccgcttttgttgtgtagaaagaaagggtgggcccacttggtggggttagtgtctgtcctcttctctttctctctctctcgctatcacgtgaaacttagctactcgacaaaacatgcaaacaaacgggggtagtttgttttttacttgagagggtttttctggctgtaaattttcagagtccattgacatgtttgtgtgtacagtgtcaccaacttacatagaaagaagtggttcttt

SEQ ID NO: 8265 - protein, 318 aa, Glycine max
  peptide (1)..(318): Ceres Seq. ID no. 15178207
  misc_feature (18)..(313): NCBI GI NO: 21593735 NR Description: unknown [Arabidopsis thaliana]
  misc_feature (18)..(313): NCBI GI NO: 18417127 NR Description: expressed protein [Arabidopsis thaliana]
  misc_feature (19)..(306): NCBI GI NO: 34394002 NR Description: unknown protein
  misc_feature (99)..(296): NCBI GI NO: 18401752 NR Description: expressed protein [Arabidopsis thaliana]
  misc_feature (14)..(201): NCBI GI NO: 18401752 NR Description: expressed protein [Arabidopsis thaliana]
MQSFPSTLACFTFSTSLVLVLLLFLLPFSRAGLLSEPVSDPNQPLEPGSNTVPAFPVQTQALTCRLDLSDELFGGVKDACGKDLDRSRCCPVLAAWLFAAHARTALDVSAAPPPSSGDLPMMPDDSQKCVNSLQDSLLSRNIRIPQSNATCDAILCFCGIRLHQITSLTCNAAFNVSLSHRNATPTAAVRNLENNCRNSSYAGCTKCLGALQKVKGYKNETKGSDRVKKMFNRDCQLMGLTWLLAKNKTAYIPTVSAVLRAMMYSAHPHESKCSPDQENMPLAVDSLQFESGHAPSRPSKFCVTILPLLVLLFSAFVV

SEQ ID NO: 8266 - protein, 229 aa, Glycine max
  peptide (1)..(229): Ceres Seq. ID no. 15178208
PFFSLAIIIFNQTQTQTPFSHKQSNKGSSQLGVRTSLPFSFPRIPNTTKTKTHLKNAIIPLHSRMLYFFNVTSTSTTLISTTFFSGRFTLRTGKRPQPATRTGLQHGPCLPRPDPGPHLPPRPLRRAIRRSQGRLRQRPRPEPLLPRPRRLALRRPRPHRPRRLRRPASILRRPSDDARRLTKMRQLAPGLASLPQHTNPSVQRHVRRHSLLLRHQAPPNHVADLQRCV

SEQ ID NO: 8267 - protein, 198 aa, Glycine max
  peptide (1)..(198): Ceres Seq. ID no. 15178209
  misc_feature (1)..(193): NCBI GI NO: 21593735 NR Description: unknown [Arabidopsis thaliana]
  misc_feature (1)..(193): NCBI GI NO: 18417127 NR Description: expressed protein [Arabidopsis thaliana]
  misc_feature (1)..(186): NCBI GI NO: 34394002 NR Description: unknown protein
  misc_feature (1)..(176): NCBI GI NO: 18401752 NR Description: expressed protein [Arabidopsis thaliana]
  misc_feature (1)..(81): NCBI GI NO: 18401752 NR Description: expressed protein [Arabidopsis thaliana]
MMPDDSQKCVNSLQDSLLSRNIRIPQSNATCDAILCFCGIRLHQITSLTCNAAFNVSLSHRNATPTAAVRNLENNCRNSSYAGCTKCLGALQKVKGYKNETKGSDRVKKMFNRDCQLMGLTWLLAKNKTAYIPTVSAVLRAMMYSAHPHESKCSPDQENMPLAVDSLQFESGHAPSRPSKFCVTILPLLVLLFSAFVV

SEQ ID NO: 8268 - DNA, 1773 bp, Glycine max
  misc_feature (1)..(1773): Ceres Seq. ID no. 15177414
aaaattcagagcgtgcaaattgcaaaatgcagaaattgctcaacgatttcccccaaaaaatgagtttcacgggaagcgggaagaagacccaccgcaaaaatttcaaaccacaaagacagcattaatattcttcctttcatttccagttcttcttcttaaaccccttattctccttctctcttgcactgtcttacaatttgaattttccaatggcaacttctgagaacaacagcagcgcgcgtccccaacgcgaagcgaagaagagggccgcagctgcaatatcccaaattcatggcaacgccgccaagaagaaacgcgtcgttttaggcgacgtcactaacgtttcctcaagcgacgtcgccgtttccgtttccaaaaaacccgttcagacacataaaaatgttaaactcgagaaaccggccgcgccggttgccacgccggagaaggttgaggaaagacacgacccgcaactctgtgggccctacgtttctgatatatacgaataccttcgcggaatggaggtggatcctagtaagagaccattgatggattatgttcagaagattcagagggatgttaatgctaacatgcgcggtgttcttgtggattggttggtggaagttgcagaagaatacaaacttgtttcggacacgctttatttctctgttgcttatattgataggtttttgtcgttgaatattttgtcgagacagaggttgcaattgctgggggttgcttcaatgctcattgcttcgaaatacgaagagattaagccgcccgaggtggaggatttttgttacattacggataacacatactctaaggaagaggttgtgaacatggaggctgaaatattgaaggctttgaaatttgaattgggtggtcctacagtgaagacattcttgaggagattctccagagttggtcaagagggtgttgatacttctgatctccagtttgagttccttagctgctaccttgccgagctcagtttgttggattataattgtataaagtttttgccatctttggtggctgcatcagttgtattcctagcaagatttatgtttagcacaaagacacatccttggaattcggcactccatcaactcactagatataaacctgctgacttgaaggaatgtgttctaaacttacatgacttgtacctcagtaggagaggggcctctttgcaagctgtgagagagaaatacaaacagcataagttcaaatgtgtggcaacaacaccatctcctcccgagatacctctttctttttttgaatttgaggggcagattcttaggcaattgtaatttggctattcttggtatggctctggtttcaactattggcaggaaagtgtttcctaacactagagatgagagtttcagacattttgttgcacttgtttgtagagagagagaggtgcttgccagaaatgcagcgacaacatactatgctggcctcactgactttgtgattgagcttgtgtgaaaatgagataaatcccattagttgagaattaggttattttttgacaattagaagttctttgtaagatttccttgaaggatttatgatttctatgtatagggaaatgctatacgttttcattgtagttgttccattctaagatgtccaaactctgatattcagaaatcaatttttcagctgtaaacaagtgttggattggttactttaacccaaccatttttgtccgtggtctaaacaaatgtctgtgatagaatataattgagtttgtctgtgtagtct

SEQ ID NO: 8269 - protein, 367 aa, Glycine max
  peptide (1)..(367): Ceres Seq. ID no. 15177415
  misc_feature (95)..(224): Pfam Name: Pfam Description:  Cyclin, N-terminal domain
  misc_feature (5)..(361): NCBI GI NO: 7242793 NR Description: cyclin A3.1 [Pisum sativum]
  misc_feature (1)..(358): NCBI GI NO: 7438516 NR Description: cyclin A-type - Madagascar periwinkle
  misc_feature (1)..(358): NCBI GI NO: 7438513 NR Description: cyclin A-type (clone 59) - common tobacco
  misc_feature (5)..(358): NCBI GI NO: 15239172 NR Description: cyclin, putative [Arabidopsis thaliana]
  misc_feature (4)..(358): NCBI GI NO: 15220147 NR Description: cyclin, putative [Arabidopsis thaliana]
  misc_feature (4)..(358): NCBI GI NO: 30694019 NR Description: cyclin family [Arabidopsis thaliana]
  misc_feature (1)..(358): NCBI GI NO: 40538955 NR Description: putative A-type cyclin
  misc_feature (16)..(358): NCBI GI NO: 7438514 NR Description: cyclin a1-type, mitosis-specific - soybean
  misc_feature (32)..(357): NCBI GI NO: 116167 NR Description: G2/MITOTIC-SPECIFIC CYCLIN C13-1 (A-LIKE CYCLIN)
  misc_feature (1)..(358): NCBI GI NO: 7438511 NR Description: cyclin A-type (clone 105) - common tobacco
MATSENNSSARPQREAKKRAAAAISQIHGNAAKKKRVVLGDVTNVSSSDVAVSVSKKPVQTHKNVKLEKPAAPVATPEKVEERHDPQLCGPYVSDIYEYLRGMEVDPSKRPLMDYVQKIQRDVNANMRGVLVDWLVEVAEEYKLVSDTLYFSVAYIDRFLSLNILSRQRLQLLGVASMLIASKYEEIKPPEVEDFCYITDNTYSKEEVVNMEAEILKALKFELGGPTVKTFLRRFSRVGQEGVDTSDLQFEFLSCYLAELSLLDYNCIKFLPSLVAASVVFLARFMFSTKTHPWNSALHQLTRYKPADLKECVLNLHDLYLSRRGASLQAVREKYKQHKFKCVATTPSPPEIPLSFFEFEGQILRQL

SEQ ID NO: 8270 - protein, 265 aa, Glycine max
  peptide (1)..(265): Ceres Seq. ID no. 15177416
  misc_feature (1)..(122): Pfam Name: Pfam Description:  Cyclin, N-terminal domain
  misc_feature (1)..(259): NCBI GI NO: 7242793 NR Description: cyclin A3.1 [Pisum sativum]
  misc_feature (1)..(256): NCBI GI NO: 7438516 NR Description: cyclin A-type - Madagascar periwinkle
  misc_feature (1)..(256): NCBI GI NO: 7438513 NR Description: cyclin A-type (clone 59) - common tobacco
  misc_feature (1)..(256): NCBI GI NO: 15239172 NR Description: cyclin, putative [Arabidopsis thaliana]
  misc_feature (1)..(256): NCBI GI NO: 15220147 NR Description: cyclin, putative [Arabidopsis thaliana]
  misc_feature (1)..(256): NCBI GI NO: 30694019 NR Description: cyclin family [Arabidopsis thaliana]
  misc_feature (1)..(256): NCBI GI NO: 40538955 NR Description: putative A-type cyclin
  misc_feature (1)..(256): NCBI GI NO: 7438514 NR Description: cyclin a1-type, mitosis-specific - soybean
  misc_feature (1)..(255): NCBI GI NO: 116167 NR Description: G2/MITOTIC-SPECIFIC CYCLIN C13-1 (A-LIKE CYCLIN)
  misc_feature (1)..(256): NCBI GI NO: 7438511 NR Description: cyclin A-type (clone 105) - common tobacco
MEVDPSKRPLMDYVQKIQRDVNANMRGVLVDWLVEVAEEYKLVSDTLYFSVAYIDRFLSLNILSRQRLQLLGVASMLIASKYEEIKPPEVEDFCYITDNTYSKEEVVNMEAEILKALKFELGGPTVKTFLRRFSRVGQEGVDTSDLQFEFLSCYLAELSLLDYNCIKFLPSLVAASVVFLARFMFSTKTHPWNSALHQLTRYKPADLKECVLNLHDLYLSRRGASLQAVREKYKQHKFKCVATTPSPPEIPLSFFEFEGQILRQL

SEQ ID NO: 8271 - protein, 255 aa, Glycine max
  peptide (1)..(255): Ceres Seq. ID no. 15177417
  misc_feature (1)..(112): Pfam Name: Pfam Description:  Cyclin, N-terminal domain
  misc_feature (1)..(249): NCBI GI NO: 7242793 NR Description: cyclin A3.1 [Pisum sativum]
  misc_feature (1)..(246): NCBI GI NO: 7438516 NR Description: cyclin A-type - Madagascar periwinkle
  misc_feature (1)..(246): NCBI GI NO: 7438513 NR Description: cyclin A-type (clone 59) - common tobacco
  misc_feature (1)..(246): NCBI GI NO: 15239172 NR Description: cyclin, putative [Arabidopsis thaliana]
  misc_feature (1)..(246): NCBI GI NO: 15220147 NR Description: cyclin, putative [Arabidopsis thaliana]
  misc_feature (1)..(246): NCBI GI NO: 30694019 NR Description: cyclin family [Arabidopsis thaliana]
  misc_feature (1)..(246): NCBI GI NO: 40538955 NR Description: putative A-type cyclin
  misc_feature (1)..(246): NCBI GI NO: 7438514 NR Description: cyclin a1-type, mitosis-specific - soybean
  misc_feature (1)..(245): NCBI GI NO: 116167 NR Description: G2/MITOTIC-SPECIFIC CYCLIN C13-1 (A-LIKE CYCLIN)
  misc_feature (1)..(246): NCBI GI NO: 7438511 NR Description: cyclin A-type (clone 105) - common tobacco
MDYVQKIQRDVNANMRGVLVDWLVEVAEEYKLVSDTLYFSVAYIDRFLSLNILSRQRLQLLGVASMLIASKYEEIKPPEVEDFCYITDNTYSKEEVVNMEAEILKALKFELGGPTVKTFLRRFSRVGQEGVDTSDLQFEFLSCYLAELSLLDYNCIKFLPSLVAASVVFLARFMFSTKTHPWNSALHQLTRYKPADLKECVLNLHDLYLSRRGASLQAVREKYKQHKFKCVATTPSPPEIPLSFFEFEGQILRQL

SEQ ID NO: 8272 - DNA, 1379 bp, Glycine max
  misc_feature (1)..(1379): Ceres Seq. ID no. 15168355
gattgccctagttggcacctttccgtaagaagcacaagttctctctttttctttccaccgtcaccactcaccatgcaatgcaaataacccaattaagaaaccaaccaaccaacgaggcttgttctgttgtgttgtttgcttagtacgttaatggcaaaccaggtggttcctcgtgaatctcacccttatgcctttcatgtctctggccctcgcaagttcacttcccttaattggagggaccttatcatttccagttggaaggatgcaaattataagagaactgtcattgcctgctttatacaggcagtatacttgcttgaacttgatagacaggagaagagaacacaaggaaatgctcttgccccaaattggtggattcccttcaaatacaagcttaaacaaacactaattgatgaaagagatggatccatttttggcacaattcttgaatgggatagatctgctgcattggctgacttaataccaattagaccaagtggtgcccccagagctgtcttagcactcagaggaacattactcaaaagccctacaatgcgaagagatatcgaagatgacctacgttttgttgcttgggaaagcttgaagggctctgtgaggtttaaagcagctttggaggtactaaaatcgatttgtggtaaatacggaagcaacaacgtatgcattgcagggcattccttgggggctggttttgctcttcaagtgggaaaagaactagcaaaagaagggacttatgtggaggcacatttgtttaatccaccttctgtttcactagccatgagtctcaaaactattggagaaaaggctgagtttgtgtggaataggcttaaatccatgcttccttatagtggtgaggctcaaatcagcaatgatgtagacaaaacttcttcaagtgtaggattgaagagtaggatgcctcaactatctggttctggtttgaaagatgcaagtttgggggtagcaaaatgggttccttatttgtatgttaacaatggtgactatatctgctgctattacaatgatggtgctggcacaagcacaaaggtgaatgtaggaactacaaatggacaagtttcagcaaagttgtttgttgtctctaaggagaaacagaagtttcttgaggctcatggcctggaacaatggtggtcaagtgatgcagaacttcagcaggttatccatagtagcaatctcataagcaggcagcttcgatctttgtacactgctgctccttcccaagtaaacttataagcaggtggtgaaatgtaatttaaaataaaataaaaaaacaagatttgtattcctacatgttttcactgaaatttgatatttgtagtatgttgtaattcatactattttattat

SEQ ID NO: 8273 - protein, 371 aa, Glycine max
  peptide (1)..(371): Ceres Seq. ID no. 15168356
  misc_feature (11)..(363): NCBI GI NO: 15241306 NR Description: hypothetical protein [Arabidopsis thaliana]
  misc_feature (9)..(367): NCBI GI NO: 34909578 NR Description: P0046E05.21
  misc_feature (12)..(367): NCBI GI NO: 34910916 NR Description: OSJNBb0063G05.3
  misc_feature (122)..(362): NCBI GI NO: 34904536 NR Description: B1066G12.13
  misc_feature (13)..(82): NCBI GI NO: 34904536 NR Description: B1066G12.13
  misc_feature (33)..(226): NCBI GI NO: 34901136 NR Description: contains EST AU161031
  misc_feature (15)..(295): NCBI GI NO: 30689345 NR Description: expressed protein [Arabidopsis thaliana]
  misc_feature (15)..(295): NCBI GI NO: 18396010 NR Description: lipase (class 3) family [Arabidopsis thaliana]
  misc_feature (15)..(224): NCBI GI NO: 10177082 NR Description: gene_id:MOP9
  misc_feature (15)..(253): NCBI GI NO: 15237913 NR Description: hypothetical protein [Arabidopsis thaliana]
MANQVVPRESHPYAFHVSGPRKFTSLNWRDLIISSWKDANYKRTVIACFIQAVYLLELDRQEKRTQGNALAPNWWIPFKYKLKQTLIDERDGSIFGTILEWDRSAALADLIPIRPSGAPRAVLALRGTLLKSPTMRRDIEDDLRFVAWESLKGSVRFKAALEVLKSICGKYGSNNVCIAGHSLGAGFALQVGKELAKEGTYVEAHLFNPPSVSLAMSLKTIGEKAEFVWNRLKSMLPYSGEAQISNDVDKTSSSVGLKSRMPQLSGSGLKDASLGVAKWVPYLYVNNGDYICCYYNDGAGTSTKVNVGTTNGQVSAKLFVVSKEKQKFLEAHGLEQWWSSDAELQQVIHSSNLISRQLRSLYTAAPSQVNL

SEQ ID NO: 8274 - protein, 237 aa, Glycine max
  peptide (1)..(237): Ceres Seq. ID no. 15168357
  misc_feature (1)..(229): NCBI GI NO: 15241306 NR Description: hypothetical protein [Arabidopsis thaliana]
  misc_feature (1)..(233): NCBI GI NO: 34909578 NR Description: P0046E05.21
  misc_feature (1)..(233): NCBI GI NO: 34910916 NR Description: OSJNBb0063G05.3
  misc_feature (1)..(228): NCBI GI NO: 34904536 NR Description: B1066G12.13
  misc_feature (1)..(92): NCBI GI NO: 34901136 NR Description: contains EST AU161031
  misc_feature (1)..(161): NCBI GI NO: 30689345 NR Description: expressed protein [Arabidopsis thaliana]
  misc_feature (1)..(161): NCBI GI NO: 18396010 NR Description: lipase (class 3) family [Arabidopsis thaliana]
  misc_feature (1)..(90): NCBI GI NO: 10177082 NR Description: gene_id:MOP9
  misc_feature (1)..(119): NCBI GI NO: 15237913 NR Description: hypothetical protein [Arabidopsis thaliana]
  misc_feature (1)..(161): NCBI GI NO: 7486138 NR Description: hypothetical protein F25I24
MRRDIEDDLRFVAWESLKGSVRFKAALEVLKSICGKYGSNNVCIAGHSLGAGFALQVGKELAKEGTYVEAHLFNPPSVSLAMSLKTIGEKAEFVWNRLKSMLPYSGEAQISNDVDKTSSSVGLKSRMPQLSGSGLKDASLGVAKWVPYLYVNNGDYICCYYNDGAGTSTKVNVGTTNGQVSAKLFVVSKEKQKFLEAHGLEQWWSSDAELQQVIHSSNLISRQLRSLYTAAPSQVNL

SEQ ID NO: 8275 - DNA, 728 bp, Glycine max
  misc_feature (1)..(728): Ceres Seq. ID no. 14315067
attcaaaccctagatcagttttaattagtttcctagttttattcatagtgtgcaagaatgggaaacagcttaaggtgttgtttggcttgtgttcttccatgtggagctctagacttgattcgaatagtccatttgaatggctatgtggaagagattacacgtccaatcacagcaggagaggttctcaaagcaaaccctaaccatgttctaagcaaacctagctctcaaggcgtcgttcgccggattttgatcctttcaccggagaccgagctcaagaggggcagcatctacttcttgatcccggaatcttcgctgccggagaagaaacggctagccggaaagggaagaaatgttggtggtgataatgatataaaaaagaaaccatcaacattgaaagggaacaagggtagtagtgatgatgattattcttcactatcacaagggtgcctcaataaagccactcacaaaggttctaaagagaagaaatcgtcgtgccgggatcgccggaaaggccgcatcggaatatggaggcctcatttggagagtatattggaagattagtcggttttttgtgtcgctggccggtggccggaatccaacatggctggaaaaaagaagaggagaaaaagaagaagaaatatgttaaattattgaaatatagcaacaggactttttttttttttttgttcccttttgttttataaatgtatgtgggaatttgatgggag

SEQ ID NO: 8276 - protein, 167 aa, Glycine max
  peptide (1)..(167): Ceres Seq. ID no. 14315068
  misc_feature (1)..(167): NCBI GI NO: 18390706 NR Description: expressed protein [Arabidopsis thaliana]
  misc_feature (1)..(167): NCBI GI NO: 15227725 NR Description: hypothetical protein [Arabidopsis thaliana]
  misc_feature (1)..(167): NCBI GI NO: 34896112 NR Description: P0701D05.10
  misc_feature (3)..(97): NCBI GI NO: 34909702 NR Description: B1131G08.9
  misc_feature (140)..(167): NCBI GI NO: 34909702 NR Description: B1131G08.9
  misc_feature (1)..(167): NCBI GI NO: 34907910 NR Description: P0439E11.22
  misc_feature (1)..(121): NCBI GI NO: 18396990 NR Description: expressed protein [Arabidopsis thaliana]
  misc_feature (25)..(146): NCBI GI NO: 34896398 NR Description: hypothetical protein
  misc_feature (42)..(166): NCBI GI NO: 18396990 NR Description: expressed protein [Arabidopsis thaliana]
MGNSLRCCLACVLPCGALDLIRIVHLNGYVEEITRPITAGEVLKANPNHVLSKPSSQGVVRRILILSPETELKRGSIYFLIPESSLPEKKRLAGKGRNVGGDNDIKKKPSTLKGNKGSSDDDYSSLSQGCLNKATHKGSKEKKSSCRDRRKGRIGIWRPHLESILED

SEQ ID NO: 8277 - DNA, 1078 bp, Glycine max
  misc_feature (1)..(1078): Ceres Seq. ID no. 14312258
gccactaccatttccaacaacatagccatgccctccatgaagacctcatcgtccaaaacctccgagtcctcgactcagttcgactcgccccactcgcctctccgatccttcccgctcttcgacaacgccgaccccttccactcgccgcaaaatgacaactcccgcgccatcgtcatcgtcgagacaacttcgactcaattcgcccaggccgcgccccccgcgccggagtccgagcaccggaacccgcctccggaggccgtggtcacccgccccgtttggccggagacgaagtcgtcggccaccgttggtcggacgcgaccgaggccggtggcgccgcccagttcggtggtgccgaagagagaaatgatggcgaaaaaagttgcattagggtttcggttaagcgaagtagtgctgtgtctgatttcgttttcggttatggccgcggacaaaactcgtggttggagcggtgattcttttgatcgctacaaggaatacaggtattgtttgtctgtgaatgtaatcgcatttgtatacgctgcgtttcaagcgtgtgatctggcgtatcaggtagtaacgggaagacgcataatcaatcaccacctgcgttaccactttgatttcttcatggatcaggttttggcgtatcttttggtatcggctgcatcatctgctgctacacgcgttgatgactggcaatcgaattggggaaaagatgatttcacagagatggcgagtgcttcaattgcgttgacctttcttgcttttgttgcctttgctattagctcgttaatctctggctacaacctctgcactctgttctcatagcaacattttaacctcgtataagctgtctttccattgtacacacaactacacactttttttttcttctttctattcctctattcttactgctgtggaggaatgcattcatgagtgttggtgccagtgatttttttttactgtacagatagacttgtatacgtacaattgagggaatactgttcgtcttaaatccgaaggatggagaaggaaatttttgtgttcaccttaaaatacaattaaatgattgtatttt

SEQ ID NO: 8278 - protein, 274 aa, Glycine max
  peptide (1)..(274): Ceres Seq. ID no. 14312259
  misc_feature (123)..(257): Pfam Name: DUF588 Pfam Description: Domain of unknown function
  misc_feature (10)..(269): NCBI GI NO: 27754604 NR Description: unknown protein [Arabidopsis thaliana]
  misc_feature (75)..(271): NCBI GI NO: 15241975 NR Description: hypothetical protein [Arabidopsis thaliana]
  misc_feature (41)..(274): NCBI GI NO: 15242642 NR Description: expressed protein [Arabidopsis thaliana]
  misc_feature (10)..(214): NCBI GI NO: 15227628 NR Description: expressed protein [Arabidopsis thaliana]
  misc_feature (180)..(269): NCBI GI NO: 15227628 NR Description: expressed protein [Arabidopsis thaliana]
  misc_feature (161)..(270): NCBI GI NO: 2598569 NR Description: MtN24 [Medicago truncatula]
  misc_feature (90)..(271): NCBI GI NO: 21553786 NR Description: unknown [Arabidopsis thaliana]
  misc_feature (90)..(271): NCBI GI NO: 7460052 NR Description: hypothetical protein At2g38480
  misc_feature (90)..(271): NCBI GI NO: 18404766 NR Description: expressed integral membrane protein common family
  misc_feature (121)..(269): NCBI GI NO: 28876007 NR Description: hypothetical protein
ATTISNNIAMPSMKTSSSKTSESSTQFDSPHSPLRSFPLFDNADPFHSPQNDNSRAIVIVETTSTQFAQAAPPAPESEHRNPPPEAVVTRPVWPETKSSATVGRTRPRPVAPPSSVVPKREMMAKKVALGFRLSEVVLCLISFSVMAADKTRGWSGDSFDRYKEYRYCLSVNVIAFVYAAFQACDLAYQVVTGRRIINHHLRYHFDFFMDQVLAYLLVSAASSAATRVDDWQSNWGKDDFTEMASASIALTFLAFVAFAISSLISGYNLCTLFS

SEQ ID NO: 8279 - protein, 265 aa, Glycine max
  peptide (1)..(265): Ceres Seq. ID no. 14312260
  misc_feature (114)..(248): Pfam Name: DUF588 Pfam Description: Domain of unknown function
  misc_feature (1)..(260): NCBI GI NO: 27754604 NR Description: unknown protein [Arabidopsis thaliana]
  misc_feature (66)..(262): NCBI GI NO: 15241975 NR Description: hypothetical protein [Arabidopsis thaliana]
  misc_feature (32)..(265): NCBI GI NO: 15242642 NR Description: expressed protein [Arabidopsis thaliana]
  misc_feature (1)..(205): NCBI GI NO: 15227628 NR Description: expressed protein [Arabidopsis thaliana]
  misc_feature (171)..(260): NCBI GI NO: 15227628 NR Description: expressed protein [Arabidopsis thaliana]
  misc_feature (152)..(261): NCBI GI NO: 2598569 NR Description: MtN24 [Medicago truncatula]
  misc_feature (81)..(262): NCBI GI NO: 21553786 NR Description: unknown [Arabidopsis thaliana]
  misc_feature (81)..(262): NCBI GI NO: 7460052 NR Description: hypothetical protein At2g38480
  misc_feature (81)..(262): NCBI GI NO: 18404766 NR Description: expressed integral membrane protein common family
  misc_feature (112)..(260): NCBI GI NO: 28876007 NR Description: hypothetical protein
MPSMKTSSSKTSESSTQFDSPHSPLRSFPLFDNADPFHSPQNDNSRAIVIVETTSTQFAQAAPPAPESEHRNPPPEAVVTRPVWPETKSSATVGRTRPRPVAPPSSVVPKREMMAKKVALGFRLSEVVLCLISFSVMAADKTRGWSGDSFDRYKEYRYCLSVNVIAFVYAAFQACDLAYQVVTGRRIINHHLRYHFDFFMDQVLAYLLVSAASSAATRVDDWQSNWGKDDFTEMASASIALTFLAFVAFAISSLISGYNLCTLFS

SEQ ID NO: 8280 - protein, 262 aa, Glycine max
  peptide (1)..(262): Ceres Seq. ID no. 14312261
  misc_feature (111)..(245): Pfam Name: DUF588 Pfam Description: Domain of unknown function
  misc_feature (1)..(257): NCBI GI NO: 27754604 NR Description: unknown protein [Arabidopsis thaliana]
  misc_feature (63)..(259): NCBI GI NO: 15241975 NR Description: hypothetical protein [Arabidopsis thaliana]
  misc_feature (29)..(262): NCBI GI NO: 15242642 NR Description: expressed protein [Arabidopsis thaliana]
  misc_feature (1)..(202): NCBI GI NO: 15227628 NR Description: expressed protein [Arabidopsis thaliana]
  misc_feature (168)..(257): NCBI GI NO: 15227628 NR Description: expressed protein [Arabidopsis thaliana]
  misc_feature (149)..(258): NCBI GI NO: 2598569 NR Description: MtN24 [Medicago truncatula]
  misc_feature (78)..(259): NCBI GI NO: 21553786 NR Description: unknown [Arabidopsis thaliana]
  misc_feature (78)..(259): NCBI GI NO: 7460052 NR Description: hypothetical protein At2g38480
  misc_feature (78)..(259): NCBI GI NO: 18404766 NR Description: expressed integral membrane protein common family
  misc_feature (109)..(257): NCBI GI NO: 28876007 NR Description: hypothetical protein
MKTSSSKTSESSTQFDSPHSPLRSFPLFDNADPFHSPQNDNSRAIVIVETTSTQFAQAAPPAPESEHRNPPPEAVVTRPVWPETKSSATVGRTRPRPVAPPSSVVPKREMMAKKVALGFRLSEVVLCLISFSVMAADKTRGWSGDSFDRYKEYRYCLSVNVIAFVYAAFQACDLAYQVVTGRRIINHHLRYHFDFFMDQVLAYLLVSAASSAATRVDDWQSNWGKDDFTEMASASIALTFLAFVAFAISSLISGYNLCTLFS

SEQ ID NO: 8281 - DNA, 1005 bp, Glycine max
  misc_feature (1)..(1005): Ceres Seq. ID no. 14312224
acaacaattgaagcctctctgtcattttcacctcactgttctctatctctgcacgaacgacacaattgaacccttaaacgacaatggcgtggggacagtgccgttgctgcgtttggtgactgatgatgctgcgcgtcgtcgtcgtggacggaggtcgcatggggtggaatctggtgcggccgtgtgcattgtgatcaatcaatcataatgaggaaagaggattgtttgattttgtgattgaaatcgaaagagaaagaaagagagaaatttgttgtgatggctgaattagtggcccgaacaggtcgacatcagcagcgatacgaacacggttatcgccttattgccgggtgtgttccatttaggtataaagatgactgtggagactcttgttccgagaagattgttgaagtgcttatgattaattcgactagtggaccaggtcttttgtttccaaagggaggttgggagaatgatgaaactgttgaggaggctgcagttagagaagctattgaagaagcaggagttcgaggagacctaatggattttcttgggtactatgaatttaggagtaagaccctccaagatgagtgtagtccagaaggtttatgcaaagcagcaatgtttgcattgtttgtgaaagaggaacttgagtcatggcctgagcaaagcaccagaaaaaggagttgggtggctgtatcagaggcactagcaaactgtcgacatgcatggatgagggatgccctgcattgtttctgtaaatggcatgaggagtgcaagggaggatcaagcctgaactgactaaatatttgtagggggcaatgataaaaaagattagtgacatttattttaggaaagatatttcttatcaggattacatagggtgtggttgagtgtctctttttttttttttttttttgtgttcaaagctattttagaaagtatatttgaaaaccttttttcagaaagataagttatttgatgaaattctgagagcagttttaaaag

SEQ ID NO: 8282 - protein, 173 aa, Glycine max
  peptide (1)..(173): Ceres Seq. ID no. 14312225
  misc_feature (20)..(163): Pfam Name: Pfam Description:  NUDIX domain
  misc_feature (1)..(165): NCBI GI NO: 18399682 NR Description: MutT/nudix family protein [Arabidopsis thaliana]
  misc_feature (1)..(169): NCBI GI NO: 38175436 NR Description: MutT-like protein
  misc_feature (1)..(169): NCBI GI NO: 34900054 NR Description: MutT-like protein~contains ESTsAU085960
  misc_feature (1)..(161): NCBI GI NO: 15231598 NR Description: MutT/nudix family protein [Arabidopsis thaliana]
  misc_feature (1)..(165): NCBI GI NO: 18391450 NR Description: MutT/nudix family protein [Arabidopsis thaliana]
  misc_feature (1)..(165): NCBI GI NO: 25518008 NR Description: F13K23.14 protein - Arabidopsis thaliana
  misc_feature (1)..(159): NCBI GI NO: 15221055 NR Description: MutT/nudix family protein [Arabidopsis thaliana]
  misc_feature (1)..(159): NCBI GI NO: 22330598 NR Description: MutT/nudix family protein [Arabidopsis thaliana]
  misc_feature (1)..(159): NCBI GI NO: 25367539 NR Description: unknown protein [imported] - Arabidopsis thaliana
  misc_feature (1)..(87): NCBI GI NO: 38605803 NR Description: OSJNBb0014D23.5
MAELVARTGRHQQRYEHGYRLIAGCVPFRYKDDCGDSCSEKIVEVLMINSTSGPGLLFPKGGWENDETVEEAAVREAIEEAGVRGDLMDFLGYYEFRSKTLQDECSPEGLCKAAMFALFVKEELESWPEQSTRKRSWVAVSEALANCRHAWMRDALHCFCKWHEECKGGSSLN

SEQ ID NO: 8283 - protein, 127 aa, Glycine max
  peptide (1)..(127): Ceres Seq. ID no. 14312226
  misc_feature (1)..(117): Pfam Name: Pfam Description:  NUDIX domain
  misc_feature (1)..(119): NCBI GI NO: 18399682 NR Description: MutT/nudix family protein [Arabidopsis thaliana]
  misc_feature (1)..(123): NCBI GI NO: 38175436 NR Description: MutT-like protein
  misc_feature (1)..(123): NCBI GI NO: 34900054 NR Description: MutT-like protein~contains ESTsAU085960
  misc_feature (1)..(115): NCBI GI NO: 15231598 NR Description: MutT/nudix family protein [Arabidopsis thaliana]
  misc_feature (1)..(119): NCBI GI NO: 18391450 NR Description: MutT/nudix family protein [Arabidopsis thaliana]
  misc_feature (1)..(119): NCBI GI NO: 25518008 NR Description: F13K23.14 protein - Arabidopsis thaliana
  misc_feature (1)..(113): NCBI GI NO: 15221055 NR Description: MutT/nudix family protein [Arabidopsis thaliana]
  misc_feature (1)..(113): NCBI GI NO: 22330598 NR Description: MutT/nudix family protein [Arabidopsis thaliana]
  misc_feature (1)..(113): NCBI GI NO: 25367539 NR Description: unknown protein [imported] - Arabidopsis thaliana
  misc_feature (1)..(41): NCBI GI NO: 38605803 NR Description: OSJNBb0014D23.5
MINSTSGPGLLFPKGGWENDETVEEAAVREAIEEAGVRGDLMDFLGYYEFRSKTLQDECSPEGLCKAAMFALFVKEELESWPEQSTRKRSWVAVSEALANCRHAWMRDALHCFCKWHEECKGGSSLN

SEQ ID NO: 8284 - protein, 86 aa, Glycine max
  peptide (1)..(86): Ceres Seq. ID no. 14312227
  misc_feature (1)..(76): Pfam Name: Pfam Description:  NUDIX domain
  misc_feature (1)..(78): NCBI GI NO: 18399682 NR Description: MutT/nudix family protein [Arabidopsis thaliana]
  misc_feature (1)..(82): NCBI GI NO: 38175436 NR Description: MutT-like protein
  misc_feature (1)..(82): NCBI GI NO: 34900054 NR Description: MutT-like protein~contains ESTsAU085960
  misc_feature (1)..(74): NCBI GI NO: 15231598 NR Description: MutT/nudix family protein [Arabidopsis thaliana]
  misc_feature (1)..(78): NCBI GI NO: 18391450 NR Description: MutT/nudix family protein [Arabidopsis thaliana]
  misc_feature (1)..(78): NCBI GI NO: 25518008 NR Description: F13K23.14 protein - Arabidopsis thaliana
  misc_feature (1)..(72): NCBI GI NO: 15221055 NR Description: MutT/nudix family protein [Arabidopsis thaliana]
  misc_feature (1)..(72): NCBI GI NO: 22330598 NR Description: MutT/nudix family protein [Arabidopsis thaliana]
  misc_feature (1)..(72): NCBI GI NO: 25367539 NR Description: unknown protein [imported] - Arabidopsis thaliana
  misc_feature (4)..(69): NCBI GI NO: 38605803 NR Description: OSJNBb0014D23.5
MDFLGYYEFRSKTLQDECSPEGLCKAAMFALFVKEELESWPEQSTRKRSWVAVSEALANCRHAWMRDALHCFCKWHEECKGGSSLN

SEQ ID NO: 8285 - DNA, 1504 bp, Glycine max
  misc_feature (1)..(1504): Ceres Seq. ID no. 14314308
atctaacaataaattctcaaaaaataaaaaagctttttttcactgtttggaaattgtggggttgggtatctcaactttcaatttctcattagattctgaacagtgaagcttccatttttgcctttttttttataattatttccaatctattctcaactgatctgattaataataaaaatgaaaaagtaaaaaagtatcggaggttaatataattaggagaaaatggaatttaaaaagagaaagaaagggtggaaattgtaggtgtggtgtgtttcacatttgaagtaacactgaaaagaaaggaaagtgaagttgagagtttaagaagaacaagaaatgggggttggttcccaggatgccatcaagcagttccaggcattcattgaccaagttgaggagcctttgcgaacaacgtttcagaatgttcatcaaggatttgtcactgcaactttaatgcggtttctaaaagcaagggactgggatccttacaaggcacagaaaatgttggttgattgtttaaattggagggtgcaaaatgagattgacaatatattatctaaaccaattgttcctgctgatttatacagagcggtgcgtgattcacaactcataggattatcaggttactcaagagagggtctgcctgtctttgcaattggtgttgggcttagcacatttgacaaagcatctgtccattattatgtgcagtcacacattcaaattaatgaatatcgtgagcgtatagtcttgccttctgcatcagagaagcaagggcgacctattaccacttgtataaaggtcttagacatgactggtctgaagttatcagccctgaatcagattaagttgttaactattatatcatccattgatgatctgaactaccctgagaagacaaatacttattacattgtaaatgctccatacatattttcagcttgttggaaggttgtgaagctacttttacaagagaggacaagaagaaaaatacaggtgttaccaggttgtggacgagatgagctgttgactatcatggattactcgtctctaccacatttctgtagaagagaaggttctggatcatccagacattctgagagtggtagtgaaaattgctattccttggatcatcccttccatcaagggctctacaaccacatcaagcagcaagccagactccgtgaagctgttgaacccatcaagcagggatcgtttcatgtagattttccagtacctccagatgatgaagttgagatcgccaagactatagagtcggagttacacaagtttgagaacggaaatgatgtctaatacgttcttttaggatctactgttgagaccttaaaatcagagatcttttgcttagtacaaccaatgtaggaagaagactccacattagaattacttctatcaggattcggcagaattagttagcattgtttatgtatgttaaaagagaaattaaggggtagtcaacttaatgcaaatcccagctttacatcgt

SEQ ID NO: 8286 - protein, 324 aa, Glycine max
  peptide (1)..(324): Ceres Seq. ID no. 14314309
  misc_feature (135)..(239): Pfam Name: Pfam Description:  CRAL/TRIO domain
  misc_feature (1)..(324): NCBI GI NO: 7488694 NR Description: phosphatidylinositol-phosphatidylcholine transfer protein SEC14 homolog Ssh1
  misc_feature (1)..(322): NCBI GI NO: 15238794 NR Description: sec14 cytosolic factor, putative
  misc_feature (1)..(323): NCBI GI NO: 15222786 NR Description: sec14 cytosolic factor, putative
  misc_feature (28)..(323): NCBI GI NO: 25295905 NR Description: protein F14J16.8 [imported] - Arabidopsis thaliana
  misc_feature (1)..(221): NCBI GI NO: 14532536 NR Description: AT5g47730/MCA23_5 [Arabidopsis thaliana]
  misc_feature (39)..(259): NCBI GI NO: 15234966 NR Description: SEC14 - like protein [Arabidopsis thaliana]
  misc_feature (38)..(291): NCBI GI NO: 11994666 NR Description: phosphatidylinositol/phosphatidylcholine transfer protein-like
  misc_feature (38)..(254): NCBI GI NO: 15230198 NR Description: phosphatidylinositol transfer protein -related
  misc_feature (1)..(259): NCBI GI NO: 38707281 NR Description: can of worms 1 protein [Arabidopsis thaliana]
  misc_feature (1)..(259): NCBI GI NO: 15236152 NR Description: hypothetical protein [Arabidopsis thaliana]
MGVGSQDAIKQFQAFIDQVEEPLRTTFQNVHQGFVTATLMRFLKARDWDPYKAQKMLVDCLNWRVQNEIDNILSKPIVPADLYRAVRDSQLIGLSGYSREGLPVFAIGVGLSTFDKASVHYYVQSHIQINEYRERIVLPSASEKQGRPITTCIKVLDMTGLKLSALNQIKLLTIISSIDDLNYPEKTNTYYIVNAPYIFSACWKVVKLLLQERTRRKIQVLPGCGRDELLTIMDYSSLPHFCRREGSGSSRHSESGSENCYSLDHPFHQGLYNHIKQQARLREAVEPIKQGSFHVDFPVPPDDEVEIAKTIESELHKFENGNDV

SEQ ID NO: 8287 - protein, 285 aa, Glycine max
  peptide (1)..(285): Ceres Seq. ID no. 14314310
  misc_feature (96)..(200): Pfam Name: Pfam Description:  CRAL/TRIO domain
  misc_feature (1)..(285): NCBI GI NO: 7488694 NR Description: phosphatidylinositol-phosphatidylcholine transfer protein SEC14 homolog Ssh1
  misc_feature (1)..(283): NCBI GI NO: 15238794 NR Description: sec14 cytosolic factor, putative
  misc_feature (1)..(284): NCBI GI NO: 15222786 NR Description: sec14 cytosolic factor, putative
  misc_feature (1)..(284): NCBI GI NO: 25295905 NR Description: protein F14J16.8 [imported] - Arabidopsis thaliana
  misc_feature (1)..(182): NCBI GI NO: 14532536 NR Description: AT5g47730/MCA23_5 [Arabidopsis thaliana]
  misc_feature (1)..(220): NCBI GI NO: 15234966 NR Description: SEC14 - like protein [Arabidopsis thaliana]
  misc_feature (1)..(252): NCBI GI NO: 11994666 NR Description: phosphatidylinositol/phosphatidylcholine transfer protein-like
  misc_feature (1)..(215): NCBI GI NO: 15230198 NR Description: phosphatidylinositol transfer protein -related
  misc_feature (1)..(220): NCBI GI NO: 38707281 NR Description: can of worms 1 protein [Arabidopsis thaliana]
  misc_feature (1)..(220): NCBI GI NO: 15236152 NR Description: hypothetical protein [Arabidopsis thaliana]
MRFLKARDWDPYKAQKMLVDCLNWRVQNEIDNILSKPIVPADLYRAVRDSQLIGLSGYSREGLPVFAIGVGLSTFDKASVHYYVQSHIQINEYRERIVLPSASEKQGRPITTCIKVLDMTGLKLSALNQIKLLTIISSIDDLNYPEKTNTYYIVNAPYIFSACWKVVKLLLQERTRRKIQVLPGCGRDELLTIMDYSSLPHFCRREGSGSSRHSESGSENCYSLDHPFHQGLYNHIKQQARLREAVEPIKQGSFHVDFPVPPDDEVEIAKTIESELHKFENGNDV

SEQ ID NO: 8288 - protein, 269 aa, Glycine max
  peptide (1)..(269): Ceres Seq. ID no. 14314311
  misc_feature (80)..(184): Pfam Name: Pfam Description:  CRAL/TRIO domain
  misc_feature (1)..(269): NCBI GI NO: 7488694 NR Description: phosphatidylinositol-phosphatidylcholine transfer protein SEC14 homolog Ssh1
  misc_feature (1)..(267): NCBI GI NO: 15238794 NR Description: sec14 cytosolic factor, putative
  misc_feature (1)..(268): NCBI GI NO: 15222786 NR Description: sec14 cytosolic factor, putative
  misc_feature (1)..(268): NCBI GI NO: 25295905 NR Description: protein F14J16.8 [imported] - Arabidopsis thaliana
  misc_feature (1)..(166): NCBI GI NO: 14532536 NR Description: AT5g47730/MCA23_5 [Arabidopsis thaliana]
  misc_feature (1)..(204): NCBI GI NO: 15234966 NR Description: SEC14 - like protein [Arabidopsis thaliana]
  misc_feature (1)..(236): NCBI GI NO: 11994666 NR Description: phosphatidylinositol/phosphatidylcholine transfer protein-like
  misc_feature (1)..(199): NCBI GI NO: 15230198 NR Description: phosphatidylinositol transfer protein -related
  misc_feature (1)..(204): NCBI GI NO: 38707281 NR Description: can of worms 1 protein [Arabidopsis thaliana]
  misc_feature (1)..(204): NCBI GI NO: 15236152 NR Description: hypothetical protein [Arabidopsis thaliana]
MLVDCLNWRVQNEIDNILSKPIVPADLYRAVRDSQLIGLSGYSREGLPVFAIGVGLSTFDKASVHYYVQSHIQINEYRERIVLPSASEKQGRPITTCIKVLDMTGLKLSALNQIKLLTIISSIDDLNYPEKTNTYYIVNAPYIFSACWKVVKLLLQERTRRKIQVLPGCGRDELLTIMDYSSLPHFCRREGSGSSRHSESGSENCYSLDHPFHQGLYNHIKQQARLREAVEPIKQGSFHVDFPVPPDDEVEIAKTIESELHKFENGNDV

SEQ ID NO: 8289 - DNA, 1199 bp, Glycine max
  misc_feature (1)..(1199): Ceres Seq. ID no. 14312148
agaagtcactagcagcacacaaaaaaaaacacattccctcaaattcctctcttgtccacaaacatgaagctatctgcgaaacccatttcgagtccaggtcgcacagacaagttccctcccccactcatgaggtttctcagaagcaatgcgggcagcagaagcagaaggtccaggtcaagccctatgttcgtacgaaagaaaaacaccaccttcgaaacccacacccaggaaccctcttcccccaaggtcacgtgcatgggccaggtccgagtcaaacgcgcttccaaacaacccaccacccaacccgacttagctcccactcggtgccgccgccgccgccgccgctgctgctgcttctggatccgaaggcccaacaacccctgccgctgcaatcccctctggcccaactggcccttcttccgtcgaaagcccaccaagctcaaacaagactcccagtccgagcccaatttctacgcccacgaagaatcggaattaccgttccaagagagagtcaatgtggataaggatagtgattttgcttccaattccagcactcccccgagaaacgctctgcttttaactcgctgtagatccgctccgtacagatcctcctctttggctagtaggttctggagttcccccgtcaaggaccaagaaacggaactacaacacacttccgagggaccccaaacggaacccgaattagggtttctaacagaaaaaattgcttcactcaccgaaccagaaaggttgaggaagttgaaacagaaacagagtctgtgttacgtcctactgtactcactaggtgcaaatcggaaccggcgagaaccggacacagacttgaccctctggtaaataatttgttgaaaaaaagaaggttggaatttgattaattaatcccattatttttaattcgtacctatctccatattttgcttccttcctactactcttcatttaaatatagtcttttttatatgtaattgaattgaatgtgtttgagtctttgacacctagtcgttggtaacataaaaaggtatgagcgtgtagaaaatagaaagtagaaagagaggggaacgtatagaagtgatttcaggtacttattttctgtcctcgtagttaatgcatttcttgtcattacactacacaagcctgaagcctgaatttcttttttctctgccaacgatgttaagaacctg

SEQ ID NO: 8290 - protein, 263 aa, Glycine max
  peptide (1)..(263): Ceres Seq. ID no. 14312149
  misc_feature (22)..(72): Pfam Name: Pfam Description:  Protamine P1
  misc_feature (1)..(256): NCBI GI NO: 15242640 NR Description: expressed protein [Arabidopsis thaliana]
  misc_feature (4)..(163): NCBI GI NO: 15228086 NR Description: expressed protein [Arabidopsis thaliana]
  misc_feature (26)..(238): NCBI GI NO: 15228086 NR Description: expressed protein [Arabidopsis thaliana]
  misc_feature (1)..(71): NCBI GI NO: 15229495 NR Description: hypothetical protein [Arabidopsis thaliana]
  misc_feature (164)..(213): NCBI GI NO: 15229495 NR Description: hypothetical protein [Arabidopsis thaliana]
MKLSAKPISSPGRTDKFPPPLMRFLRSNAGSRSRRSRSSPMFVRKKNTTFETHTQEPSSPKVTCMGQVRVKRASKQPTTQPDLAPTRCRRRRRRCCCFWIRRPNNPCRCNPLWPNWPFFRRKPTKLKQDSQSEPNFYAHEESELPFQERVNVDKDSDFASNSSTPPRNALLLTRCRSAPYRSSSLASRFWSSPVKDQETELQHTSEGPQTEPELGFLTEKIASLTEPERLRKLKQKQSLCYVLLYSLGANRNRREPDTDLTLW

SEQ ID NO: 8291 - protein, 242 aa, Glycine max
  peptide (1)..(242): Ceres Seq. ID no. 14312150
  misc_feature (1)..(51): Pfam Name: Pfam Description:  Protamine P1
  misc_feature (1)..(235): NCBI GI NO: 15242640 NR Description: expressed protein [Arabidopsis thaliana]
  misc_feature (1)..(142): NCBI GI NO: 15228086 NR Description: expressed protein [Arabidopsis thaliana]
  misc_feature (5)..(217): NCBI GI NO: 15228086 NR Description: expressed protein [Arabidopsis thaliana]
  misc_feature (1)..(50): NCBI GI NO: 15229495 NR Description: hypothetical protein [Arabidopsis thaliana]
  misc_feature (143)..(192): NCBI GI NO: 15229495 NR Description: hypothetical protein [Arabidopsis thaliana]
MRFLRSNAGSRSRRSRSSPMFVRKKNTTFETHTQEPSSPKVTCMGQVRVKRASKQPTTQPDLAPTRCRRRRRRCCCFWIRRPNNPCRCNPLWPNWPFFRRKPTKLKQDSQSEPNFYAHEESELPFQERVNVDKDSDFASNSSTPPRNALLLTRCRSAPYRSSSLASRFWSSPVKDQETELQHTSEGPQTEPELGFLTEKIASLTEPERLRKLKQKQSLCYVLLYSLGANRNRREPDTDLTLW

SEQ ID NO: 8292 - protein, 223 aa, Glycine max
  peptide (1)..(223): Ceres Seq. ID no. 14312151
  misc_feature (1)..(216): NCBI GI NO: 15242640 NR Description: expressed protein [Arabidopsis thaliana]
  misc_feature (1)..(123): NCBI GI NO: 15228086 NR Description: expressed protein [Arabidopsis thaliana]
  misc_feature (1)..(198): NCBI GI NO: 15228086 NR Description: expressed protein [Arabidopsis thaliana]
  misc_feature (1)..(31): NCBI GI NO: 15229495 NR Description: hypothetical protein [Arabidopsis thaliana]
  misc_feature (124)..(173): NCBI GI NO: 15229495 NR Description: hypothetical protein [Arabidopsis thaliana]
MFVRKKNTTFETHTQEPSSPKVTCMGQVRVKRASKQPTTQPDLAPTRCRRRRRRCCCFWIRRPNNPCRCNPLWPNWPFFRRKPTKLKQDSQSEPNFYAHEESELPFQERVNVDKDSDFASNSSTPPRNALLLTRCRSAPYRSSSLASRFWSSPVKDQETELQHTSEGPQTEPELGFLTEKIASLTEPERLRKLKQKQSLCYVLLYSLGANRNRREPDTDLTLW

SEQ ID NO: 8293 - DNA, 716 bp, Glycine max
  misc_feature (1)..(716): Ceres Seq. ID no. 15170388
atttgtattagaggctctagcttatgagatggatccaatggttgtgccagaaggatatgtgtttgtaatgggcgacaatcggaataaaagctttgattctcataactggggtcccctgccggttgagaacattgttggtaggtccatgtttcggtactggcctccatccaaggcatctgacactgatacccatcgtaaactcccacctggtaacaaacctgtggcaatttcttgacatgattcccgcagctttgtgaaggtgatgaaggtttccagatacggtcgtttgttctaaattgttagcttgagctgactttgcacacagtttgggatgaatatcttattcattgatacaaatttgtcgatgacctaataataccattaagcgttcattagtgccatctgagatgtatttctattgctgaagtgcggggagaaaaaaaagaattaaaaaagcatgatgattttgcccccccccaaaaaaaaaaatgaaacatggtgattgatttgttttgtattctttaaggtatgcatagcgtatgaatgctagaaactggaggaaagatttgacatggagctaattgactccctgtgagttccataatcaagcttcctcccattttgaatctgtctgtaatgccattcagtcatacatgaaattgtatggacttgcctattttaaaataataaagtaagaatgcaatttcactctttcc

SEQ ID NO: 8294 - protein, 77 aa, Glycine max
  peptide (1)..(77): Ceres Seq. ID no. 15170389
  misc_feature (1)..(77): NCBI GI NO: 25408074 NR Description: probable signal peptidase I
  misc_feature (1)..(77): NCBI GI NO: 30684587 NR Description: signal peptidase I -related [Arabidopsis thaliana]
  misc_feature (1)..(67): NCBI GI NO: 15222236 NR Description: chloroplast thylakoidal processing peptidase -related
  misc_feature (1)..(67): NCBI GI NO: 21553622 NR Description: chloroplast thylakoidal processing peptidase
  misc_feature (1)..(57): NCBI GI NO: 31415933 NR Description: putative chloroplast thylakoidal processingpeptidase
  misc_feature (1)..(61): NCBI GI NO: 9294054 NR Description: contains similarity to signal peptidase
  misc_feature (1)..(61): NCBI GI NO: 25082936 NR Description: chloroplast thylakoidal processing peptidase
  misc_feature (1)..(61): NCBI GI NO: 30687572 NR Description: chloroplast thylakoidal processing peptidase -related
  misc_feature (1)..(54): NCBI GI NO: 23112452 NR Description: hypothetical protein
  misc_feature (1)..(54): NCBI GI NO: 33865530 NR Description: leader peptidase I [Synechococcus sp. WH 8102]
FVLEALAYEMDPMVVPEGYVFVMGDNRNKSFDSHNWGPLPVENIVGRSMFRYWPPSKASDTDTHRKLPPGNKPVAIS

SEQ ID NO: 8295 - protein, 68 aa, Glycine max
  peptide (1)..(68): Ceres Seq. ID no. 15170390
  misc_feature (1)..(68): NCBI GI NO: 25408074 NR Description: probable signal peptidase I
  misc_feature (1)..(68): NCBI GI NO: 30684587 NR Description: signal peptidase I -related [Arabidopsis thaliana]
  misc_feature (1)..(58): NCBI GI NO: 15222236 NR Description: chloroplast thylakoidal processing peptidase -related
  misc_feature (1)..(58): NCBI GI NO: 21553622 NR Description: chloroplast thylakoidal processing peptidase
  misc_feature (1)..(48): NCBI GI NO: 31415933 NR Description: putative chloroplast thylakoidal processingpeptidase
  misc_feature (1)..(52): NCBI GI NO: 9294054 NR Description: contains similarity to signal peptidase
  misc_feature (1)..(52): NCBI GI NO: 25082936 NR Description: chloroplast thylakoidal processing peptidase
  misc_feature (1)..(52): NCBI GI NO: 30687572 NR Description: chloroplast thylakoidal processing peptidase -related
  misc_feature (1)..(45): NCBI GI NO: 23112452 NR Description: hypothetical protein
  misc_feature (1)..(45): NCBI GI NO: 33865530 NR Description: leader peptidase I [Synechococcus sp. WH 8102]
MDPMVVPEGYVFVMGDNRNKSFDSHNWGPLPVENIVGRSMFRYWPPSKASDTDTHRKLPPGNKPVAIS

SEQ ID NO: 8296 - protein, 65 aa, Glycine max
  peptide (1)..(65): Ceres Seq. ID no. 15170391
  misc_feature (1)..(65): NCBI GI NO: 25408074 NR Description: probable signal peptidase I
  misc_feature (1)..(65): NCBI GI NO: 30684587 NR Description: signal peptidase I -related [Arabidopsis thaliana]
  misc_feature (1)..(55): NCBI GI NO: 15222236 NR Description: chloroplast thylakoidal processing peptidase -related
  misc_feature (1)..(55): NCBI GI NO: 21553622 NR Description: chloroplast thylakoidal processing peptidase
  misc_feature (1)..(45): NCBI GI NO: 31415933 NR Description: putative chloroplast thylakoidal processingpeptidase
  misc_feature (1)..(49): NCBI GI NO: 9294054 NR Description: contains similarity to signal peptidase
  misc_feature (1)..(49): NCBI GI NO: 25082936 NR Description: chloroplast thylakoidal processing peptidase
  misc_feature (1)..(49): NCBI GI NO: 30687572 NR Description: chloroplast thylakoidal processing peptidase -related
  misc_feature (1)..(42): NCBI GI NO: 23112452 NR Description: hypothetical protein
  misc_feature (1)..(42): NCBI GI NO: 33865530 NR Description: leader peptidase I [Synechococcus sp. WH 8102]
MVVPEGYVFVMGDNRNKSFDSHNWGPLPVENIVGRSMFRYWPPSKASDTDTHRKLPPGNKPVAIS

SEQ ID NO: 8297 - DNA, 1700 bp, Glycine max
  misc_feature (1)..(1700): Ceres Seq. ID no. 14311755
gtaaagtatcttccatttgaaaacaacccccattcattcattcactcactcaccaacaccaccaaacaaagccttgctggtggcggacactccgaggggcctctctctcctctccctctccacaataaaacccaaaaaactcacacaacccgacccacaacacaagagaaaaagcgcactgctcgctcgtgttctgtttctctctgtttctccgttctctgtttttttttcagatctcgaaaaatgcagagcgcggctttcactttctctccctctctccctctccgcaacccttcccctaactcttggaggagaccctctctttctctccgtctccacgccaaacacagcaacaacaacaacaacagtaacagcaccgaaggcgttaactccaatggcgtctcttccacttccttcactcgccgatcttggactcttcttccttcttcttctttcaaattcaggcctcttccttcttcacctcctcgcgccgccgaaaacgccgttcccgaaagcgcagcagcacccgtcgaaaacccgctcttcaaaactctcgaactcggcgccttgtttggcttatggtacctcttcaacatctacttcaacatctacaacaaacaggtgttgaaggcgtttcattatccggtaactgtgactgttgttcagtttgccgttgggactgtgctagtggcatttatgtggggtttgaatctctataagaggccgaaactcagtggtgctatgcttggagcgattttgccgctggctgcagtgcatactttggggaaccttttcactaatatgagtcttgggaaggtggccgtgtctttcactcacactatcaaagccatggagcctttcttttcagtcatcctttctgccatgttccttggagagtttcctacaccgtgggtggttggttcccttgtgcctattgttggtggagttgcactggcgtctgttaccgaggcctctttcaattgggctggattttggagtgcaatggcatctaatgtgacaaatcaatctcgtaatgttcttagcaaaaaggccatggttaagaaagaggattctatggacaacattactctcttctctataataactgtaatgtccttcttcttgttagcacctgtggctatcttcatggagggtgtcaaatttacccctgcttacttgcaatctgctggggtgaatgttagacaactttacatcagatctcttcttgctgctctctgtttccatgcgtatcaacaagtttcgtatatgatattgcaaagggtatcacctgttacccactctgtgggtaattgtgtgaagcgggttgtggtcattgtgagctctgtcatcttcttccaaacacctgtctcacctgtgaatgcttttgggactgctatagctcttgctggagttttcctctattcaagggtgaagcgtattaaggcaaagccaaaaacagcttaattttcaatggtaaaattttgttagttccattgaggaagccaaatagttgcaatctgcaattctgaatttctttgtaggtgagatagggaatgaggattatctttattgatcctcagtcctcacatttcctttttatttcttctccttaagttaccttgtggatttcattatttatgtttgagtaagtgcctaatggttctgctccatgaaaaaattatcctcttctgaattttgct

SEQ ID NO: 8298 - protein, 487 aa, Glycine max
  peptide (1)..(487): Ceres Seq. ID no. 14311756
  misc_feature (196)..(321): Pfam Name: Pfam Description:  Integral membrane protein DUF6
  misc_feature (82)..(486): NCBI GI NO: 7489171 NR Description: phosphate/ phosphoenolpyruvate translocator TABPPT10precursor
  misc_feature (82)..(487): NCBI GI NO: 1706110 NR Description: Triose phosphate/phosphate translocator
  misc_feature (82)..(487): NCBI GI NO: 15242801 NR Description: triose phosphate/phosphate translocator, putative
  misc_feature (82)..(487): NCBI GI NO: 21554233 NR Description: phosphate/ phosphoenolpyruvate translocatorprecursor
  misc_feature (82)..(487): NCBI GI NO: 1778141 NR Description: phosphate/ phosphoenolpyruvate translocatorprecursor
  misc_feature (82)..(487): NCBI GI NO: 7546829 NR Description: phosphate/phosphoenolpyruvate translocator
  misc_feature (82)..(487): NCBI GI NO: 7489170 NR Description: phosphate/ phosphoenolpyruvate translocatorprecursor
  misc_feature (82)..(487): NCBI GI NO: 9295275 NR Description: phosphoenolpyruvate/ phosphate translocatorprecursor
  misc_feature (164)..(487): NCBI GI NO: 13991929 NR Description: phosphoenolpyruvate/phosphate translocator
  misc_feature (82)..(487): NCBI GI NO: 29647427 NR Description: putative phosphoenolpyruvate/phosphate translocator
VKYLPFENNPHSFIHSLTNTTKQSLAGGGHSEGPLSPLPLHNKTQKTHTTRPTTQEKKRTARSCSVSLCFSVLCFFFRSRKMQSAAFTFSPSLPLRNPSPNSWRRPSLSLRLHAKHSNNNNNSNSTEGVNSNGVSSTSFTRRSWTLLPSSSFKFRPLPSSPPRAAENAVPESAAAPVENPLFKTLELGALFGLWYLFNIYFNIYNKQVLKAFHYPVTVTVVQFAVGTVLVAFMWGLNLYKRPKLSGAMLGAILPLAAVHTLGNLFTNMSLGKVAVSFTHTIKAMEPFFSVILSAMFLGEFPTPWVVGSLVPIVGGVALASVTEASFNWAGFWSAMASNVTNQSRNVLSKKAMVKKEDSMDNITLFSIITVMSFFLLAPVAIFMEGVKFTPAYLQSAGVNVRQLYIRSLLAALCFHAYQQVSYMILQRVSPVTHSVGNCVKRVVVIVSSVIFFQTPVSPVNAFGTAIALAGVFLYSRVKRIKAKPKTA

SEQ ID NO: 8299 - protein, 406 aa, Glycine max
  peptide (1)..(406): Ceres Seq. ID no. 14311757
  misc_feature (115)..(240): Pfam Name: Pfam Description:  Integral membrane protein DUF6
  misc_feature (1)..(405): NCBI GI NO: 7489171 NR Description: phosphate/ phosphoenolpyruvate translocator TABPPT10precursor
  misc_feature (1)..(406): NCBI GI NO: 1706110 NR Description: Triose phosphate/phosphate translocator
  misc_feature (1)..(406): NCBI GI NO: 15242801 NR Description: triose phosphate/phosphate translocator, putative
  misc_feature (1)..(406): NCBI GI NO: 21554233 NR Description: phosphate/ phosphoenolpyruvate translocatorprecursor
  misc_feature (1)..(406): NCBI GI NO: 1778141 NR Description: phosphate/ phosphoenolpyruvate translocatorprecursor
  misc_feature (1)..(406): NCBI GI NO: 7546829 NR Description: phosphate/phosphoenolpyruvate translocator
  misc_feature (1)..(406): NCBI GI NO: 7489170 NR Description: phosphate/ phosphoenolpyruvate translocatorprecursor
  misc_feature (1)..(406): NCBI GI NO: 9295275 NR Description: phosphoenolpyruvate/ phosphate translocatorprecursor
  misc_feature (83)..(406): NCBI GI NO: 13991929 NR Description: phosphoenolpyruvate/phosphate translocator
  misc_feature (1)..(406): NCBI GI NO: 29647427 NR Description: putative phosphoenolpyruvate/phosphate translocator
MQSAAFTFSPSLPLRNPSPNSWRRPSLSLRLHAKHSNNNNNSNSTEGVNSNGVSSTSFTRRSWTLLPSSSFKFRPLPSSPPRAAENAVPESAAAPVENPLFKTLELGALFGLWYLFNIYFNIYNKQVLKAFHYPVTVTVVQFAVGTVLVAFMWGLNLYKRPKLSGAMLGAILPLAAVHTLGNLFTNMSLGKVAVSFTHTIKAMEPFFSVILSAMFLGEFPTPWVVGSLVPIVGGVALASVTEASFNWAGFWSAMASNVTNQSRNVLSKKAMVKKEDSMDNITLFSIITVMSFFLLAPVAIFMEGVKFTPAYLQSAGVNVRQLYIRSLLAALCFHAYQQVSYMILQRVSPVTHSVGNCVKRVVVIVSSVIFFQTPVSPVNAFGTAIALAGVFLYSRVKRIKAKPKTA

SEQ ID NO: 8300 - protein, 255 aa, Glycine max
  peptide (1)..(255): Ceres Seq. ID no. 14311758
  misc_feature (1)..(89): Pfam Name: Pfam Description:  Integral membrane protein DUF6
  misc_feature (1)..(254): NCBI GI NO: 7489171 NR Description: phosphate/ phosphoenolpyruvate translocator TABPPT10precursor
  misc_feature (1)..(255): NCBI GI NO: 1706110 NR Description: Triose phosphate/phosphate translocator
  misc_feature (1)..(255): NCBI GI NO: 15242801 NR Description: triose phosphate/phosphate translocator, putative
  misc_feature (1)..(255): NCBI GI NO: 21554233 NR Description: phosphate/ phosphoenolpyruvate translocatorprecursor
  misc_feature (1)..(255): NCBI GI NO: 1778141 NR Description: phosphate/ phosphoenolpyruvate translocatorprecursor
  misc_feature (1)..(255): NCBI GI NO: 7546829 NR Description: phosphate/phosphoenolpyruvate translocator
  misc_feature (1)..(255): NCBI GI NO: 7489170 NR Description: phosphate/ phosphoenolpyruvate translocatorprecursor
  misc_feature (1)..(255): NCBI GI NO: 9295275 NR Description: phosphoenolpyruvate/ phosphate translocatorprecursor
  misc_feature (1)..(255): NCBI GI NO: 13991929 NR Description: phosphoenolpyruvate/phosphate translocator
  misc_feature (1)..(255): NCBI GI NO: 29647427 NR Description: putative phosphoenolpyruvate/phosphate translocator
MWGLNLYKRPKLSGAMLGAILPLAAVHTLGNLFTNMSLGKVAVSFTHTIKAMEPFFSVILSAMFLGEFPTPWVVGSLVPIVGGVALASVTEASFNWAGFWSAMASNVTNQSRNVLSKKAMVKKEDSMDNITLFSIITVMSFFLLAPVAIFMEGVKFTPAYLQSAGVNVRQLYIRSLLAALCFHAYQQVSYMILQRVSPVTHSVGNCVKRVVVIVSSVIFFQTPVSPVNAFGTAIALAGVFLYSRVKRIKAKPKTA

SEQ ID NO: 8301 - DNA, 585 bp, Glycine max
  misc_feature (1)..(585): Ceres Seq. ID no. 13638213
ccttcactctcttctccgatctcaaaatgcccgccgtttatggagctcgcttgaccaccttcgaagactccgagaaggagagtgaatacggttacgttcgcaaggtatcaggaccagtcgtcgttgcagatggcatggctggggctgctatgtatgaactcgtgcgtgttggtcatgataatctcattggtgaaattattcgtctcgaagggaattctgctaccatccaagtttatgaggaaactgctggcttgatggttaatgatccggtgttacggactcacaagcctttatccgtggagttgggacctggaatactggggaatattttcgatggaattcagaggcctttgaaaactattgctaaacgatctggtgatgtctatattcctcgtggtgtctctgttccagcactcgacaaagatacactttgggaatttcaacctaagaaaattggtgaaggcgaccttttaactggtggagatatggtagctttgtttagtttaattaattaacctaattaatgaaattcgaagtttatctctatgaacaatgtagacttggtccacattttgtggctggtgt

SEQ ID NO: 8302 - protein, 170 aa, Glycine max
  peptide (1)..(170): Ceres Seq. ID no. 13638214
  misc_feature (32)..(94): Pfam Name: Pfam Description:  ATP synthase alpha/beta family
  misc_feature (9)..(164): NCBI GI NO: 3169287 NR Description: vacuolar H+-ATPase catalytic subunit
  misc_feature (9)..(164): NCBI GI NO: 2506211 NR Description: Vacuolar ATP synthase catalytic subunit A
  misc_feature (9)..(164): NCBI GI NO: 401322 NR Description: Vacuolar ATP synthase catalytic subunit A
  misc_feature (9)..(164): NCBI GI NO: 137460 NR Description: Vacuolar ATP synthase catalytic subunit A
  misc_feature (9)..(164): NCBI GI NO: 12585490 NR Description: Vacuolar ATP synthase catalytic subunit A
  misc_feature (9)..(164): NCBI GI NO: 15982954 NR Description: V-ATPase catalytic subunit A [Prunus persica]
  misc_feature (9)..(164): NCBI GI NO: 13235340 NR Description: putative vacuolar ATP Synthase subunit A
  misc_feature (9)..(164): NCBI GI NO: 27883932 NR Description: vacuolar H+-ATPase A1 subunit isoform
  misc_feature (9)..(164): NCBI GI NO: 27884018 NR Description: vacuolar H+-ATPase A2 subunit isoform
  misc_feature (9)..(165): NCBI GI NO: 1929027 NR Description: BV-70/5 [Beta vulgaris]
FTLFSDLKMPAVYGARLTTFEDSEKESEYGYVRKVSGPVVVADGMAGAAMYELVRVGHDNLIGEIIRLEGNSATIQVYEETAGLMVNDPVLRTHKPLSVELGPGILGNIFDGIQRPLKTIAKRSGDVYIPRGVSVPALDKDTLWEFQPKKIGEGDLLTGGDMVALFSLIN

SEQ ID NO: 8303 - protein, 162 aa, Glycine max
  peptide (1)..(162): Ceres Seq. ID no. 13638215
  misc_feature (24)..(86): Pfam Name: Pfam Description:  ATP synthase alpha/beta family
  misc_feature (1)..(156): NCBI GI NO: 3169287 NR Description: vacuolar H+-ATPase catalytic subunit
  misc_feature (1)..(156): NCBI GI NO: 2506211 NR Description: Vacuolar ATP synthase catalytic subunit A
  misc_feature (1)..(156): NCBI GI NO: 401322 NR Description: Vacuolar ATP synthase catalytic subunit A
  misc_feature (1)..(156): NCBI GI NO: 137460 NR Description: Vacuolar ATP synthase catalytic subunit A
  misc_feature (1)..(156): NCBI GI NO: 12585490 NR Description: Vacuolar ATP synthase catalytic subunit A
  misc_feature (1)..(156): NCBI GI NO: 15982954 NR Description: V-ATPase catalytic subunit A [Prunus persica]
  misc_feature (1)..(156): NCBI GI NO: 13235340 NR Description: putative vacuolar ATP Synthase subunit A
  misc_feature (1)..(156): NCBI GI NO: 27883932 NR Description: vacuolar H+-ATPase A1 subunit isoform
  misc_feature (1)..(156): NCBI GI NO: 27884018 NR Description: vacuolar H+-ATPase A2 subunit isoform
  misc_feature (1)..(157): NCBI GI NO: 1929027 NR Description: BV-70/5 [Beta vulgaris]
MPAVYGARLTTFEDSEKESEYGYVRKVSGPVVVADGMAGAAMYELVRVGHDNLIGEIIRLEGNSATIQVYEETAGLMVNDPVLRTHKPLSVELGPGILGNIFDGIQRPLKTIAKRSGDVYIPRGVSVPALDKDTLWEFQPKKIGEGDLLTGGDMVALFSLIN

SEQ ID NO: 8304 - protein, 126 aa, Glycine max
  peptide (1)..(126): Ceres Seq. ID no. 13638216
  misc_feature (1)..(50): Pfam Name: Pfam Description:  ATP synthase alpha/beta family
  misc_feature (1)..(120): NCBI GI NO: 3169287 NR Description: vacuolar H+-ATPase catalytic subunit
  misc_feature (1)..(120): NCBI GI NO: 2506211 NR Description: Vacuolar ATP synthase catalytic subunit A
  misc_feature (1)..(120): NCBI GI NO: 401322 NR Description: Vacuolar ATP synthase catalytic subunit A
  misc_feature (1)..(120): NCBI GI NO: 137460 NR Description: Vacuolar ATP synthase catalytic subunit A
  misc_feature (1)..(120): NCBI GI NO: 12585490 NR Description: Vacuolar ATP synthase catalytic subunit A
  misc_feature (1)..(120): NCBI GI NO: 15982954 NR Description: V-ATPase catalytic subunit A [Prunus persica]
  misc_feature (1)..(120): NCBI GI NO: 13235340 NR Description: putative vacuolar ATP Synthase subunit A
  misc_feature (1)..(120): NCBI GI NO: 27883932 NR Description: vacuolar H+-ATPase A1 subunit isoform
  misc_feature (1)..(120): NCBI GI NO: 27884018 NR Description: vacuolar H+-ATPase A2 subunit isoform
  misc_feature (1)..(121): NCBI GI NO: 1929027 NR Description: BV-70/5 [Beta vulgaris]
MAGAAMYELVRVGHDNLIGEIIRLEGNSATIQVYEETAGLMVNDPVLRTHKPLSVELGPGILGNIFDGIQRPLKTIAKRSGDVYIPRGVSVPALDKDTLWEFQPKKIGEGDLLTGGDMVALFSLIN

SEQ ID NO: 8305 - DNA, 1146 bp, Glycine max
  misc_feature (1)..(1146): Ceres Seq. ID no. 15171359
acatccaaatgtcttctttcctcttagcttcgcttgcacttttgttttgcatctcctccttggagaagagctttgcctttcaagcaacaaaggaaagcaacaatcttcgtcaatatcattttgttcacctcaactctctatttccatcatcttcttgcagctcttctgccaaaggatgctcctcatccacagatgcatcatgcatatatgacgtcaaatacggtgacaattccatctcccgcggcttcttgagtcaggagcgccttaccatcaccgccaccgacatcgtccacgacttcctctttggctgtggccaagacaacgagggcctcttcaggggcaccgccggcctcatgggcctcagccgccaccccatttcctttgtccaacaaacctcctcaatttacaacaaaattttctcctactgtctcccctccacccccagctcccttggccacctcaccttcggcgcttccgccgccaccaatgctaacctcaaatacactcccttttccacaatctccggcgaaaactccttctacggtctcgacatcgtcggcatctccgttggcggcaccaaactccctgctgtctcctcctccaccttctccgccggtggctccatcatcgactccggcaccgtgatcacgcggttgcctccgaccgcgtacgccgcgctccggtcggcatttcggcagtttatgatgaagtaccccgttgcctatgggacccgcctacttgacacgtgttatgatttcagtgggtataaggagatttcagttccgaggatagattttgaatttgccggtggcgtcaaggtggagttgccattggtggggatactctatggggaaagtgcgcaacaactgtgtttggcttttgctgcaaatgggaatggcaatgatattacgatatttgggaatgtgcaacaaaagacactagaggtcgtgtatgatgttgagggtgggaggatagggtttggtgctgctgggtgcaactgaagttagtttgattaatagtggtgttaattaaacatgctttgggcttgttagggaggaagaaatcttaattggctctggcatttttaattactattgttgttgttactggaaagtactctaaaacatatgaaaaaataaataaagc

SEQ ID NO: 8306 - protein, 332 aa, Glycine max
  peptide (1)..(332): Ceres Seq. ID no. 15171360
  misc_feature (51)..(327): Pfam Name: Pfam Description:  Eukaryotic aspartyl protease
  misc_feature (49)..(332): NCBI GI NO: 11358588 NR Description: nucleoid DNA-binding protein cnd41-like protein -Arabidopsis thaliana
  misc_feature (49)..(332): NCBI GI NO: 22326716 NR Description: nucleoid DNA-binding protein cnd41 - like protein
  misc_feature (51)..(332): NCBI GI NO: 7489168 NR Description: nucleoid DNA-binding protein cnd41
  misc_feature (51)..(332): NCBI GI NO: 24430421 NR Description: 41 kD chloroplast nucleoid DNA binding protein
  misc_feature (44)..(331): NCBI GI NO: 24417232 NR Description: unknown [Arabidopsis thaliana]
  misc_feature (44)..(331): NCBI GI NO: 15238250 NR Description: nucleoid DNA-binding protein cnd41 - like protein
  misc_feature (46)..(331): NCBI GI NO: 18412482 NR Description: aspartyl protease -related [Arabidopsis thaliana]
  misc_feature (46)..(331): NCBI GI NO: 25406599 NR Description: probable aspartyl proteinase, 105611-106921
  misc_feature (46)..(331): NCBI GI NO: 21595063 NR Description: putative aspartyl protease [Arabidopsis thaliana]
  misc_feature (53)..(331): NCBI GI NO: 34912520 NR Description: chloroplast nucleoid DNA-binding protein cnd41-like
IQMSSFLLASLALLFCISSLEKSFAFQATKESNNLRQYHFVHLNSLFPSSSCSSSAKGCSSSTDASCIYDVKYGDNSISRGFLSQERLTITATDIVHDFLFGCGQDNEGLFRGTAGLMGLSRHPISFVQQTSSIYNKIFSYCLPSTPSSLGHLTFGASAATNANLKYTPFSTISGENSFYGLDIVGISVGGTKLPAVSSSTFSAGGSIIDSGTVITRLPPTAYAALRSAFRQFMMKYPVAYGTRLLDTCYDFSGYKEISVPRIDFEFAGGVKVELPLVGILYGESAQQLCLAFAANGNGNDITIFGNVQQKTLEVVYDVEGGRIGFGAAGCN

SEQ ID NO: 8307 - protein, 330 aa, Glycine max
  peptide (1)..(330): Ceres Seq. ID no. 15171361
  misc_feature (49)..(325): Pfam Name: Pfam Description:  Eukaryotic aspartyl protease
  misc_feature (47)..(330): NCBI GI NO: 11358588 NR Description: nucleoid DNA-binding protein cnd41-like protein -Arabidopsis thaliana
  misc_feature (47)..(330): NCBI GI NO: 22326716 NR Description: nucleoid DNA-binding protein cnd41 - like protein
  misc_feature (49)..(330): NCBI GI NO: 7489168 NR Description: nucleoid DNA-binding protein cnd41
  misc_feature (49)..(330): NCBI GI NO: 24430421 NR Description: 41 kD chloroplast nucleoid DNA binding protein
  misc_feature (42)..(329): NCBI GI NO: 24417232 NR Description: unknown [Arabidopsis thaliana]
  misc_feature (42)..(329): NCBI GI NO: 15238250 NR Description: nucleoid DNA-binding protein cnd41 - like protein
  misc_feature (44)..(329): NCBI GI NO: 18412482 NR Description: aspartyl protease -related [Arabidopsis thaliana]
  misc_feature (44)..(329): NCBI GI NO: 25406599 NR Description: probable aspartyl proteinase, 105611-106921
  misc_feature (44)..(329): NCBI GI NO: 21595063 NR Description: putative aspartyl protease [Arabidopsis thaliana]
  misc_feature (51)..(329): NCBI GI NO: 34912520 NR Description: chloroplast nucleoid DNA-binding protein cnd41-like
MSSFLLASLALLFCISSLEKSFAFQATKESNNLRQYHFVHLNSLFPSSSCSSSAKGCSSSTDASCIYDVKYGDNSISRGFLSQERLTITATDIVHDFLFGCGQDNEGLFRGTAGLMGLSRHPISFVQQTSSIYNKIFSYCLPSTPSSLGHLTFGASAATNANLKYTPFSTISGENSFYGLDIVGISVGGTKLPAVSSSTFSAGGSIIDSGTVITRLPPTAYAALRSAFRQFMMKYPVAYGTRLLDTCYDFSGYKEISVPRIDFEFAGGVKVELPLVGILYGESAQQLCLAFAANGNGNDITIFGNVQQKTLEVVYDVEGGRIGFGAAGCN

SEQ ID NO: 8308 - protein, 215 aa, Glycine max
  peptide (1)..(215): Ceres Seq. ID no. 15171362
  misc_feature (1)..(210): Pfam Name: Pfam Description:  Eukaryotic aspartyl protease
  misc_feature (1)..(215): NCBI GI NO: 11358588 NR Description: nucleoid DNA-binding protein cnd41-like protein -Arabidopsis thaliana
  misc_feature (1)..(215): NCBI GI NO: 22326716 NR Description: nucleoid DNA-binding protein cnd41 - like protein
  misc_feature (1)..(215): NCBI GI NO: 7489168 NR Description: nucleoid DNA-binding protein cnd41
  misc_feature (1)..(215): NCBI GI NO: 24430421 NR Description: 41 kD chloroplast nucleoid DNA binding protein
  misc_feature (1)..(214): NCBI GI NO: 24417232 NR Description: unknown [Arabidopsis thaliana]
  misc_feature (1)..(214): NCBI GI NO: 15238250 NR Description: nucleoid DNA-binding protein cnd41 - like protein
  misc_feature (1)..(214): NCBI GI NO: 18412482 NR Description: aspartyl protease -related [Arabidopsis thaliana]
  misc_feature (1)..(214): NCBI GI NO: 25406599 NR Description: probable aspartyl proteinase, 105611-106921
  misc_feature (1)..(214): NCBI GI NO: 21595063 NR Description: putative aspartyl protease [Arabidopsis thaliana]
  misc_feature (1)..(214): NCBI GI NO: 34912520 NR Description: chloroplast nucleoid DNA-binding protein cnd41-like
MGLSRHPISFVQQTSSIYNKIFSYCLPSTPSSLGHLTFGASAATNANLKYTPFSTISGENSFYGLDIVGISVGGTKLPAVSSSTFSAGGSIIDSGTVITRLPPTAYAALRSAFRQFMMKYPVAYGTRLLDTCYDFSGYKEISVPRIDFEFAGGVKVELPLVGILYGESAQQLCLAFAANGNGNDITIFGNVQQKTLEVVYDVEGGRIGFGAAGCN

SEQ ID NO: 8309 - DNA, 1474 bp, Glycine max
  misc_feature (1)..(1474): Ceres Seq. ID no. 14314312
aatttggaaatgtaaaaaaaaattgggtgtttccgatagtagtagttgtagcggtcaagccgagccgatccgatgacgcgagccactcacacactgggggttcccccaacaacacgcgcccctccccggcgaccgtaccgtattatccctcaccattcccactctttcgccttgccgtttcgctttctctctcttcttcttcttctttctctttctctttctctttctcttttccctttctctttatctctcttccaaccctaattccctttttccgatgccggacttccacgactccctcctcaccaccacgccgccgccatcgcgccccgtccccgtccgcgaggactgctggtccgaggaggcctcctccacgctcgtcgacgcctggggccgccgctacctcgagctcaaccgcggcaacctccgccaaaaggactggcaggacgtcgccgacgccgtcaacgcgctccacggccacaccaaaaagacgcaccgcaccgacgtccagtgcaaaaaccgcatcgacaccattaagaagaagtacaagatcgagaaggctagggtttcggcctccaacggtactctctcttcctcttggcctttctacgagcgcttggacgctctaatcggccctaattttagcgcgaagaaatcaacctcttcgccgtctccgtcgccgccggtggctcttcctttgctgccgcatcggaagaaccagaaccaaaaccagaacccttcctcttctcctgcgattgcggtgccgccgacggccgtcgctctgccgcagaagcgctcctcggcagcggcgatggacgagggttacttcagaaggaattactccgccgtggctgccgcggcggcggcagcggaggctgatgaggacgatgaggaggaagacgaggaggaggcggaggatttggaggaggaggaggaggaagaatgtgaagaggaagggagagggagcgaagtggaggaaggggataaggagagggaagggatgaggaggttggcgaaggcgatagagaggtttggggaagtttatgagagagtggaggcgcagaagctgaggcagatggtggatttggagaaacagaggatgcagtttgctaaagatcttgaagtgcagaggatggagatgtttatggacacacaggttcagctcgagagaattaagcgcggtaaaagatctggctctaatggtgagatacaaaaaaaaattcggccttttatttgcttcccttttggcttgatttgatcacacgttgtactttttagtgttttgttttcaacgaatgaatgatgttttggacttgaggataagtgggtcgctagaggattattctccagtgagttcctttttggtggtaaaagaaaaatagattggtttggactctagagggtgcactgaatgctctgaattggttgtttcttgtagtcctacaattaaatatactagcatgtgatgcacttt

SEQ ID NO: 8310 - protein, 326 aa, Glycine max
  peptide (1)..(326): Ceres Seq. ID no. 14314313
  misc_feature (192)..(266): Pfam Name: Pfam Description:  Prothymosin/parathymosin family
  misc_feature (12)..(309): NCBI GI NO: 11357442 NR Description: hypothetical protein F14P22
  misc_feature (12)..(309): NCBI GI NO: 30694843 NR Description: expressed protein [Arabidopsis thaliana]
  misc_feature (13)..(322): NCBI GI NO: 34911060 NR Description: putative 6b-interacting protein 1
  misc_feature (10)..(147): NCBI GI NO: 10178132 NR Description: gb|AAF01512
  misc_feature (10)..(147): NCBI GI NO: 18414919 NR Description: expressed protein [Arabidopsis thaliana]
  misc_feature (172)..(310): NCBI GI NO: 10178132 NR Description: gb|AAF01512
  misc_feature (172)..(310): NCBI GI NO: 18414919 NR Description: expressed protein [Arabidopsis thaliana]
  misc_feature (172)..(315): NCBI GI NO: 30680994 NR Description: expressed protein [Arabidopsis thaliana]
  misc_feature (10)..(147): NCBI GI NO: 30680994 NR Description: expressed protein [Arabidopsis thaliana]
  misc_feature (172)..(311): NCBI GI NO: 6016685 NR Description: hypothetical protein [Arabidopsis thaliana]
MPDFHDSLLTTTPPPSRPVPVREDCWSEEASSTLVDAWGRRYLELNRGNLRQKDWQDVADAVNALHGHTKKTHRTDVQCKNRIDTIKKKYKIEKARVSASNGTLSSSWPFYERLDALIGPNFSAKKSTSSPSPSPPVALPLLPHRKNQNQNQNPSSSPAIAVPPTAVALPQKRSSAAAMDEGYFRRNYSAVAAAAAAAEADEDDEEEDEEEAEDLEEEEEEECEEEGRGSEVEEGDKEREGMRRLAKAIERFGEVYERVEAQKLRQMVDLEKQRMQFAKDLEVQRMEMFMDTQVQLERIKRGKRSGSNGEIQKKIRPFICFPFGLI

SEQ ID NO: 8311 - protein, 208 aa, Glycine max
  peptide (1)..(208): Ceres Seq. ID no. 14314314
  misc_feature (21)..(207): Pfam Name: Pfam Description:  Equine herpesvirus glycoprotein gp2
  misc_feature (17)..(208): NCBI GI NO: 5821145 NR Description: RNA binding protein [Homo sapiens]
  misc_feature (17)..(208): NCBI GI NO: 5821143 NR Description: RNA binding protein [Homo sapiens]
FGNVKKNWVFPIVVVVAVKPSRSDDASHSHTGGSPNNTRPSPATVPYYPSPFPLFRLAVSLSLSSSSSFSFSFSFSFPFLFISLPTLIPFFRCRTSTTPSSPPRRRHRAPSPSARTAGPRRPPPRSSTPGAAATSSSTAATSAKRTGRTSPTPSTRSTATPKRRTAPTSSAKTASTPLRRSTRSRRLGFRPPTVLSLPLGLSTSAWTL

SEQ ID NO: 8312 - DNA, 1665 bp, Glycine max
  misc_feature (1)..(1665): Ceres Seq. ID no. 15171821
acttcataggcctttcttattcttccttctaagaaaccacttcaaatcatcaacttccctagacttacacaccctttgggctgtaacaagcaatctgatcctcttgttatcattcagattgatttctcttctagcacctcgatcaaagggctaaaaaaatttgctacttattgcacttttcttttcatggtttgatacatcttattgattttagtgctatttcaaggggtgaatttgagacatgggtttgagttctaagcaggtttctagcagtggacttgattggaaacaaaccttgttggaggctcagaatttggaacttccaaagcctaatctgatgaggaaacaacagcagcagcagcagcaacaacaacaacaaactcagccgaattcagagtctttgaaatgtccaagatgtgactctaccaacaccaaattttgttactacaacaactacaacaagtctcagcctcgccatttctgcagggcttgcaagaggcactggactaaaggtggaactctacgcaatgttccagttggtggtggaaggaagaacaagagggtcaaaaaatcaatcactccaattacaacatcttccaccaccaccacaccaatcacaaccgccacttcaacttgcactgccacagtcacaacctcaattggcaacaacatggatgctatgttgggttgttatagccacatgacaatccaaactcctcttgcggatgatcagaaaaacatgtcttcctctctctaccaagctctaattcgtccaccacctttgctgctacaacagaatctgctcaacacaagagaattagaaggcaaagattttggtattggtatcggtaataatggtatctttcctagttcaactttggctcttcctactcatcaaagccaaagcctactcttccctttctcagcctcaagcagatcttttgacaccaacccttgttcagtagtgtcaacctctcttagatcctccaatgtttataactatggggaggatcagtttaaagcaatagaggaaccaaccatcaatagtactactgctactatagtgcctagcacaggtggcaccaacaacacacatcatccatgggagatagcagcagcaacaagtggtgttggcttgggaacttcttcaaattcaaactattggaattgggaggattttgattcattggtttcaactgatctaaaagatccctgggatgattcagatatcaaaccctgagaaccaaacaataagcaacaacacatcatgatggggcatgagaagtatttagagctgtcatgttttagtttcagcttcagcttcaagcaaaagggtcccaaaattcctcacaattagttgcaacccactctgtttgcctctttgttcatctctcttatcatttcctctaatctctaataataaaatggtgtattaatgtatgcaaacattgcaaagtagtgtctagcattatttatcaatataggattttgttttttttattttttattttattttttggggagttttgtgagtgctttgtgatgggagtgatatagatatggggtctgctccagcactgctgaactgacagaatgtgattggaagattctttggacatgtatatatcttggaatgatattttatcatacggttttattgcttgc

SEQ ID NO: 8313 - protein, 332 aa, Glycine max
  peptide (1)..(332): Ceres Seq. ID no. 15171822
  misc_feature (49)..(107): Pfam Name: Pfam Description:  Dof domain, zinc finger
  misc_feature (37)..(170): NCBI GI NO: 22329829 NR Description: Dof zinc finger protein [Arabidopsis thaliana]
  misc_feature (37)..(170): NCBI GI NO: 25518515 NR Description: hypothetical protein F3H9.4 - Arabidopsis thaliana
  misc_feature (12)..(227): NCBI GI NO: 21538785 NR Description: dof zinc finger protein
  misc_feature (4)..(136): NCBI GI NO: 37051129 NR Description: DNA binding with one finger 4 protein
  misc_feature (54)..(307): NCBI GI NO: 7688355 NR Description: Dof zinc finger protein [Solanum tuberosum]
  misc_feature (32)..(122): NCBI GI NO: 15027981 NR Description: putative Dof zinc finger protein
  misc_feature (32)..(133): NCBI GI NO: 15232514 NR Description: Dof zinc finger protein [Arabidopsis thaliana]
  misc_feature (26)..(159): NCBI GI NO: 7489820 NR Description: prolamin box binding factor - maize
  misc_feature (49)..(159): NCBI GI NO: 29124139 NR Description: putative DNA-binding protein
  misc_feature (30)..(136): NCBI GI NO: 25352305 NR Description: probable DOF zinc finger protein
MGLSSKQVSSSGLDWKQTLLEAQNLELPKPNLMRKQQQQQQQQQQQTQPNSESLKCPRCDSTNTKFCYYNNYNKSQPRHFCRACKRHWTKGGTLRNVPVGGGRKNKRVKKSITPITTSSTTTTPITTATSTCTATVTTSIGNNMDAMLGCYSHMTIQTPLADDQKNMSSSLYQALIRPPPLLLQQNLLNTRELEGKDFGIGIGNNGIFPSSTLALPTHQSQSLLFPFSASSRSFDTNPCSVVSTSLRSSNVYNYGEDQFKAIEEPTINSTTATIVPSTGGTNNTHHPWEIAAATSGVGLGTSSNSNYWNWEDFDSLVSTDLKDPWDDSDIKP

SEQ ID NO: 8314 - protein, 300 aa, Glycine max
  peptide (1)..(300): Ceres Seq. ID no. 15171823
  misc_feature (17)..(75): Pfam Name: Pfam Description:  Dof domain, zinc finger
  misc_feature (5)..(138): NCBI GI NO: 22329829 NR Description: Dof zinc finger protein [Arabidopsis thaliana]
  misc_feature (5)..(138): NCBI GI NO: 25518515 NR Description: hypothetical protein F3H9.4 - Arabidopsis thaliana
  misc_feature (1)..(195): NCBI GI NO: 21538785 NR Description: dof zinc finger protein
  misc_feature (1)..(104): NCBI GI NO: 37051129 NR Description: DNA binding with one finger 4 protein
  misc_feature (22)..(275): NCBI GI NO: 7688355 NR Description: Dof zinc finger protein [Solanum tuberosum]
  misc_feature (1)..(90): NCBI GI NO: 15027981 NR Description: putative Dof zinc finger protein
  misc_feature (1)..(101): NCBI GI NO: 15232514 NR Description: Dof zinc finger protein [Arabidopsis thaliana]
  misc_feature (1)..(127): NCBI GI NO: 7489820 NR Description: prolamin box binding factor - maize
  misc_feature (17)..(127): NCBI GI NO: 29124139 NR Description: putative DNA-binding protein
  misc_feature (1)..(104): NCBI GI NO: 25352305 NR Description: probable DOF zinc finger protein
MRKQQQQQQQQQQQTQPNSESLKCPRCDSTNTKFCYYNNYNKSQPRHFCRACKRHWTKGGTLRNVPVGGGRKNKRVKKSITPITTSSTTTTPITTATSTCTATVTTSIGNNMDAMLGCYSHMTIQTPLADDQKNMSSSLYQALIRPPPLLLQQNLLNTRELEGKDFGIGIGNNGIFPSSTLALPTHQSQSLLFPFSASSRSFDTNPCSVVSTSLRSSNVYNYGEDQFKAIEEPTINSTTATIVPSTGGTNNTHHPWEIAAATSGVGLGTSSNSNYWNWEDFDSLVSTDLKDPWDDSDIKP

SEQ ID NO: 8315 - protein, 189 aa, Glycine max
  peptide (1)..(189): Ceres Seq. ID no. 15171824
  misc_feature (1)..(27): NCBI GI NO: 22329829 NR Description: Dof zinc finger protein [Arabidopsis thaliana]
  misc_feature (1)..(27): NCBI GI NO: 25518515 NR Description: hypothetical protein F3H9.4 - Arabidopsis thaliana
  misc_feature (1)..(84): NCBI GI NO: 21538785 NR Description: dof zinc finger protein
  misc_feature (1)..(164): NCBI GI NO: 7688355 NR Description: Dof zinc finger protein [Solanum tuberosum]
  misc_feature (1)..(16): NCBI GI NO: 7489820 NR Description: prolamin box binding factor - maize
  misc_feature (1)..(16): NCBI GI NO: 29124139 NR Description: putative DNA-binding protein
  misc_feature (1)..(103): NCBI GI NO: 21593274 NR Description: unknown [Arabidopsis thaliana]
  misc_feature (1)..(63): NCBI GI NO: 15239087 NR Description: Dof zinc finger protein [Arabidopsis thaliana]
MDAMLGCYSHMTIQTPLADDQKNMSSSLYQALIRPPPLLLQQNLLNTRELEGKDFGIGIGNNGIFPSSTLALPTHQSQSLLFPFSASSRSFDTNPCSVVSTSLRSSNVYNYGEDQFKAIEEPTINSTTATIVPSTGGTNNTHHPWEIAAATSGVGLGTSSNSNYWNWEDFDSLVSTDLKDPWDDSDIKP

SEQ ID NO: 8316 - DNA, 1145 bp, Glycine max
  misc_feature (1)..(1145): Ceres Seq. ID no. 14312124
attttggtaccaccacaactctctatcactcacaacattttcacacaaacactttctgaaaaaagaattcgtttcttttccctaacatggccagatcacaacagcgataccgaggtgtccgacaaaggcattggggctcttgggtctccgaaattcgacaccccatattgtaagtgccccttttgttttcactccaatgcacatttcacttatctatggactaaaaaatagaccaaatgttggtctagcaaaagaaattagtccatggcaaaccaatttatcaacctccgttaaataaaaaatgttcacatttagtgtgtgacagcatgtcaaaccaatgtttgaatctccgttaaaaaggtgtttacatatagtatctgacagtgtctcgaaacattattgattcaaactttcttctaatttgcaggaaaactaggatatggctaggaacttttgaaactgctgaggatgcagctagagcctatgatgaagcagcaaggctaatgtgtggcacaagagcaagaactaacttcccttacaaccccaatgcgtctcagtcatcatcttccaagcttctctcagcaactttaactgcaaaactgcataggtgctacatggcttctttgcaaatgacaaggccatcatcacaggcagagcctcagagagtggcttcaccaaatgtcatcacctcctccgcgagcaacttctccatgaagagtaacgaaactgagacattgttgttgccacaaaagagacaagaagaggagcaagaagcagaagggaattgggttttcaagaaggttaaggtggaaaatgctcagcagttcaagcctcttgaagaggaccacatcgagcaaatgatagaggagttgctgcattacgggtctattgagctatgctctgtgattccaccacaggctctttgaactcacattgagcaagcatttttattgttagttcacattcttactctgctaatttaatcaactaattctcttggacaatttcagtctctattattattaagtgctttaggtgctagactagactagactagaatagtactatcttctaagtgactcattggacaatgttgtatgtacagccagccaatcatgttgaaattgtgcatttgttctgttcac

SEQ ID NO: 8317 - protein, 140 aa, Glycine max
  peptide (1)..(140): Ceres Seq. ID no. 14312125
  misc_feature (1)..(118): NCBI GI NO: 131754 NR Description: PPLZ02 PROTEIN
  misc_feature (1)..(136): NCBI GI NO: 18650662 NR Description: ethylene response factor 1
  misc_feature (1)..(140): NCBI GI NO: 15238727 NR Description: ethylene responsive element binding protein
  misc_feature (1)..(70): NCBI GI NO: 38343976 NR Description: OSJNBb0022F16.15
  misc_feature (1)..(30): NCBI GI NO: 15218134 NR Description: ethylene responsive element binding factor 2
  misc_feature (1)..(30): NCBI GI NO: 21553845 NR Description: putative ethylene responsive element
  misc_feature (1)..(126): NCBI GI NO: 15239413 NR Description: AP2 domain transcription factor, putative
  misc_feature (1)..(126): NCBI GI NO: 15238976 NR Description: putative protein; protein id: At5g11190.1
  misc_feature (1)..(126): NCBI GI NO: 30689846 NR Description: AP2 domain transcription factor, putative
  misc_feature (1)..(60): NCBI GI NO: 12324244 NR Description: putative AP2 domain transcriptional regulator
MCGTRARTNFPYNPNASQSSSSKLLSATLTAKLHRCYMASLQMTRPSSQAEPQRVASPNVITSSASNFSMKSNETETLLLPQKRQEEEQEAEGNWVFKKVKVENAQQFKPLEEDHIEQMIEELLHYGSIELCSVIPPQAL

SEQ ID NO: 8318 - protein, 103 aa, Glycine max
  peptide (1)..(103): Ceres Seq. ID no. 14312126
  misc_feature (1)..(81): NCBI GI NO: 131754 NR Description: PPLZ02 PROTEIN
  misc_feature (1)..(99): NCBI GI NO: 18650662 NR Description: ethylene response factor 1
  misc_feature (1)..(103): NCBI GI NO: 15238727 NR Description: ethylene responsive element binding protein
  misc_feature (1)..(33): NCBI GI NO: 38343976 NR Description: OSJNBb0022F16.15
  misc_feature (1)..(89): NCBI GI NO: 15239413 NR Description: AP2 domain transcription factor, putative
  misc_feature (1)..(89): NCBI GI NO: 15238976 NR Description: putative protein; protein id: At5g11190.1
  misc_feature (1)..(89): NCBI GI NO: 30689846 NR Description: AP2 domain transcription factor, putative
  misc_feature (1)..(23): NCBI GI NO: 12324244 NR Description: putative AP2 domain transcriptional regulator
  misc_feature (1)..(56): NCBI GI NO: 15236319 NR Description: AP2 domain transcription factor RAP2, putative
  misc_feature (1)..(48): NCBI GI NO: 8571476 NR Description: apetala2 domain-containing protein
MASLQMTRPSSQAEPQRVASPNVITSSASNFSMKSNETETLLLPQKRQEEEQEAEGNWVFKKVKVENAQQFKPLEEDHIEQMIEELLHYGSIELCSVIPPQAL

SEQ ID NO: 8319 - protein, 98 aa, Glycine max
  peptide (1)..(98): Ceres Seq. ID no. 14312127
  misc_feature (1)..(76): NCBI GI NO: 131754 NR Description: PPLZ02 PROTEIN
  misc_feature (1)..(94): NCBI GI NO: 18650662 NR Description: ethylene response factor 1
  misc_feature (1)..(98): NCBI GI NO: 15238727 NR Description: ethylene responsive element binding protein
  misc_feature (1)..(28): NCBI GI NO: 38343976 NR Description: OSJNBb0022F16.15
  misc_feature (1)..(84): NCBI GI NO: 15239413 NR Description: AP2 domain transcription factor, putative
  misc_feature (1)..(84): NCBI GI NO: 15238976 NR Description: putative protein; protein id: At5g11190.1
  misc_feature (1)..(84): NCBI GI NO: 30689846 NR Description: AP2 domain transcription factor, putative
  misc_feature (1)..(18): NCBI GI NO: 12324244 NR Description: putative AP2 domain transcriptional regulator
  misc_feature (1)..(51): NCBI GI NO: 15236319 NR Description: AP2 domain transcription factor RAP2, putative
  misc_feature (1)..(43): NCBI GI NO: 8571476 NR Description: apetala2 domain-containing protein
MTRPSSQAEPQRVASPNVITSSASNFSMKSNETETLLLPQKRQEEEQEAEGNWVFKKVKVENAQQFKPLEEDHIEQMIEELLHYGSIELCSVIPPQAL

SEQ ID NO: 8320 - DNA, 1375 bp, Glycine max
  misc_feature (1)..(1375): Ceres Seq. ID no. 13514389
acctagaacatcctaatcgaaaataaacacccacatgacatggaaaagacgctaacgccacccgtcttcgagcattaaaacccgcgaaacttccaagcagggttacacgccgcattgctctcagcttcacaacaccatggaccacgttagggaaacctctgcttgggtagctagccgctcctcccacgttctcgttgactctgcaggaattgagaaagtggtgagcaccattgattccattcccaaggttgagtgggatttcgaagggattcactactttgataatggaccactcaccgttcagtacctgtttgtgttggacgctttaaatttttgcttctggcctgataaggatttgaattatgatgatttggcatctgggctaaaggcagctcttcaaaatgataaatctgcatttgatgctgatcgtctgcaaaagtacactggtccacaactgcgtgagcttttgaggtggcctagaccccttcctctggaagatgaacgagttaggttactacatgaggttgggattgaattagaaagaaactttgagggtaaagcatccaatcttgtggagtgctgtggaaaatcagccatgaatcttgttgctcttgttgcacgccattttcctggttttagagaccatacagtgtacaaaggacgccaggtatttttatataaaagggctcagatatttgcagcagatttgtttggtgcatttaggggccaaggatatggtgagttcaaagacattggctctctaactataatggcagactatattgtcccagctgtgcttcgacagcttggtgttttaaaatatagtccaacacttgccagtactattgaggccagtggagaaataggtccagggactgaagaggaagttgaactgcgtgcttgctctgtacatgcagtggagaaaatgagggagctaataagtgtaaagtcaggaagacaggtgctcagtgtggagctggatctttggctctgggcttctggtgttcagtccacatctctgcagcaccaccgtacactttcaatatattactgagcacatgatatatggtaacttctagctatcaacaatttagttgttgaacaagaaaattttggctgttttaaggtaattatttaggataatgtgtgaataactacctccttttgcactaaagttttggaatcagcttttgtaattttggaaaagtgatacttaaccagatgctttcaaacttaattttgaatagccatggtattcggattttaggaccttaaatagtttacagggtgaacaattaggctcatggttgttttacaatgggaggttgttaatatttactttgtcaaatataactgttggtatagccgaggttgt

SEQ ID NO: 8321 - protein, 305 aa, Glycine max
  peptide (1)..(305): Ceres Seq. ID no. 13514390
  misc_feature (1)..(305): NCBI GI NO: 28564818 NR Description: OSJNBb0005G07.5
  misc_feature (117)..(286): NCBI GI NO: 19114965 NR Description: conserved hypothetical protein
  misc_feature (1)..(74): NCBI GI NO: 19114965 NR Description: conserved hypothetical protein
  misc_feature (57)..(305): NCBI GI NO: 38074709 NR Description: RIKEN cDNA 2210016F16 [Mus musculus]
  misc_feature (57)..(305): NCBI GI NO: 24656903 NR Description: CG9752-PA [Drosophila melanogaster]
  misc_feature (55)..(304): NCBI GI NO: 39584221 NR Description: Hypothetical protein CBG05511
  misc_feature (117)..(302): NCBI GI NO: 40745001 NR Description: hypothetical protein AN2451.2
  misc_feature (55)..(305): NCBI GI NO: 25145501 NR Description: Putative cytoplasmic protein of eukaryotic origin
  misc_feature (55)..(305): NCBI GI NO: 7495851 NR Description: hypothetical protein C11D2
  misc_feature (157)..(305): NCBI GI NO: 34873598 NR Description: similar to CG9752-PA [Rattus norvegicus]
MDHVRETSAWVASRSSHVLVDSAGIEKVVSTIDSIPKVEWDFEGIHYFDNGPLTVQYLFVLDALNFCFWPDKDLNYDDLASGLKAALQNDKSAFDADRLQKYTGPQLRELLRWPRPLPLEDERVRLLHEVGIELERNFEGKASNLVECCGKSAMNLVALVARHFPGFRDHTVYKGRQVFLYKRAQIFAADLFGAFRGQGYGEFKDIGSLTIMADYIVPAVLRQLGVLKYSPTLASTIEASGEIGPGTEEEVELRACSVHAVEKMRELISVKSGRQVLSVELDLWLWASGVQSTSLQHHRTLSIYY

SEQ ID NO: 8322 - protein, 152 aa, Glycine max
  peptide (1)..(152): Ceres Seq. ID no. 13514391
  misc_feature (1)..(152): NCBI GI NO: 28564818 NR Description: OSJNBb0005G07.5
  misc_feature (1)..(133): NCBI GI NO: 19114965 NR Description: conserved hypothetical protein
  misc_feature (1)..(152): NCBI GI NO: 38074709 NR Description: RIKEN cDNA 2210016F16 [Mus musculus]
  misc_feature (1)..(152): NCBI GI NO: 24656903 NR Description: CG9752-PA [Drosophila melanogaster]
  misc_feature (1)..(151): NCBI GI NO: 39584221 NR Description: Hypothetical protein CBG05511
  misc_feature (1)..(149): NCBI GI NO: 40745001 NR Description: hypothetical protein AN2451.2
  misc_feature (1)..(152): NCBI GI NO: 25145501 NR Description: Putative cytoplasmic protein of eukaryotic origin
  misc_feature (1)..(152): NCBI GI NO: 7495851 NR Description: hypothetical protein C11D2
  misc_feature (4)..(152): NCBI GI NO: 34873598 NR Description: similar to CG9752-PA [Rattus norvegicus]
  misc_feature (1)..(136): NCBI GI NO: 28829315 NR Description: hypothetical protein [Dictyostelium discoideum]
MNLVALVARHFPGFRDHTVYKGRQVFLYKRAQIFAADLFGAFRGQGYGEFKDIGSLTIMADYIVPAVLRQLGVLKYSPTLASTIEASGEIGPGTEEEVELRACSVHAVEKMRELISVKSGRQVLSVELDLWLWASGVQSTSLQHHRTLSIYY

SEQ ID NO: 8323 - DNA, 1112 bp, Glycine max
  misc_feature (1)..(1112): Ceres Seq. ID no. 14316455
aacaacaccgataggaggaattggagaagaaacaggaacagaaaggtttgggaaggaagcagaaatcgggggtggtgtgagagacaagcatggcgacgtgtcttcgccttgggagatttacgactattgattcgctctctctcttcgtttccaccgctagattctccttttcttcatcatcttcgtcgtcgtcctcgtcgtcatcttccggtaagtccaagacggggaagaagctgatggatcgtctttccaccgttatcgacgccgtcaatgatcgcaaactacctcctgagctacgtggccagcgcagcaatgtcaggtcagaaactgacattatcaacgttgttgagcaaagaatatggcataccatggaagaagggaagtttgagaatttgccaggcaaaggcaagccgcttaagctcgacacaaatcctcatgcagatccagctgaagacaccctgtaccgtatcctgtcaaaaaacggatatgcaccggagtgggttgaacttaacaaagagattagatctaaaatatctgaatggaggaagtccttgaagaaagcttgggctactaagtgcagtggagatcactctgagtgggttgaaagttcagaggctttgaaatctcagttacgagaaatcaatgataaggttttccgttataaccttattgtgccttttggtcggcaaatgtttggccttaagtgggagaaagagctaggttacttagaagaaaaatgagaatcattgttgttaaatttgagccagttggttcactatagtagaagattaaaatttgttattttcctgagaaaagtcatgccaggcgactaatcaactaggaactagcttaagttattcagttcaactattgttgattacttttaatttcttagcattatgttactggttatgattcctctttcaggcttattagtatggctatatttatatggttcataacctccgatcatgtacatcccaaggatacaatacaagtaaagatagtgaaaatgtatgtgactcaacaatattagttgtcctgacgattgtattatcagtttttgctttgagacaaattgtagacttcagttttctctttcagtaaaaaat

SEQ ID NO: 8324 - protein, 216 aa, Glycine max
  peptide (1)..(216): Ceres Seq. ID no. 14316456
  misc_feature (1)..(215): NCBI GI NO: 18414270 NR Description: expressed protein [Arabidopsis thaliana]
  misc_feature (77)..(215): NCBI GI NO: 11357378 NR Description: hypothetical protein F12E4
  misc_feature (1)..(84): NCBI GI NO: 11357378 NR Description: hypothetical protein F12E4
  misc_feature (82)..(215): NCBI GI NO: 20149746 NR Description: open reading frame 28 [Mus musculus]
  misc_feature (82)..(215): NCBI GI NO: 26349033 NR Description: unnamed protein product [Mus musculus]
  misc_feature (82)..(216): NCBI GI NO: 40254908 NR Description: chromosome 21 open reading frame 55 [Homo sapiens]
  misc_feature (104)..(215): NCBI GI NO: 13542805 NR Description: ORF28 protein [Mus musculus]
  misc_feature (76)..(208): NCBI GI NO: 24582398 NR Description: CG13776-PA [Drosophila melanogaster]
  misc_feature (82)..(196): NCBI GI NO: 7020577 NR Description: unnamed protein product [Homo sapiens]
  misc_feature (72)..(208): NCBI GI NO: 31233474 NR Description: ENSANGP00000015813 [Anopheles gambiae]
MATCLRLGRFTTIDSLSLFVSTARFSFSSSSSSSSSSSSSGKSKTGKKLMDRLSTVIDAVNDRKLPPELRGQRSNVRSETDIINVVEQRIWHTMEEGKFENLPGKGKPLKLDTNPHADPAEDTLYRILSKNGYAPEWVELNKEIRSKISEWRKSLKKAWATKCSGDHSEWVESSEALKSQLREINDKVFRYNLIVPFGRQMFGLKWEKELGYLEEK

SEQ ID NO: 8325 - protein, 167 aa, Glycine max
  peptide (1)..(167): Ceres Seq. ID no. 14316457
  misc_feature (1)..(166): NCBI GI NO: 18414270 NR Description: expressed protein [Arabidopsis thaliana]
  misc_feature (28)..(166): NCBI GI NO: 11357378 NR Description: hypothetical protein F12E4
  misc_feature (1)..(35): NCBI GI NO: 11357378 NR Description: hypothetical protein F12E4
  misc_feature (33)..(166): NCBI GI NO: 20149746 NR Description: open reading frame 28 [Mus musculus]
  misc_feature (33)..(166): NCBI GI NO: 26349033 NR Description: unnamed protein product [Mus musculus]
  misc_feature (33)..(167): NCBI GI NO: 40254908 NR Description: chromosome 21 open reading frame 55 [Homo sapiens]
  misc_feature (55)..(166): NCBI GI NO: 13542805 NR Description: ORF28 protein [Mus musculus]
  misc_feature (27)..(159): NCBI GI NO: 24582398 NR Description: CG13776-PA [Drosophila melanogaster]
  misc_feature (33)..(147): NCBI GI NO: 7020577 NR Description: unnamed protein product [Homo sapiens]
  misc_feature (23)..(159): NCBI GI NO: 31233474 NR Description: ENSANGP00000015813 [Anopheles gambiae]
MDRLSTVIDAVNDRKLPPELRGQRSNVRSETDIINVVEQRIWHTMEEGKFENLPGKGKPLKLDTNPHADPAEDTLYRILSKNGYAPEWVELNKEIRSKISEWRKSLKKAWATKCSGDHSEWVESSEALKSQLREINDKVFRYNLIVPFGRQMFGLKWEKELGYLEEK

SEQ ID NO: 8326 - protein, 123 aa, Glycine max
  peptide (1)..(123): Ceres Seq. ID no. 14316458
  misc_feature (1)..(122): NCBI GI NO: 18414270 NR Description: expressed protein [Arabidopsis thaliana]
  misc_feature (1)..(122): NCBI GI NO: 11357378 NR Description: hypothetical protein F12E4
  misc_feature (1)..(122): NCBI GI NO: 20149746 NR Description: open reading frame 28 [Mus musculus]
  misc_feature (1)..(122): NCBI GI NO: 26349033 NR Description: unnamed protein product [Mus musculus]
  misc_feature (1)..(123): NCBI GI NO: 40254908 NR Description: chromosome 21 open reading frame 55 [Homo sapiens]
  misc_feature (11)..(122): NCBI GI NO: 13542805 NR Description: ORF28 protein [Mus musculus]
  misc_feature (1)..(115): NCBI GI NO: 24582398 NR Description: CG13776-PA [Drosophila melanogaster]
  misc_feature (1)..(103): NCBI GI NO: 7020577 NR Description: unnamed protein product [Homo sapiens]
  misc_feature (1)..(115): NCBI GI NO: 31233474 NR Description: ENSANGP00000015813 [Anopheles gambiae]
  misc_feature (1)..(103): NCBI GI NO: 20810277 NR Description: Unknown (protein for MGC:33722) [Homo sapiens]
MEEGKFENLPGKGKPLKLDTNPHADPAEDTLYRILSKNGYAPEWVELNKEIRSKISEWRKSLKKAWATKCSGDHSEWVESSEALKSQLREINDKVFRYNLIVPFGRQMFGLKWEKELGYLEEK

SEQ ID NO: 8327 - DNA, 1430 bp, Glycine max
  misc_feature (1)..(1430): Ceres Seq. ID no. 14314343
agttcaactaagtacgctgtttttttattttccccacaaaaccatatagccatcggtcgtagatcccacgaaccccatcatcacaccactctctgcagttttcgcaaccaaaccttcttttttgtttttattcctctgcttattggattcaacgaagttgttgtgattaaggagaacataactttttgaatcacacagagagagagagagaagagacccagtactttctgcatccaaaccaatcactactgcggataactggtaagttcataaaggggagattcttcagtgatcatctatctgatttggtccagctaaggaatcattcagaagccaagttgattaagtactagagagatcatattttggattagtaaaagttaatcataagcatgggatctttcaagggtcatgctttgccagggactttgtttcttctagttggggtgtggcacgtatggggctctgtggtgagatatgttcgcaatccaatggcgtttcaagtcagagtttggaatcctgtgccagggtttgatgggaggctgaagcacctggagctatatgttattgcaattggtgctttcgttgacatgtgcatcgagcttttgtattcaccacacctcaagatttttgttggtggagtccttaaccccgctcacatgaatgactttgagcactctggaatgcttcttatgtttttcatctttggtgttgttgccctactttcccaaaagaccagatttcttcccttgccagaaggtgctctttgtttgcttgctgcctcagcattcactgcagagtaccttcttttctacttccattcaacaacacacaagggccttgagggctattaccacaccctccttgtcttcctggttggactgtgcattttatcttcaattgctggagcccttttgccaacaagctttccagtggatttatgcaatggcattgctatagcactgcaaggtttatggttctatcagacagcctttgttctctatggccctatgatgccaagtggttgtaagcttagggaaaacagtgtcacatgtcattctattgatagtgaggttcggggcgaattgcttgctaattttcagctctttgttgcggttcttgtggtccttgtgggaactgtggcatcatatggctttgctgcttcaagatatgggagttctgaagtcaggaacttgcatgcaattcagactgaattagatcaagactaaagttgcgttgctattttttctggtggtagttgaaatgtgttggcagcatagagtttcttatagaacatgtttgttgtatattgaagtgcaaaggatcatgcatgcatgatcactgaaaattgaaaattaacaccccctcctccctcaaaaaggaattatacatttttgacttttaggaatcggatgtcaaaggagcaacag

SEQ ID NO: 8328 - protein, 278 aa, Glycine max
  peptide (1)..(278): Ceres Seq. ID no. 14314344
  misc_feature (113)..(263): Pfam Name: DUF716 Pfam Description: Family of unknown function
  misc_feature (1)..(263): NCBI GI NO: 15222573 NR Description: expressed protein [Arabidopsis thaliana]
  misc_feature (1)..(269): NCBI GI NO: 32470632 NR Description: putative plant viral-response family protein
  misc_feature (1)..(270): NCBI GI NO: 4680504 NR Description: hypothetical protein [Oryza sativa]
  misc_feature (1)..(270): NCBI GI NO: 4680337 NR Description: hypothetical protein [Oryza sativa subsp. indica]
  misc_feature (1)..(269): NCBI GI NO: 22208473 NR Description: hypothetical protein [Sorghum bicolor]
  misc_feature (6)..(270): NCBI GI NO: 4680346 NR Description: hypothetical protein [Oryza sativa subsp. indica]
  misc_feature (1)..(276): NCBI GI NO: 4416307 NR Description: hypothetical protein [Zea mays]
  misc_feature (1)..(277): NCBI GI NO: 30695897 NR Description: expressed protein [Arabidopsis thaliana]
  misc_feature (1)..(247): NCBI GI NO: 15222675 NR Description: hypothetical protein [Arabidopsis thaliana]
  misc_feature (1)..(251): NCBI GI NO: 21618061 NR Description: unknown [Arabidopsis thaliana]
MGSFKGHALPGTLFLLVGVWHVWGSVVRYVRNPMAFQVRVWNPVPGFDGRLKHLELYVIAIGAFVDMCIELLYSPHLKIFVGGVLNPAHMNDFEHSGMLLMFFIFGVVALLSQKTRFLPLPEGALCLLAASAFTAEYLLFYFHSTTHKGLEGYYHTLLVFLVGLCILSSIAGALLPTSFPVDLCNGIAIALQGLWFYQTAFVLYGPMMPSGCKLRENSVTCHSIDSEVRGELLANFQLFVAVLVVLVGTVASYGFAASRYGSSEVRNLHAIQTELDQD

SEQ ID NO: 8329 - protein, 245 aa, Glycine max
  peptide (1)..(245): Ceres Seq. ID no. 14314345
  misc_feature (80)..(230): Pfam Name: DUF716 Pfam Description: Family of unknown function
  misc_feature (1)..(230): NCBI GI NO: 15222573 NR Description: expressed protein [Arabidopsis thaliana]
  misc_feature (1)..(236): NCBI GI NO: 32470632 NR Description: putative plant viral-response family protein
  misc_feature (1)..(237): NCBI GI NO: 4680504 NR Description: hypothetical protein [Oryza sativa]
  misc_feature (1)..(237): NCBI GI NO: 4680337 NR Description: hypothetical protein [Oryza sativa subsp. indica]
  misc_feature (1)..(236): NCBI GI NO: 22208473 NR Description: hypothetical protein [Sorghum bicolor]
  misc_feature (1)..(237): NCBI GI NO: 4680346 NR Description: hypothetical protein [Oryza sativa subsp. indica]
  misc_feature (1)..(243): NCBI GI NO: 4416307 NR Description: hypothetical protein [Zea mays]
  misc_feature (1)..(244): NCBI GI NO: 30695897 NR Description: expressed protein [Arabidopsis thaliana]
  misc_feature (1)..(214): NCBI GI NO: 15222675 NR Description: hypothetical protein [Arabidopsis thaliana]
  misc_feature (1)..(218): NCBI GI NO: 21618061 NR Description: unknown [Arabidopsis thaliana]
MAFQVRVWNPVPGFDGRLKHLELYVIAIGAFVDMCIELLYSPHLKIFVGGVLNPAHMNDFEHSGMLLMFFIFGVVALLSQKTRFLPLPEGALCLLAASAFTAEYLLFYFHSTTHKGLEGYYHTLLVFLVGLCILSSIAGALLPTSFPVDLCNGIAIALQGLWFYQTAFVLYGPMMPSGCKLRENSVTCHSIDSEVRGELLANFQLFVAVLVVLVGTVASYGFAASRYGSSEVRNLHAIQTELDQD

SEQ ID NO: 8330 - protein, 212 aa, Glycine max
  peptide (1)..(212): Ceres Seq. ID no. 14314346
  misc_feature (47)..(197): Pfam Name: DUF716 Pfam Description: Family of unknown function
  misc_feature (1)..(197): NCBI GI NO: 15222573 NR Description: expressed protein [Arabidopsis thaliana]
  misc_feature (1)..(203): NCBI GI NO: 32470632 NR Description: putative plant viral-response family protein
  misc_feature (1)..(204): NCBI GI NO: 4680504 NR Description: hypothetical protein [Oryza sativa]
  misc_feature (1)..(204): NCBI GI NO: 4680337 NR Description: hypothetical protein [Oryza sativa subsp. indica]
  misc_feature (1)..(203): NCBI GI NO: 22208473 NR Description: hypothetical protein [Sorghum bicolor]
  misc_feature (1)..(204): NCBI GI NO: 4680346 NR Description: hypothetical protein [Oryza sativa subsp. indica]
  misc_feature (1)..(210): NCBI GI NO: 4416307 NR Description: hypothetical protein [Zea mays]
  misc_feature (1)..(211): NCBI GI NO: 30695897 NR Description: expressed protein [Arabidopsis thaliana]
  misc_feature (1)..(181): NCBI GI NO: 15222675 NR Description: hypothetical protein [Arabidopsis thaliana]
  misc_feature (1)..(185): NCBI GI NO: 21618061 NR Description: unknown [Arabidopsis thaliana]
MCIELLYSPHLKIFVGGVLNPAHMNDFEHSGMLLMFFIFGVVALLSQKTRFLPLPEGALCLLAASAFTAEYLLFYFHSTTHKGLEGYYHTLLVFLVGLCILSSIAGALLPTSFPVDLCNGIAIALQGLWFYQTAFVLYGPMMPSGCKLRENSVTCHSIDSEVRGELLANFQLFVAVLVVLVGTVASYGFAASRYGSSEVRNLHAIQTELDQD

SEQ ID NO: 8331 - DNA, 1274 bp, Glycine max
  misc_feature (1)..(1274): Ceres Seq. ID no. 14314335
tccttttcctcttatttccctccctttgcttcaacaaaaagtatcttcttgtcatttgtcatgtttgctgcatgttttgcaagttctcatcttttttctcccttttcacactctcctgtgttggatgtctgaaaaaaatgtttactttgtagagggtttcttggttgaattttaagttccttagctttcaaagaaagaaacttggaatgtttgaactttgaacctcattttccagtgaatgtttctcacataatattcagaacttttcctcaaattaaaagtgacttattgttgtttttggactttgttctagcaatagtttgttcagggttaccatgaaagtttctagctttcattcatttggcttaaaatttttgttttgtttgtggtttgcagggggtcacattaacccagcggtgacatttgggctgtttttggctcgcaaggtgtctttgatccgagccatcatgtacatggtggctcagtgcttaggtgctatctgtggagttggtttggttaaggctttccaaaagtcttacttcaacaagtatggtggtggggctaattccctcgctgctgggtacagcacaggtactggattgggtgctgagattattggaacctttgttttggtctacactgtcttctctgccactgaccccaagaggaatgccagagattcccatgtgccggttttggctccacttcccattggatttgctgtgttcatggttcacttggccaccatcccagtcactggtactggtatcaaccctgctaggagtcttggagctgctgttatctacaaccaagataagccatgggatgaccattggatcttttgggtaggaccatttattggggcagccattgcagccttctaccatcagttcatcttaagagcaggtgcagctaaggctcttggatcattcaggagtaacccccataattgagttgtctttctcttccttatgatggctctagtggaaagaagataattggagagatgggggttgatatggcaagtttaataataattgggaatgcttttggcttgtgttttgcaacgtttctttgaccctctcgattatgtcttcaagattgtggataagtgtagattaaagtctctttcatgacagggggagccttttgcactttcctctgtggtgttcttccctttagtgtgtcatttttttcttttaagttattctcttcagctgtcatctctgtactcaaaatatatttatggaaaatgttaaattttaattttaatt

SEQ ID NO: 8332 - protein, 205 aa, Glycine max
  peptide (1)..(205): Ceres Seq. ID no. 14314336
  misc_feature (14)..(184): Pfam Name: Pfam Description:  Major intrinsic protein
  misc_feature (10)..(203): NCBI GI NO: 3158476 NR Description: aquaporin 2 [Samanea saman]
  misc_feature (14)..(202): NCBI GI NO: 13447801 NR Description: plasma membrane integral protein ZmPIP2-1
  misc_feature (14)..(202): NCBI GI NO: 29650727 NR Description: aquaporin [Zea mays]
  misc_feature (14)..(202): NCBI GI NO: 13447803 NR Description: plasma membrane integral protein ZmPIP2-2
  misc_feature (10)..(203): NCBI GI NO: 7441251 NR Description: plasma membrane intrinsic protein 1 - soybean
  misc_feature (8)..(203): NCBI GI NO: 8071620 NR Description: putative aquaporin PIP2-1
  misc_feature (14)..(202): NCBI GI NO: 13486938 NR Description: plasma membrane intrinsic protein 2-1
  misc_feature (10)..(201): NCBI GI NO: 15228095 NR Description: plasma membrane intrinsic protein 2B, putative
  misc_feature (10)..(201): NCBI GI NO: 21554356 NR Description: aquaporin (plasma membrane intrinsic protein 2B)
  misc_feature (10)..(201): NCBI GI NO: 7209560 NR Description: Plasma membrane aquaporin 2b [Raphanus sativus]
MKVSSFHSFGLKFLFCLWFAGGHINPAVTFGLFLARKVSLIRAIMYMVAQCLGAICGVGLVKAFQKSYFNKYGGGANSLAAGYSTGTGLGAEIIGTFVLVYTVFSATDPKRNARDSHVPVLAPLPIGFAVFMVHLATIPVTGTGINPARSLGAAVIYNQDKPWDDHWIFWVGPFIGAAIAAFYHQFILRAGAAKALGSFRSNPHN

SEQ ID NO: 8333 - protein, 161 aa, Glycine max
  peptide (1)..(161): Ceres Seq. ID no. 14314337
  misc_feature (1)..(140): Pfam Name: Pfam Description:  Major intrinsic protein
  misc_feature (1)..(159): NCBI GI NO: 3158476 NR Description: aquaporin 2 [Samanea saman]
  misc_feature (1)..(158): NCBI GI NO: 13447801 NR Description: plasma membrane integral protein ZmPIP2-1
  misc_feature (1)..(158): NCBI GI NO: 29650727 NR Description: aquaporin [Zea mays]
  misc_feature (1)..(158): NCBI GI NO: 13447803 NR Description: plasma membrane integral protein ZmPIP2-2
  misc_feature (1)..(159): NCBI GI NO: 7441251 NR Description: plasma membrane intrinsic protein 1 - soybean
  misc_feature (1)..(159): NCBI GI NO: 8071620 NR Description: putative aquaporin PIP2-1
  misc_feature (1)..(158): NCBI GI NO: 13486938 NR Description: plasma membrane intrinsic protein 2-1
  misc_feature (1)..(157): NCBI GI NO: 15228095 NR Description: plasma membrane intrinsic protein 2B, putative
  misc_feature (1)..(157): NCBI GI NO: 21554356 NR Description: aquaporin (plasma membrane intrinsic protein 2B)
  misc_feature (1)..(157): NCBI GI NO: 7209560 NR Description: Plasma membrane aquaporin 2b [Raphanus sativus]
MYMVAQCLGAICGVGLVKAFQKSYFNKYGGGANSLAAGYSTGTGLGAEIIGTFVLVYTVFSATDPKRNARDSHVPVLAPLPIGFAVFMVHLATIPVTGTGINPARSLGAAVIYNQDKPWDDHWIFWVGPFIGAAIAAFYHQFILRAGAAKALGSFRSNPHN

SEQ ID NO: 8334 - protein, 159 aa, Glycine max
  peptide (1)..(159): Ceres Seq. ID no. 14314338
  misc_feature (1)..(138): Pfam Name: Pfam Description:  Major intrinsic protein
  misc_feature (1)..(157): NCBI GI NO: 3158476 NR Description: aquaporin 2 [Samanea saman]
  misc_feature (1)..(156): NCBI GI NO: 13447801 NR Description: plasma membrane integral protein ZmPIP2-1
  misc_feature (1)..(156): NCBI GI NO: 29650727 NR Description: aquaporin [Zea mays]
  misc_feature (1)..(156): NCBI GI NO: 13447803 NR Description: plasma membrane integral protein ZmPIP2-2
  misc_feature (1)..(157): NCBI GI NO: 7441251 NR Description: plasma membrane intrinsic protein 1 - soybean
  misc_feature (1)..(157): NCBI GI NO: 8071620 NR Description: putative aquaporin PIP2-1
  misc_feature (1)..(156): NCBI GI NO: 13486938 NR Description: plasma membrane intrinsic protein 2-1
  misc_feature (1)..(155): NCBI GI NO: 15228095 NR Description: plasma membrane intrinsic protein 2B, putative
  misc_feature (1)..(155): NCBI GI NO: 21554356 NR Description: aquaporin (plasma membrane intrinsic protein 2B)
  misc_feature (1)..(155): NCBI GI NO: 7209560 NR Description: Plasma membrane aquaporin 2b [Raphanus sativus]
MVAQCLGAICGVGLVKAFQKSYFNKYGGGANSLAAGYSTGTGLGAEIIGTFVLVYTVFSATDPKRNARDSHVPVLAPLPIGFAVFMVHLATIPVTGTGINPARSLGAAVIYNQDKPWDDHWIFWVGPFIGAAIAAFYHQFILRAGAAKALGSFRSNPHN

SEQ ID NO: 8335 - DNA, 1322 bp, Glycine max
  misc_feature (1)..(1322): Ceres Seq. ID no. 15171813
ctttttaaagttgtctttccaaatttatccttctaccttctccgaagctccaccgtcttcgatcacaacgactccaagtcccgccctccctcctccaccatcctttttatttgttctggctaggttatgcgctatgcaacacagtgccatggaagcctccaaattcagtaacagtgatcaaaacgttcgatgccatcactgcgcaggacccctttccaaagacatggaaaccagtcactggaccgtttcgcctctcattagggatagcttctccatgattggttctgccgttggcggcgtggcaagtgcattttatggattcaatcttgttatgccaattgtccaaagaaggatcaaaggacccatgtggttgcattttctcattggtgcaccacctgtgatagtattgtcttcagcctgtgcaggcctggcaggtggggctgttcctgctgcagcacaacttgtttcctcttcttatcatgcagcctactcatctcctatctcacctccgccatcaaaggatgaaaatattcaaaggtcaagaaaatgatataatggacttgtgtctgaccatgcattcatgatgggtgtgctgagagttttgtttttcttgtgtaaatactgctcttgagattggtatgtttggaacttgaatgagaggaaagatagtagaaaagagaaaaaacacgtataatgatgtattttattttgtttttttttttttttttttcttgaaggttgaggccaaaaacgctttggaaaactatgcatacaacatgaggaacaccgtgaaggatgacaagattggtgagaaacttgacccggctgacaagaagaagattgaggatgcaattgagcaagcaatccagtggttagacagcaaccagcttgcagaagcagatgagtttgaggacaaaatgaaggaattggaaagcatctgcaatccaatcattgccaagatgtaccaaggtggtgctggtccagacgtgggtggtgctggtgcagcagaggatgagtatgctgctcctccttctggtggaagtggtgctggccccaagattgaggaagtggactaaatgtagttgctttcctccagatacctgttttaaaaacttattttactttatgcttttttaattggattttaatcgcatgatttttgttggatgggattcaaactatttttcccttctgatatgaacgttgctttaagcattatgttatttgcgttattttcattattagatggtatactcaattgttatgcactttacctgtaggaattattctgtcttgttaaatgacatatcttgtctttagtc

SEQ ID NO: 8336 - protein, 182 aa, Glycine max
  peptide (1)..(182): Ceres Seq. ID no. 15171814
  misc_feature (49)..(175): NCBI GI NO: 34903072 NR Description: unnamed protein product
  misc_feature (56)..(180): NCBI GI NO: 15238771 NR Description: expressed protein [Arabidopsis thaliana]
FLKLSFQIYPSTFSEAPPSSITTTPSPALPPPPSFLFVLARLCAMQHSAMEASKFSNSDQNVRCHHCAGPLSKDMETSHWTVSPLIRDSFSMIGSAVGGVASAFYGFNLVMPIVQRRIKGPMWLHFLIGAPPVIVLSSACAGLAGGAVPAAAQLVSSSYHAAYSSPISPPPSKDENIQRSRK

SEQ ID NO: 8337 - protein, 140 aa, Glycine max
  peptide (1)..(140): Ceres Seq. ID no. 15171815
  misc_feature (28)..(105): Pfam Name: Pfam Description:  Hsp70 protein
  misc_feature (28)..(140): NCBI GI NO: 6911551 NR Description: heat shock protein 70 [Cucumis sativus]
  misc_feature (28)..(140): NCBI GI NO: 6969976 NR Description: high molecular weight heat shock protein
  misc_feature (28)..(140): NCBI GI NO: 26985221 NR Description: non-cell-autonomous heat shock cognate protein 70
  misc_feature (28)..(140): NCBI GI NO: 629641 NR Description: dnaK-type molecular chaperone HSC71.0 - garden pea
  misc_feature (28)..(140): NCBI GI NO: 26985223 NR Description: cell-autonomous heat shock cognate protein 70
  misc_feature (28)..(140): NCBI GI NO: 15241847 NR Description: heat shock protein hsc70-2 (hsc70.2) (hsp70-2)
  misc_feature (28)..(140): NCBI GI NO: 3962377 NR Description: heat shock protein 70 [Arabidopsis thaliana]
  misc_feature (28)..(140): NCBI GI NO: 15230534 NR Description: heat shock protein hsp70 [Arabidopsis thaliana]
  misc_feature (28)..(140): NCBI GI NO: 6911553 NR Description: heat shock protein 70 [Cucumis sativus]
  misc_feature (28)..(140): NCBI GI NO: 21327033 NR Description: heat shock protein 70 [Saussurea medusa]
MRGKIVEKRKNTYNDVFYFVFFFFFFLKVEAKNALENYAYNMRNTVKDDKIGEKLDPADKKKIEDAIEQAIQWLDSNQLAEADEFEDKMKELESICNPIIAKMYQGGAGPDVGGAGAAEDEYAAPPSGGSGAGPKIEEVD

SEQ ID NO: 8338 - protein, 138 aa, Glycine max
  peptide (1)..(138): Ceres Seq. ID no. 15171816
  misc_feature (5)..(131): NCBI GI NO: 34903072 NR Description: unnamed protein product
  misc_feature (12)..(136): NCBI GI NO: 15238771 NR Description: expressed protein [Arabidopsis thaliana]
MQHSAMEASKFSNSDQNVRCHHCAGPLSKDMETSHWTVSPLIRDSFSMIGSAVGGVASAFYGFNLVMPIVQRRIKGPMWLHFLIGAPPVIVLSSACAGLAGGAVPAAAQLVSSSYHAAYSSPISPPPSKDENIQRSRK

SEQ ID NO: 8339 - DNA, 1326 bp, Glycine max
  misc_feature (1)..(1326): Ceres Seq. ID no. 14304148
attatacatgcacagctagagttaagagaggagatgggagaaatagaaagagaggagatgtcgtcgacaaggtgggagaaggaggaggaagaagaagaagaagaggcccaaatggatatctggaagtacatatttgggtttgtggaactggcagtgataaaatgtgcgattgagcttggcatagctgaagccatagagaagcatggaagtcccatgacactatcggagatatcatcaagtttagggtgtgatacttcacatctgaagcgcatcatgaggttcctggtgcaaagaaagatattcaaaggcgacgggtgcagcaggggctattctcaatcagctctgtctcgtcgattgatgagaaacggcgaacacagcatggctagttttctcttgctggagagtagtcctgtaatgctggcaccttggcacagtctgagtgctcgcgtcatggccaatggcaacccctcatttgcaaaggctcacggtgaagacgtgtggcgctatgctgccgcaaatctcgatcacagcaacctcatcaacgaagcaatggcatgtgatgctaagcttgttatgcctatcatcattcaaagttgcagcgaggcatttcatggcctcaagtccttggtggatgtcggtgggggcaacggcaccgccatgcgcatcctggctaaggcttgcccttccattcgacccatcaattttgatcttcctcatgtcattgccctctgcgatggcgatggcgatggcgtccaacacgtgtcaggcgacatgtttctaagtgttcctaaagctgatgctgcttttcttatgtgggttttgcacgattggtcagacgaagagtgcatccaaatcttaaagaagtgtagggaagccatatcaaattcaaaggaaaacggaagggttattattgtggaggcggtgattgaaggagaaggagaaggagaaggagggaagcatgacggattgaaggatgtgggattgatgctggacatggtaatgatggcgcacactaacttcggcaaagagcgcacactcaaagagtgggaatatgtcatcaaaatggcaggatttagctcatacactgtcaaacccattcatgctgtgcagtccgtcattatggctttctactaaaatatatccaccaaaaattacccttgcaagtttgccactaaaatgcattaaataatttaataaaaaataaaacatattgtgtgatccatcttgcacgtgtaaaacagtgtatgttaatttgttgtaacaatatgaaagcatttcattttctgtatgtttgttcgagaggagaataaaacgtatctttaaatc

SEQ ID NO: 8340 - protein, 377 aa, Glycine max
  peptide (1)..(377): Ceres Seq. ID no. 14304149
  misc_feature (160)..(353): Pfam Name: Pfam Description:  O-methyltransferase
  misc_feature (15)..(376): NCBI GI NO: 15236282 NR Description: O-methyltransferase family 2
  misc_feature (160)..(376): NCBI GI NO: 15236280 NR Description: O-methyltransferase family 2
  misc_feature (31)..(120): NCBI GI NO: 15236280 NR Description: O-methyltransferase family 2
  misc_feature (28)..(376): NCBI GI NO: 1777386 NR Description: caffeic acid O-methyltransferase
  misc_feature (28)..(376): NCBI GI NO: 4574324 NR Description: caffeic acid ortho-methyltransferase
  misc_feature (28)..(376): NCBI GI NO: 7447883 NR Description: catechol O-methyltransferase homolog
  misc_feature (28)..(376): NCBI GI NO: 32440935 NR Description: caffeic acid O-methyltransferase
  misc_feature (33)..(376): NCBI GI NO: 33286374 NR Description: (R,S)-norcoclaurine 6-O-methyltransferase
  misc_feature (31)..(376): NCBI GI NO: 33286372 NR Description: (R,S)-reticuline 7-O-methyltransferase
  misc_feature (33)..(376): NCBI GI NO: 33413896 NR Description: S-adenosyl-L-methionine: norcoclaurine 6-O-methyltransferase
IIHAQLELREEMGEIEREEMSSTRWEKEEEEEEEEAQMDIWKYIFGFVELAVIKCAIELGIAEAIEKHGSPMTLSEISSSLGCDTSHLKRIMRFLVQRKIFKGDGCSRGYSQSALSRRLMRNGEHSMASFLLLESSPVMLAPWHSLSARVMANGNPSFAKAHGEDVWRYAAANLDHSNLINEAMACDAKLVMPIIIQSCSEAFHGLKSLVDVGGGNGTAMRILAKACPSIRPINFDLPHVIALCDGDGDGVQHVSGDMFLSVPKADAAFLMWVLHDWSDEECIQILKKCREAISNSKENGRVIIVEAVIEGEGEGEGGKHDGLKDVGLMLDMVMMAHTNFGKERTLKEWEYVIKMAGFSSYTVKPIHAVQSVIMAFY

SEQ ID NO: 8341 - protein, 366 aa, Glycine max
  peptide (1)..(366): Ceres Seq. ID no. 14304150
  misc_feature (149)..(342): Pfam Name: Pfam Description:  O-methyltransferase
  misc_feature (4)..(365): NCBI GI NO: 15236282 NR Description: O-methyltransferase family 2
  misc_feature (149)..(365): NCBI GI NO: 15236280 NR Description: O-methyltransferase family 2
  misc_feature (20)..(109): NCBI GI NO: 15236280 NR Description: O-methyltransferase family 2
  misc_feature (17)..(365): NCBI GI NO: 1777386 NR Description: caffeic acid O-methyltransferase
  misc_feature (17)..(365): NCBI GI NO: 4574324 NR Description: caffeic acid ortho-methyltransferase
  misc_feature (17)..(365): NCBI GI NO: 7447883 NR Description: catechol O-methyltransferase homolog
  misc_feature (17)..(365): NCBI GI NO: 32440935 NR Description: caffeic acid O-methyltransferase
  misc_feature (22)..(365): NCBI GI NO: 33286374 NR Description: (R,S)-norcoclaurine 6-O-methyltransferase
  misc_feature (20)..(365): NCBI GI NO: 33286372 NR Description: (R,S)-reticuline 7-O-methyltransferase
  misc_feature (22)..(365): NCBI GI NO: 33413896 NR Description: S-adenosyl-L-methionine: norcoclaurine 6-O-methyltransferase
MGEIEREEMSSTRWEKEEEEEEEEAQMDIWKYIFGFVELAVIKCAIELGIAEAIEKHGSPMTLSEISSSLGCDTSHLKRIMRFLVQRKIFKGDGCSRGYSQSALSRRLMRNGEHSMASFLLLESSPVMLAPWHSLSARVMANGNPSFAKAHGEDVWRYAAANLDHSNLINEAMACDAKLVMPIIIQSCSEAFHGLKSLVDVGGGNGTAMRILAKACPSIRPINFDLPHVIALCDGDGDGVQHVSGDMFLSVPKADAAFLMWVLHDWSDEECIQILKKCREAISNSKENGRVIIVEAVIEGEGEGEGGKHDGLKDVGLMLDMVMMAHTNFGKERTLKEWEYVIKMAGFSSYTVKPIHAVQSVIMAFY

SEQ ID NO: 8342 - protein, 358 aa, Glycine max
  peptide (1)..(358): Ceres Seq. ID no. 14304151
  misc_feature (141)..(334): Pfam Name: Pfam Description:  O-methyltransferase
  misc_feature (1)..(357): NCBI GI NO: 15236282 NR Description: O-methyltransferase family 2
  misc_feature (141)..(357): NCBI GI NO: 15236280 NR Description: O-methyltransferase family 2
  misc_feature (12)..(101): NCBI GI NO: 15236280 NR Description: O-methyltransferase family 2
  misc_feature (9)..(357): NCBI GI NO: 1777386 NR Description: caffeic acid O-methyltransferase
  misc_feature (9)..(357): NCBI GI NO: 4574324 NR Description: caffeic acid ortho-methyltransferase
  misc_feature (9)..(357): NCBI GI NO: 7447883 NR Description: catechol O-methyltransferase homolog
  misc_feature (9)..(357): NCBI GI NO: 32440935 NR Description: caffeic acid O-methyltransferase
  misc_feature (14)..(357): NCBI GI NO: 33286374 NR Description: (R,S)-norcoclaurine 6-O-methyltransferase
  misc_feature (12)..(357): NCBI GI NO: 33286372 NR Description: (R,S)-reticuline 7-O-methyltransferase
  misc_feature (14)..(357): NCBI GI NO: 33413896 NR Description: S-adenosyl-L-methionine: norcoclaurine 6-O-methyltransferase
MSSTRWEKEEEEEEEEAQMDIWKYIFGFVELAVIKCAIELGIAEAIEKHGSPMTLSEISSSLGCDTSHLKRIMRFLVQRKIFKGDGCSRGYSQSALSRRLMRNGEHSMASFLLLESSPVMLAPWHSLSARVMANGNPSFAKAHGEDVWRYAAANLDHSNLINEAMACDAKLVMPIIIQSCSEAFHGLKSLVDVGGGNGTAMRILAKACPSIRPINFDLPHVIALCDGDGDGVQHVSGDMFLSVPKADAAFLMWVLHDWSDEECIQILKKCREAISNSKENGRVIIVEAVIEGEGEGEGGKHDGLKDVGLMLDMVMMAHTNFGKERTLKEWEYVIKMAGFSSYTVKPIHAVQSVIMAFY

SEQ ID NO: 8343 - DNA, 2036 bp, Glycine max
  misc_feature (1)..(2036): Ceres Seq. ID no. 15171610
agataatgagtttaccatcgtgagccactcagcctgtgtttggtgggagggattattcagcttccctttttccttccctccacccaaccagagttagacaccgaaaatggctttcaaactgaaatcactacctctcctttgctctcttcactccccttcccgccaaaaccctaattcaacactctcaaaccatcacttttctcgtcgcttcttcgcaccttccattcctcccaccctgtgcctatccggcgcagcctcagcgtccacctttcatcgccatcgcttcttcgtaaccgctcgaagccaagacgaagaccagatcactgaggctcttgaacaagaagaagagaaagacaacgaagaaatatcgaggcagggtgagaaaaaggaactcgcgaagcaaggcacatgggatcagataaaggaaattgtgatgttcacaggaccagcaactggactttggatatgtggaccacttatgagtctcatcgatactgcagttattggtcagagaagttcaattgagcttgctgctttaggtcctgctacagttgtttgtgattacatgtgctacgtgttcatgtttctatcaattgctacttccaatatggttgctactgcccttgccaaacaggacaaagaagaagtacaacatcacatatctgtattgctttttgttgggttatcttgtggcattgcgatgcttttgttcacaaggctatttggtgctgctataataactgctttcactggaccaaagaatgtacacgtagtacctgcagctagcaattatgtaaagattcgaggcttggcatcacctgctttacttgttggatgggtagctcagagtgcaagtcttggtatgaaagattccttgggacccttgaaagctttagctgctgctacagttataaatgtcgctggttgtgtacttttgtgcacctatttaggttatggaattgtaggggctgcgtgggctacaatggtttcacaagttgttgcttcttacatgatgattcaaaatctaaatatgaagggatataatgcacttgccttctccattccttcagggaaggaacttctgacgatatttgggcttgctgctcctgtttttataacattgatgtcaaaggtggctttttacgcactacttatatattttgctacatcaatgggtacacatacaatggctgctcatcaagtcatggtccaaacctatttaatgtgtaccgtatggggtgaacctctctcccaaacctctcaatcatttatgcctgaattgatatgtggagtaaatcggagtttgtcaaaggcccgaatgcttctaaggtctctcgtgataattggagctatacttggattgttgttagggattattggaacatcggttccttggttatttcccaatatttttacacctgatcggatggtcatccaggagatgcataaggtgctgattccatactttatagccctggctgtaacaccccctactgtcagccttgagggaacgttgctggctggacgggatctgaaatttataagtttgtcaatgagtggatgcttttgtgtgggttcactagtattatgggctttgagtagtagatacggtttgcttggctgctggttttccctcgcattatttcaatgggctcggttttcaatggccctccagcgccttctttctcccaaaggcatcttatactcggaagatacagaacagtataagctgctaaagctaaggactgcctagtttgatgaagtcatcacaccagttacaaggatagaagtatgttttaataaaaaaaaaaagaggatagtagtatgttggaccatctcagcttatgggttaagcgagttaagaccaggacaaccggctaaaaagtgagccatcgtttttataatttgtttagtccgcgagctgggttggctcataggttggagttcactttgatacttatatgtgtatgattgctataataattagcatgaaaaattaattcagattcttaattatattgggcgcaatttatatt

SEQ ID NO: 8344 - protein, 548 aa, Glycine max
  peptide (1)..(548): Ceres Seq. ID no. 15171611
  misc_feature (114)..(276): Pfam Name: Pfam Description:  MatE
  misc_feature (1)..(540): NCBI GI NO: 21554183 NR Description: enhanced disease susceptibility 5
  misc_feature (79)..(540): NCBI GI NO: 17065002 NR Description: Unknown protein [Arabidopsis thaliana]
  misc_feature (79)..(540): NCBI GI NO: 18399664 NR Description: enhanced disease susceptibility 5
  misc_feature (1)..(547): NCBI GI NO: 22329250 NR Description: enhanced disease susceptibility 5
  misc_feature (1)..(457): NCBI GI NO: 7485793 NR Description: hypothetical protein F19H22
  misc_feature (231)..(447): NCBI GI NO: 25412030 NR Description: hypothetical protein At2g21340
  misc_feature (79)..(316): NCBI GI NO: 25412030 NR Description: hypothetical protein At2g21340
  misc_feature (67)..(526): NCBI GI NO: 7487160 NR Description: hypothetical protein At2g38330
  misc_feature (67)..(525): NCBI GI NO: 30687474 NR Description: MATE efflux protein family [Arabidopsis thaliana]
  misc_feature (175)..(530): NCBI GI NO: 15231918 NR Description: MATE efflux protein family [Arabidopsis thaliana]
MAFKLKSLPLLCSLHSPSRQNPNSTLSNHHFSRRFFAPSIPPTLCLSGAASASTFHRHRFFVTARSQDEDQITEALEQEEEKDNEEISRQGEKKELAKQGTWDQIKEIVMFTGPATGLWICGPLMSLIDTAVIGQRSSIELAALGPATVVCDYMCYVFMFLSIATSNMVATALAKQDKEEVQHHISVLLFVGLSCGIAMLLFTRLFGAAIITAFTGPKNVHVVPAASNYVKIRGLASPALLVGWVAQSASLGMKDSLGPLKALAAATVINVAGCVLLCTYLGYGIVGAAWATMVSQVVASYMMIQNLNMKGYNALAFSIPSGKELLTIFGLAAPVFITLMSKVAFYALLIYFATSMGTHTMAAHQVMVQTYLMCTVWGEPLSQTSQSFMPELICGVNRSLSKARMLLRSLVIIGAILGLLLGIIGTSVPWLFPNIFTPDRMVIQEMHKVLIPYFIALAVTPPTVSLEGTLLAGRDLKFISLSMSGCFCVGSLVLWALSSRYGLLGCWFSLALFQWARFSMALQRLLSPKGILYSEDTEQYKLLKLRTA

SEQ ID NO: 8345 - protein, 439 aa, Glycine max
  peptide (1)..(439): Ceres Seq. ID no. 15171612
  misc_feature (5)..(167): Pfam Name: Pfam Description:  MatE
  misc_feature (1)..(431): NCBI GI NO: 21554183 NR Description: enhanced disease susceptibility 5
  misc_feature (1)..(431): NCBI GI NO: 17065002 NR Description: Unknown protein [Arabidopsis thaliana]
  misc_feature (1)..(431): NCBI GI NO: 18399664 NR Description: enhanced disease susceptibility 5
  misc_feature (1)..(438): NCBI GI NO: 22329250 NR Description: enhanced disease susceptibility 5
  misc_feature (1)..(348): NCBI GI NO: 7485793 NR Description: hypothetical protein F19H22
  misc_feature (122)..(338): NCBI GI NO: 25412030 NR Description: hypothetical protein At2g21340
  misc_feature (1)..(207): NCBI GI NO: 25412030 NR Description: hypothetical protein At2g21340
  misc_feature (1)..(417): NCBI GI NO: 7487160 NR Description: hypothetical protein At2g38330
  misc_feature (1)..(416): NCBI GI NO: 30687474 NR Description: MATE efflux protein family [Arabidopsis thaliana]
  misc_feature (66)..(421): NCBI GI NO: 15231918 NR Description: MATE efflux protein family [Arabidopsis thaliana]
MFTGPATGLWICGPLMSLIDTAVIGQRSSIELAALGPATVVCDYMCYVFMFLSIATSNMVATALAKQDKEEVQHHISVLLFVGLSCGIAMLLFTRLFGAAIITAFTGPKNVHVVPAASNYVKIRGLASPALLVGWVAQSASLGMKDSLGPLKALAAATVINVAGCVLLCTYLGYGIVGAAWATMVSQVVASYMMIQNLNMKGYNALAFSIPSGKELLTIFGLAAPVFITLMSKVAFYALLIYFATSMGTHTMAAHQVMVQTYLMCTVWGEPLSQTSQSFMPELICGVNRSLSKARMLLRSLVIIGAILGLLLGIIGTSVPWLFPNIFTPDRMVIQEMHKVLIPYFIALAVTPPTVSLEGTLLAGRDLKFISLSMSGCFCVGSLVLWALSSRYGLLGCWFSLALFQWARFSMALQRLLSPKGILYSEDTEQYKLLKLRTA

SEQ ID NO: 8346 - protein, 424 aa, Glycine max
  peptide (1)..(424): Ceres Seq. ID no. 15171613
  misc_feature (1)..(152): Pfam Name: Pfam Description:  MatE
  misc_feature (1)..(416): NCBI GI NO: 21554183 NR Description: enhanced disease susceptibility 5
  misc_feature (1)..(416): NCBI GI NO: 17065002 NR Description: Unknown protein [Arabidopsis thaliana]
  misc_feature (1)..(416): NCBI GI NO: 18399664 NR Description: enhanced disease susceptibility 5
  misc_feature (1)..(423): NCBI GI NO: 22329250 NR Description: enhanced disease susceptibility 5
  misc_feature (1)..(333): NCBI GI NO: 7485793 NR Description: hypothetical protein F19H22
  misc_feature (107)..(323): NCBI GI NO: 25412030 NR Description: hypothetical protein At2g21340
  misc_feature (1)..(192): NCBI GI NO: 25412030 NR Description: hypothetical protein At2g21340
  misc_feature (1)..(402): NCBI GI NO: 7487160 NR Description: hypothetical protein At2g38330
  misc_feature (1)..(401): NCBI GI NO: 30687474 NR Description: MATE efflux protein family [Arabidopsis thaliana]
  misc_feature (51)..(406): NCBI GI NO: 15231918 NR Description: MATE efflux protein family [Arabidopsis thaliana]
MSLIDTAVIGQRSSIELAALGPATVVCDYMCYVFMFLSIATSNMVATALAKQDKEEVQHHISVLLFVGLSCGIAMLLFTRLFGAAIITAFTGPKNVHVVPAASNYVKIRGLASPALLVGWVAQSASLGMKDSLGPLKALAAATVINVAGCVLLCTYLGYGIVGAAWATMVSQVVASYMMIQNLNMKGYNALAFSIPSGKELLTIFGLAAPVFITLMSKVAFYALLIYFATSMGTHTMAAHQVMVQTYLMCTVWGEPLSQTSQSFMPELICGVNRSLSKARMLLRSLVIIGAILGLLLGIIGTSVPWLFPNIFTPDRMVIQEMHKVLIPYFIALAVTPPTVSLEGTLLAGRDLKFISLSMSGCFCVGSLVLWALSSRYGLLGCWFSLALFQWARFSMALQRLLSPKGILYSEDTEQYKLLKLRTA

SEQ ID NO: 8347 - DNA, 1276 bp, Glycine max
  misc_feature (1)..(1276): Ceres Seq. ID no. 14314220
atttgtatgtattcatgttcttaggacttatcttcattattgctaatttcagtttacaagggaaagagtatctgctcccaaggatagactctgttttgaaggtgctttatacctctcaaactttaaaacaataggttattccataataataacacaacacatgttctgaagggacacataatctcgagttccttgcaaggagctaattccacaagttggcctttgttaagcatctacaatctacactgattccttctgttttttcatttcaaaatggaatgtgctgtcttgggcgtgcattttatgaaaatcggtgcttaatcctatgatgcatgaatacatttttctgatttttttcttgaatgtgggttcctctcttctcaggatcattggtgcattattttttaattgaattacactggactttgagtggctgctttttctttgctcaccagtaagtgtttttatttttgttggaactaattatttctgtttttatcagaaatggcgatacatatgctggcgaatactttgcggataagatgcatggatttggggtatacagttttgctaatggccatcgttatgaaggatcctggcatgaaggcaaaaggcaaggtcttggaatgtatacatttagaaatggagaaacccagtctggtcactggcaaaatggagtccttgacattccaagcacacagagtaccacctatcctgtttcccctgttggggtcaatcattccagagtacttaatgcagtccaggaagcaagaagagcagctgagaaagcctatgatgtggccaaggtagatgagagggttaatagagcagtagctgccgctaacagagcagccaatgcagctagagtagctgctgtcaaggccgtgcaaaaccaaatgcttcataatgttaacagcacgagcatcccaattcccattgtgtgaggctgtcagctgcaaacttttgatagtagagatgcacgagattgtcagaagaggtcggtagtttaaactgctttgtttacaccgtcatcatcactgctggctgaatgaaatcaagcagatttattatccatctgccacgagtcttgtatagagggaggaagggtgatggcttccacatggtaaaatactacatatacatactatattttttccctttgcctacattttgtaaatttacttagatgtaaatgctggtgtgcgggtgaaacctcaacccagctactgttgtaagatcgcttggtaaaataaggagagaaacaaacatctagcct

SEQ ID NO: 8348 - protein, 133 aa, Glycine max
  peptide (1)..(133): Ceres Seq. ID no. 14314221
  misc_feature (1)..(133): NCBI GI NO: 37536922 NR Description: putative phosphatidylinositol-4-phosphate 5-kinase
  misc_feature (1)..(121): NCBI GI NO: 21928129 NR Description: AT4g17080/dl4570w [Arabidopsis thaliana]
  misc_feature (1)..(121): NCBI GI NO: 18403768 NR Description: expressed protein [Arabidopsis thaliana]
  misc_feature (1)..(121): NCBI GI NO: 15235967 NR Description: expressed protein [Arabidopsis thaliana]
  misc_feature (1)..(119): NCBI GI NO: 15219142 NR Description: phosphatidylinositol-4-phosphate 5-kinase -related
  misc_feature (1)..(119): NCBI GI NO: 21593251 NR Description: phosphatidylinositol-4-phosphate 5-kinase
  misc_feature (1)..(119): NCBI GI NO: 15217439 NR Description: hypothetical protein [Arabidopsis thaliana]
  misc_feature (1)..(46): NCBI GI NO: 28211437 NR Description: putative phosphatidylinositol 4-phosphate 5-kinase
  misc_feature (1)..(116): NCBI GI NO: 34865678 NR Description: similar to junctophilin type 1 [Rattus norvegicus]
  misc_feature (1)..(116): NCBI GI NO: 29476889 NR Description: JPH1 protein [Homo sapiens]
MHGFGVYSFANGHRYEGSWHEGKRQGLGMYTFRNGETQSGHWQNGVLDIPSTQSTTYPVSPVGVNHSRVLNAVQEARRAAEKAYDVAKVDERVNRAVAAANRAANAARVAAVKAVQNQMLHNVNSTSIPIPIV

SEQ ID NO: 8349 - protein, 105 aa, Glycine max
  peptide (1)..(105): Ceres Seq. ID no. 14314222
  misc_feature (1)..(105): NCBI GI NO: 37536922 NR Description: putative phosphatidylinositol-4-phosphate 5-kinase
  misc_feature (1)..(93): NCBI GI NO: 21928129 NR Description: AT4g17080/dl4570w [Arabidopsis thaliana]
  misc_feature (1)..(93): NCBI GI NO: 18403768 NR Description: expressed protein [Arabidopsis thaliana]
  misc_feature (1)..(93): NCBI GI NO: 15235967 NR Description: expressed protein [Arabidopsis thaliana]
  misc_feature (1)..(91): NCBI GI NO: 15219142 NR Description: phosphatidylinositol-4-phosphate 5-kinase -related
  misc_feature (1)..(91): NCBI GI NO: 21593251 NR Description: phosphatidylinositol-4-phosphate 5-kinase
  misc_feature (1)..(91): NCBI GI NO: 15217439 NR Description: hypothetical protein [Arabidopsis thaliana]
  misc_feature (1)..(18): NCBI GI NO: 28211437 NR Description: putative phosphatidylinositol 4-phosphate 5-kinase
  misc_feature (1)..(88): NCBI GI NO: 34865678 NR Description: similar to junctophilin type 1 [Rattus norvegicus]
  misc_feature (1)..(88): NCBI GI NO: 29476889 NR Description: JPH1 protein [Homo sapiens]
MYTFRNGETQSGHWQNGVLDIPSTQSTTYPVSPVGVNHSRVLNAVQEARRAAEKAYDVAKVDERVNRAVAAANRAANAARVAAVKAVQNQMLHNVNSTSIPIPIV

SEQ ID NO: 8350 - protein, 101 aa, Glycine max
  peptide (1)..(101): Ceres Seq. ID no. 14314223
MAIHMLANTLRIRCMDLGYTVLLMAIVMKDPGMKAKGKVLECIHLEMEKPSLVTGKMESLTFQAHRVPPILFPLLGSIIPEYLMQSRKQEEQLRKPMMWPR

SEQ ID NO: 8351 - DNA, 1631 bp, Glycine max
  misc_feature (1)..(1631): Ceres Seq. ID no. 15172560
atttttcactggaaagtttcaattgctggggggcttctgcttctggttttgttagttccgagttgccttttgagggaactcaagtagtcaagttcaagcttcctactacttctttgtctcacgttttggggttgccagttactgttgatatcataatggattccccacaatctgttgtgtcacccttcaggagctcagtgttgggtgagagtgagaagcacaagtctgatgttttcccaggaaactctagtcctttttccaaggacattgaagtgaatgggaaggaagttgtcatgtcaaatgtagaggagtatcttggagtgcttgatgtttacatacatcaggccagggacattcaaaacatttgcatataccacaagcaagatgtttatgctaagatttgtctgaccagtaatcctgagacaactgtgtctaccaaaaccatcaatggaggaggaaggaaccctgtgttcaacgagaatcttcgtattgatgttaggactgttgatgcttctctcaagtgtgagatatggatgcttagcagggtgaagaactatcttgaagaccagttgcttggttttgctttggtacccttgtctgaagtactagtccagaatgggaaacttgagaaagagttctctctttcttcaactgatctattccattctccttcgggttttgttcagttgtcgctttcttacactggtgcttcacctgatgttatgacaatttctgcaatgccgaacaaggtggccacagatgccgcagtgcaggactcagaaacgtccgagtcactggccagggatttagacaaaatcgagttcccggatccgaagattgtcaatgaagaccacttgatggtttcagtatacttcggtattccgtgtgaggagactcaatgttccgatagcttggctacttctgatgctgaaaaccagagttccgaagccggtgttcggcttgtggaaagcttctcagcatgcagtgttgagtctgttcagccaactaaggttgattcccctcctagcagtgtgtcaacaaatggggtttcttccccttcagtgccagcaaactcagaatcatctgatgctgctgcttccaagtctcccattcaggagcaagtttcaggcaccaaagaggacaaaaatgtggataccaaagatagtgagagtgattcctcaagtggggttcctagtgaatcattccctaagcctgttgtgactgtgaacattgaacccgagccaaaggtcgtgcagcaggatatagtagacatgtacatgaaaagcatgcagcaattcactgagtcactagcaaaaatgaagctccctatggacttggaaagtgaaccaactagttcaggaaattcaaccactgagcagaaactacagccatcaaagagcaataattctcgtgtgttttatggcagcagagctttcttctgatcttttgcttcccttgttcaagggaatacgagcagtcactgtagatttttagaagaaaactgattttagtagtgaagtgaaataatcaatgtactatcctgtgtggtttccccttctgtatttcatcacatgttggttgtagcttacagggaatataactttgtactctcacaagcttgttgctatctc

SEQ ID NO: 8352 - protein, 479 aa, Glycine max
  peptide (1)..(479): Ceres Seq. ID no. 15172561
  misc_feature (108)..(195): Pfam Name: Pfam Description:  C2 domain
  misc_feature (90)..(479): NCBI GI NO: 24414275 NR Description: Unknown protein
  misc_feature (41)..(383): NCBI GI NO: 9758185 NR Description: gene_id:MTE17
  misc_feature (52)..(383): NCBI GI NO: 28393796 NR Description: unknown protein [Arabidopsis thaliana]
  misc_feature (52)..(383): NCBI GI NO: 30696612 NR Description: C2 domain-containing protein
  misc_feature (90)..(367): NCBI GI NO: 18403117 NR Description: C2 domain-containing protein
  misc_feature (90)..(367): NCBI GI NO: 25405379 NR Description: unknown protein [imported] - Arabidopsis thaliana
  misc_feature (90)..(367): NCBI GI NO: 21593485 NR Description: unknown [Arabidopsis thaliana]
  misc_feature (103)..(436): NCBI GI NO: 34901084 NR Description: contains ESTsAU183957
  misc_feature (104)..(291): NCBI GI NO: 18416832 NR Description: C2 domain-containing protein
  misc_feature (360)..(479): NCBI GI NO: 18416832 NR Description: C2 domain-containing protein
FSLESFNCWGASASGFVSSELPFEGTQVVKFKLPTTSLSHVLGLPVTVDIIMDSPQSVVSPFRSSVLGESEKHKSDVFPGNSSPFSKDIEVNGKEVVMSNVEEYLGVLDVYIHQARDIQNICIYHKQDVYAKICLTSNPETTVSTKTINGGGRNPVFNENLRIDVRTVDASLKCEIWMLSRVKNYLEDQLLGFALVPLSEVLVQNGKLEKEFSLSSTDLFHSPSGFVQLSLSYTGASPDVMTISAMPNKVATDAAVQDSETSESLARDLDKIEFPDPKIVNEDHLMVSVYFGIPCEETQCSDSLATSDAENQSSEAGVRLVESFSACSVESVQPTKVDSPPSSVSTNGVSSPSVPANSESSDAAASKSPIQEQVSGTKEDKNVDTKDSESDSSSGVPSESFPKPVVTVNIEPEPKVVQQDIVDMYMKSMQQFTESLAKMKLPMDLESEPTSSGNSTTEQKLQPSKSNNSRVFYGSRAFF

SEQ ID NO: 8353 - protein, 428 aa, Glycine max
  peptide (1)..(428): Ceres Seq. ID no. 15172562
  misc_feature (57)..(144): Pfam Name: Pfam Description:  C2 domain
  misc_feature (39)..(428): NCBI GI NO: 24414275 NR Description: Unknown protein
  misc_feature (1)..(332): NCBI GI NO: 9758185 NR Description: gene_id:MTE17
  misc_feature (1)..(332): NCBI GI NO: 28393796 NR Description: unknown protein [Arabidopsis thaliana]
  misc_feature (1)..(332): NCBI GI NO: 30696612 NR Description: C2 domain-containing protein
  misc_feature (39)..(316): NCBI GI NO: 18403117 NR Description: C2 domain-containing protein
  misc_feature (39)..(316): NCBI GI NO: 25405379 NR Description: unknown protein [imported] - Arabidopsis thaliana
  misc_feature (39)..(316): NCBI GI NO: 21593485 NR Description: unknown [Arabidopsis thaliana]
  misc_feature (52)..(385): NCBI GI NO: 34901084 NR Description: contains ESTsAU183957
  misc_feature (53)..(240): NCBI GI NO: 18416832 NR Description: C2 domain-containing protein
  misc_feature (309)..(428): NCBI GI NO: 18416832 NR Description: C2 domain-containing protein
MDSPQSVVSPFRSSVLGESEKHKSDVFPGNSSPFSKDIEVNGKEVVMSNVEEYLGVLDVYIHQARDIQNICIYHKQDVYAKICLTSNPETTVSTKTINGGGRNPVFNENLRIDVRTVDASLKCEIWMLSRVKNYLEDQLLGFALVPLSEVLVQNGKLEKEFSLSSTDLFHSPSGFVQLSLSYTGASPDVMTISAMPNKVATDAAVQDSETSESLARDLDKIEFPDPKIVNEDHLMVSVYFGIPCEETQCSDSLATSDAENQSSEAGVRLVESFSACSVESVQPTKVDSPPSSVSTNGVSSPSVPANSESSDAAASKSPIQEQVSGTKEDKNVDTKDSESDSSSGVPSESFPKPVVTVNIEPEPKVVQQDIVDMYMKSMQQFTESLAKMKLPMDLESEPTSSGNSTTEQKLQPSKSNNSRVFYGSRAFF

SEQ ID NO: 8354 - protein, 382 aa, Glycine max
  peptide (1)..(382): Ceres Seq. ID no. 15172563
  misc_feature (11)..(98): Pfam Name: Pfam Description:  C2 domain
  misc_feature (1)..(382): NCBI GI NO: 24414275 NR Description: Unknown protein
  misc_feature (1)..(286): NCBI GI NO: 9758185 NR Description: gene_id:MTE17
  misc_feature (1)..(286): NCBI GI NO: 28393796 NR Description: unknown protein [Arabidopsis thaliana]
  misc_feature (1)..(286): NCBI GI NO: 30696612 NR Description: C2 domain-containing protein
  misc_feature (1)..(270): NCBI GI NO: 18403117 NR Description: C2 domain-containing protein
  misc_feature (1)..(270): NCBI GI NO: 25405379 NR Description: unknown protein [imported] - Arabidopsis thaliana
  misc_feature (1)..(270): NCBI GI NO: 21593485 NR Description: unknown [Arabidopsis thaliana]
  misc_feature (6)..(339): NCBI GI NO: 34901084 NR Description: contains ESTsAU183957
  misc_feature (7)..(194): NCBI GI NO: 18416832 NR Description: C2 domain-containing protein
  misc_feature (263)..(382): NCBI GI NO: 18416832 NR Description: C2 domain-containing protein
MSNVEEYLGVLDVYIHQARDIQNICIYHKQDVYAKICLTSNPETTVSTKTINGGGRNPVFNENLRIDVRTVDASLKCEIWMLSRVKNYLEDQLLGFALVPLSEVLVQNGKLEKEFSLSSTDLFHSPSGFVQLSLSYTGASPDVMTISAMPNKVATDAAVQDSETSESLARDLDKIEFPDPKIVNEDHLMVSVYFGIPCEETQCSDSLATSDAENQSSEAGVRLVESFSACSVESVQPTKVDSPPSSVSTNGVSSPSVPANSESSDAAASKSPIQEQVSGTKEDKNVDTKDSESDSSSGVPSESFPKPVVTVNIEPEPKVVQQDIVDMYMKSMQQFTESLAKMKLPMDLESEPTSSGNSTTEQKLQPSKSNNSRVFYGSRAFF

SEQ ID NO: 8355 - DNA, 1577 bp, Glycine max
  misc_feature (1)..(1577): Ceres Seq. ID no. 15171809
atccaagttccaacatcaactaaactccttctatgttctaactctctctcaccctccatattcctcaacttcaaattctttcttttctataccattttctctcaccaaagtcagctttacctgattcctttgtttagtttgatttattgtgatttcattggttcctttcttactttaaggaacaagtgtggctataatataactctggtgtacataatcacatagatgaggtggtgtggagttggtttattttcatttgttctccttttttctaacttcataaatggtgataatgattcaaaatgtaagtagcttagggaaataaaagtttgtggaaactgggtattcagcactatttttaaaaaataaaactttagtctaatttttggaatctgcattggtttccataaggattaagtgggaagcatgaagaacttatactggttcaaagagatttctaacaacgtgagatcagggagaaggctttcactaggggaatacaagagagcagtgtcatggtcaaagtatttggtctcttctggggcggccataaagggagaaggagaagaagaatggagtgctgatctgtctcagttgttcatagggtcaaaatttgcctctggcaggcatagcaggatctacagaggcatctacaagcacatggatgttgcaattaagctggtgagtcaacctgaggaggatgaggacttggctgttttgcttgagaagcaattcacttctgaggttgctttgctctttcgattgcgccatccaaatatcattacttttgttgcagcttgcaagaaacctcctgtgttctgcataattactgaatatttggctgggggttccttgagaaaatacttggttcagcaagggccacattcagttactcacaaagttgttctgaaattagctttagacatagcacggggaatgcaatatcttcattctcagggtatacttcacagggatctcaaatcagaaaacctgctgttgggggaagatttgtgcgtaaaagtagcagattttgggatctcttgcttggaatctcagacaggcagtgcaaaaggattcactggaacataccgttggatggcacctgaaatgatcaaagaaaagcgtcacaccaagaaagtagatgtctatagtttcgccatagttctatgggagctattaacaggattgacgccatttgacaacatgacaccagagcaagcagcatatgctgtgactcacaagaatgaaaggcctccgttgccatgtgactgtccaaaggcatttagccatctcatcaacagatgctggtcaagcaacccagataaaaggccacattttaatgagatagtcacaattttggagagctacattgaagcacttgagcaggatccagaatttttctctacttacaaaccacgtcctaataatataattctcagatgcttatcaaaatgtagtaatatatttgcttcttgcaaagcttagcattctctttccgataatgtaacatgaattgtattaaatcaatcccaagaaccaaaaatatgtttaattaataactatattaatcctcttcc

SEQ ID NO: 8356 - protein, 352 aa, Glycine max
  peptide (1)..(352): Ceres Seq. ID no. 15171810
  misc_feature (15)..(274): NCBI GI NO: 34894114 NR Description: putative protein kinase
  misc_feature (30)..(320): NCBI GI NO: 7488256 NR Description: protein kinase homolog F24O1
  misc_feature (30)..(320): NCBI GI NO: 15220773 NR Description: protein kinase, putative [Arabidopsis thaliana]
  misc_feature (134)..(320): NCBI GI NO: 7940280 NR Description: F24O1.13 [Arabidopsis thaliana]
  misc_feature (30)..(119): NCBI GI NO: 7940280 NR Description: F24O1.13 [Arabidopsis thaliana]
  misc_feature (15)..(321): NCBI GI NO: 478809 NR Description: protein kinase 6 (EC 2.7.1.-) - soybean
  misc_feature (24)..(321): NCBI GI NO: 10241603 NR Description: protein kinase (PK) [Fagus sylvatica]
  misc_feature (48)..(321): NCBI GI NO: 34909474 NR Description: putative protein kinase
  misc_feature (26)..(321): NCBI GI NO: 18424175 NR Description: protein kinase family [Arabidopsis thaliana]
  misc_feature (26)..(320): NCBI GI NO: 18087633 NR Description: AT5g58950/k19m22_150 [Arabidopsis thaliana]
MKNLYWFKEISNNVRSGRRLSLGEYKRAVSWSKYLVSSGAAIKGEGEEEWSADLSQLFIGSKFASGRHSRIYRGIYKHMDVAIKLVSQPEEDEDLAVLLEKQFTSEVALLFRLRHPNIITFVAACKKPPVFCIITEYLAGGSLRKYLVQQGPHSVTHKVVLKLALDIARGMQYLHSQGILHRDLKSENLLLGEDLCVKVADFGISCLESQTGSAKGFTGTYRWMAPEMIKEKRHTKKVDVYSFAIVLWELLTGLTPFDNMTPEQAAYAVTHKNERPPLPCDCPKAFSHLINRCWSSNPDKRPHFNEIVTILESYIEALEQDPEFFSTYKPRPNNIILRCLSKCSNIFASCKA

SEQ ID NO: 8357 - protein, 274 aa, Glycine max
  peptide (1)..(274): Ceres Seq. ID no. 15171811
  misc_feature (1)..(196): NCBI GI NO: 34894114 NR Description: putative protein kinase
  misc_feature (1)..(242): NCBI GI NO: 7488256 NR Description: protein kinase homolog F24O1
  misc_feature (1)..(242): NCBI GI NO: 15220773 NR Description: protein kinase, putative [Arabidopsis thaliana]
  misc_feature (56)..(242): NCBI GI NO: 7940280 NR Description: F24O1.13 [Arabidopsis thaliana]
  misc_feature (1)..(41): NCBI GI NO: 7940280 NR Description: F24O1.13 [Arabidopsis thaliana]
  misc_feature (1)..(243): NCBI GI NO: 478809 NR Description: protein kinase 6 (EC 2.7.1.-) - soybean
  misc_feature (1)..(243): NCBI GI NO: 10241603 NR Description: protein kinase (PK) [Fagus sylvatica]
  misc_feature (1)..(243): NCBI GI NO: 34909474 NR Description: putative protein kinase
  misc_feature (1)..(243): NCBI GI NO: 18424175 NR Description: protein kinase family [Arabidopsis thaliana]
  misc_feature (1)..(242): NCBI GI NO: 18087633 NR Description: AT5g58950/k19m22_150 [Arabidopsis thaliana]
MDVAIKLVSQPEEDEDLAVLLEKQFTSEVALLFRLRHPNIITFVAACKKPPVFCIITEYLAGGSLRKYLVQQGPHSVTHKVVLKLALDIARGMQYLHSQGILHRDLKSENLLLGEDLCVKVADFGISCLESQTGSAKGFTGTYRWMAPEMIKEKRHTKKVDVYSFAIVLWELLTGLTPFDNMTPEQAAYAVTHKNERPPLPCDCPKAFSHLINRCWSSNPDKRPHFNEIVTILESYIEALEQDPEFFSTYKPRPNNIILRCLSKCSNIFASCKA

SEQ ID NO: 8358 - protein, 182 aa, Glycine max
  peptide (1)..(182): Ceres Seq. ID no. 15171812
  misc_feature (1)..(104): NCBI GI NO: 34894114 NR Description: putative protein kinase
  misc_feature (1)..(150): NCBI GI NO: 7488256 NR Description: protein kinase homolog F24O1
  misc_feature (1)..(150): NCBI GI NO: 15220773 NR Description: protein kinase, putative [Arabidopsis thaliana]
  misc_feature (1)..(150): NCBI GI NO: 7940280 NR Description: F24O1.13 [Arabidopsis thaliana]
  misc_feature (1)..(151): NCBI GI NO: 478809 NR Description: protein kinase 6 (EC 2.7.1.-) - soybean
  misc_feature (1)..(151): NCBI GI NO: 10241603 NR Description: protein kinase (PK) [Fagus sylvatica]
  misc_feature (1)..(151): NCBI GI NO: 34909474 NR Description: putative protein kinase
  misc_feature (1)..(151): NCBI GI NO: 18424175 NR Description: protein kinase family [Arabidopsis thaliana]
  misc_feature (1)..(150): NCBI GI NO: 18087633 NR Description: AT5g58950/k19m22_150 [Arabidopsis thaliana]
  misc_feature (1)..(142): NCBI GI NO: 27085280 NR Description: serine/threonine protein kinase
MQYLHSQGILHRDLKSENLLLGEDLCVKVADFGISCLESQTGSAKGFTGTYRWMAPEMIKEKRHTKKVDVYSFAIVLWELLTGLTPFDNMTPEQAAYAVTHKNERPPLPCDCPKAFSHLINRCWSSNPDKRPHFNEIVTILESYIEALEQDPEFFSTYKPRPNNIILRCLSKCSNIFASCKA

SEQ ID NO: 8359 - DNA, 1223 bp, Glycine max
  misc_feature (1)..(1223): Ceres Seq. ID no. 15172539
tagctctttgttctctgttctcgcgatttcggaagggtcgtgtttccctgcttcagtttcagcttcggcttcgagaagcgtcgattgggtccttaagctgttccttctctgtttctgacaaactgtataactcctatcaaacatgagcggtcgcttttctcgcacaatttatgtcggcaacctgccctctgatataagagagtcagaaattgaagatctattctacaagtatggccgtataatggatattgaattgaaggttcctccccgccctccatgttattgctttgttgagtttgataatgctcgagatgccgaagatgcaattcggggtcgagatggatacaactttgatggttgtcggttaagagtggagcttgctcatggtggtagagggccatcatcaagtgatcgacgtggatatggaggaggaggtggtaatggtggagcaggcgggggtcgttttggcatctcacgccattctgaatttcgagttattgttcgtggactcccatcttctgcatcttggcaagatttgaaggatcatatgcgaaaagctggggacgtgtgttttgctgaggtttcccgtgatagtgaagggacttttggcattgttgattacactaattatgatgacatgaagtatgccattcggaaattggatgacactgagtttagaaatccctgggcgagagcttatattcgggtgaggaagtatgagagtagtcgttctaggagccgcagcaggagccccagcaggagccccagcaggagcagaagtccaaaaagagttagaagtagatctctggagcgttctgtgtctaggtcacgatctagatctcaatcagcatcaccaatcaaatcttctaggccaagatcacgatcccgatcacgatcacgatctggatctggatctcctcatcaggtcctgtcaggtagtggttgaatttctgacaaagctggtggttctctggtgatattgttccattctggtgggcagtatcggaattatattggagttggactaaattgttttaagggaaaattattgatgtgcctaggctgtttggtgattgtcttatttcttttaaattaaaatgttggacattggccttgccctttgtaccttagcaaacacaagaatatctttagtcctcgcaaactgtgaatccaatttgaatggttttaaacagatttataaaaaaaaaatctacatatatcgc

SEQ ID NO: 8360 - protein, 267 aa, Glycine max
  peptide (1)..(267): Ceres Seq. ID no. 15172540
  misc_feature (9)..(77): Pfam Name: a.k.a. RRM, RBD, or RNP domain Pfam Description: RNA recognition motif.
  misc_feature (1)..(259): NCBI GI NO: 12324445 NR Description: putative splicing factor; 53460-55514
  misc_feature (1)..(259): NCBI GI NO: 22331714 NR Description: arginine/serine-rich splicing factor
  misc_feature (1)..(259): NCBI GI NO: 33146854 NR Description: putative pre-mRNA splicing factor SF2
  misc_feature (1)..(259): NCBI GI NO: 30678391 NR Description: pre-mRNA splicing factor SF2 (SR1 protein)
  misc_feature (1)..(259): NCBI GI NO: 2443473 NR Description: ASF/SF2 homolog [Arabidopsis thaliana]
  misc_feature (1)..(259): NCBI GI NO: 30678395 NR Description: pre-mRNA splicing factor SF2 (SR1 protein)
  misc_feature (1)..(266): NCBI GI NO: 5815235 NR Description: splicing factor SR1 [Arabidopsis thaliana]
  misc_feature (1)..(259): NCBI GI NO: 5815236 NR Description: splicing factor SR1B [Arabidopsis thaliana]
  misc_feature (1)..(259): NCBI GI NO: 5815239 NR Description: splicing factor SR1E [Arabidopsis thaliana]
  misc_feature (1)..(259): NCBI GI NO: 5815237 NR Description: splicing factor SR1C [Arabidopsis thaliana]
MSGRFSRTIYVGNLPSDIRESEIEDLFYKYGRIMDIELKVPPRPPCYCFVEFDNARDAEDAIRGRDGYNFDGCRLRVELAHGGRGPSSSDRRGYGGGGGNGGAGGGRFGISRHSEFRVIVRGLPSSASWQDLKDHMRKAGDVCFAEVSRDSEGTFGIVDYTNYDDMKYAIRKLDDTEFRNPWARAYIRVRKYESSRSRSRSRSPSRSPSRSRSPKRVRSRSLERSVSRSRSRSQSASPIKSSRPRSRSRSRSRSGSGSPHQVLSGSG

SEQ ID NO: 8361 - protein, 234 aa, Glycine max
  peptide (1)..(234): Ceres Seq. ID no. 15172541
  misc_feature (1)..(226): NCBI GI NO: 12324445 NR Description: putative splicing factor; 53460-55514
  misc_feature (1)..(226): NCBI GI NO: 22331714 NR Description: arginine/serine-rich splicing factor
  misc_feature (1)..(226): NCBI GI NO: 33146854 NR Description: putative pre-mRNA splicing factor SF2
  misc_feature (1)..(226): NCBI GI NO: 30678391 NR Description: pre-mRNA splicing factor SF2 (SR1 protein)
  misc_feature (1)..(226): NCBI GI NO: 2443473 NR Description: ASF/SF2 homolog [Arabidopsis thaliana]
  misc_feature (1)..(226): NCBI GI NO: 30678395 NR Description: pre-mRNA splicing factor SF2 (SR1 protein)
  misc_feature (1)..(233): NCBI GI NO: 5815235 NR Description: splicing factor SR1 [Arabidopsis thaliana]
  misc_feature (1)..(226): NCBI GI NO: 5815236 NR Description: splicing factor SR1B [Arabidopsis thaliana]
  misc_feature (1)..(226): NCBI GI NO: 5815239 NR Description: splicing factor SR1E [Arabidopsis thaliana]
  misc_feature (1)..(226): NCBI GI NO: 5815237 NR Description: splicing factor SR1C [Arabidopsis thaliana]
MDIELKVPPRPPCYCFVEFDNARDAEDAIRGRDGYNFDGCRLRVELAHGGRGPSSSDRRGYGGGGGNGGAGGGRFGISRHSEFRVIVRGLPSSASWQDLKDHMRKAGDVCFAEVSRDSEGTFGIVDYTNYDDMKYAIRKLDDTEFRNPWARAYIRVRKYESSRSRSRSRSPSRSPSRSRSPKRVRSRSLERSVSRSRSRSQSASPIKSSRPRSRSRSRSRSGSGSPHQVLSGSG

SEQ ID NO: 8362 - DNA, 1526 bp, Glycine max
  misc_feature (1)..(1526): Ceres Seq. ID no. 15177368
atatatatgtactcctttgtttagtaaccgaccgtgtgcgagagagagagagagagagagagacggctatattcgcgcctcggtctctttatttctccgccaacgacaccaccgcatctttctctctttccgttcccttctctctccgatctgcattttgcattctcttccgatgccgatattctccaattcctcgccctgctgcaccgccgccgccgccgcagtggttaactcctccaaccggaagaccagattcgtctctccttcttggaggaattgcaaggtcacatctccaattttacggctctccgagaatgacaaattcaatgtgtctcggttagctcctagccactctaggcggtcagttaaggaccggaacatatcaatggcattagtgggcgaaactgttggagttggacaaaagggacaggtggccggctcctctagcatcttggcatatgatttgattcagggggcacttgtaagatggagttctgttatggacaggtctttacctgagccaccaacggctgtttttctgcatggaatcctaggttgcaggaaaaactggggaacttttgctaggagattggctcaagagtttcctacatggcagtttcttttagtagacctgcgatgtcatggcgattcagcatcaatccagaagaaagatccccatactgttgcatctgctgctatggatgttttaaaactggttcgagatctgagaataacgccccgtgtgttagttggtcatagttttggggggaaagttgttttgagcatggtagaccaagctgcaaagcctcttgctcggccagtgagagcttggattctggatgcaacccctggaaaagttcgagcaggtggagatggagaagatcatccagaagaactcatatcctttctaagtacactgccaaaggaggtcccttcaaagcggcatgttgtcagagctcttattcaacatggattttccaatgatgtggcgcagtgggttgtgactaacctgcgaccttctggctctcctggttcacaatcatcaagcttctcatgggtgtttgacctaagggggattgcagaaatgtatcaatcctatgaagaaacaaatttgtggaaaattgttgaagatgtacctcgtggggtgcatgtgaactttttgaaagcagaaagaagcttacatagatgggctcttgaagaccttcagcggatccatgcagctgaagagcttgctgttgaggaaggagggggagttgaaatgcatgtccttgaagatgctggccactgggtgcatactgataacccggatggactctttaggatactgtcatcatctttccaattccagggaggcaaaacctgagtttacaaatgtgctctcttgtaatttctatttatacgtggattgccttaacagtttgatgccattccttcttcccattttttgtctagttatcccctttgtatatgctattattttttttaatcttcttgtacatcaccgtaatatatattttttaatcgcg

SEQ ID NO: 8363 - protein, 453 aa, Glycine max
  peptide (1)..(453): Ceres Seq. ID no. 15177369
  misc_feature (204)..(444): Pfam Name: Pfam Description:  alpha/beta hydrolase fold
  misc_feature (103)..(447): NCBI GI NO: 15234891 NR Description: hydrolase, alpha/beta fold family
  misc_feature (277)..(449): NCBI GI NO: 20161236 NR Description: P0408G07.9
  misc_feature (160)..(251): NCBI GI NO: 20161236 NR Description: P0408G07.9
  misc_feature (176)..(446): NCBI GI NO: 22331752 NR Description: expressed protein [Arabidopsis thaliana]
  misc_feature (277)..(446): NCBI GI NO: 34908512 NR Description: P0679C12.26
  misc_feature (172)..(268): NCBI GI NO: 34908512 NR Description: P0679C12.26
  misc_feature (176)..(446): NCBI GI NO: 7486010 NR Description: hypothetical protein F22O6
  misc_feature (176)..(375): NCBI GI NO: 15642097 NR Description: esterase/lipase YbfF, putative [Vibrio cholerae]
  misc_feature (176)..(337): NCBI GI NO: 28897611 NR Description: putative esterase/lipase YbfF
  misc_feature (178)..(365): NCBI GI NO: 27363654 NR Description: Predicted hydrolase or acyltransferase
YICTPLFSNRPCARERERERDGYIRASVSLFLRQRHHRIFLSFRSLLSPICILHSLPMPIFSNSSPCCTAAAAAVVNSSNRKTRFVSPSWRNCKVTSPILRLSENDKFNVSRLAPSHSRRSVKDRNISMALVGETVGVGQKGQVAGSSSILAYDLIQGALVRWSSVMDRSLPEPPTAVFLHGILGCRKNWGTFARRLAQEFPTWQFLLVDLRCHGDSASIQKKDPHTVASAAMDVLKLVRDLRITPRVLVGHSFGGKVVLSMVDQAAKPLARPVRAWILDATPGKVRAGGDGEDHPEELISFLSTLPKEVPSKRHVVRALIQHGFSNDVAQWVVTNLRPSGSPGSQSSSFSWVFDLRGIAEMYQSYEETNLWKIVEDVPRGVHVNFLKAERSLHRWALEDLQRIHAAEELAVEEGGGVEMHVLEDAGHWVHTDNPDGLFRILSSSFQFQGGKT

SEQ ID NO: 8364 - protein, 396 aa, Glycine max
  peptide (1)..(396): Ceres Seq. ID no. 15177370
  misc_feature (147)..(387): Pfam Name: Pfam Description:  alpha/beta hydrolase fold
  misc_feature (46)..(390): NCBI GI NO: 15234891 NR Description: hydrolase, alpha/beta fold family
  misc_feature (220)..(392): NCBI GI NO: 20161236 NR Description: P0408G07.9
  misc_feature (103)..(194): NCBI GI NO: 20161236 NR Description: P0408G07.9
  misc_feature (119)..(389): NCBI GI NO: 22331752 NR Description: expressed protein [Arabidopsis thaliana]
  misc_feature (220)..(389): NCBI GI NO: 34908512 NR Description: P0679C12.26
  misc_feature (115)..(211): NCBI GI NO: 34908512 NR Description: P0679C12.26
  misc_feature (119)..(389): NCBI GI NO: 7486010 NR Description: hypothetical protein F22O6
  misc_feature (119)..(318): NCBI GI NO: 15642097 NR Description: esterase/lipase YbfF, putative [Vibrio cholerae]
  misc_feature (119)..(280): NCBI GI NO: 28897611 NR Description: putative esterase/lipase YbfF
  misc_feature (121)..(308): NCBI GI NO: 27363654 NR Description: Predicted hydrolase or acyltransferase
MPIFSNSSPCCTAAAAAVVNSSNRKTRFVSPSWRNCKVTSPILRLSENDKFNVSRLAPSHSRRSVKDRNISMALVGETVGVGQKGQVAGSSSILAYDLIQGALVRWSSVMDRSLPEPPTAVFLHGILGCRKNWGTFARRLAQEFPTWQFLLVDLRCHGDSASIQKKDPHTVASAAMDVLKLVRDLRITPRVLVGHSFGGKVVLSMVDQAAKPLARPVRAWILDATPGKVRAGGDGEDHPEELISFLSTLPKEVPSKRHVVRALIQHGFSNDVAQWVVTNLRPSGSPGSQSSSFSWVFDLRGIAEMYQSYEETNLWKIVEDVPRGVHVNFLKAERSLHRWALEDLQRIHAAEELAVEEGGGVEMHVLEDAGHWVHTDNPDGLFRILSSSFQFQGGKT

SEQ ID NO: 8365 - protein, 325 aa, Glycine max
  peptide (1)..(325): Ceres Seq. ID no. 15177371
  misc_feature (76)..(316): Pfam Name: Pfam Description:  alpha/beta hydrolase fold
  misc_feature (1)..(319): NCBI GI NO: 15234891 NR Description: hydrolase, alpha/beta fold family
  misc_feature (149)..(321): NCBI GI NO: 20161236 NR Description: P0408G07.9
  misc_feature (32)..(123): NCBI GI NO: 20161236 NR Description: P0408G07.9
  misc_feature (48)..(318): NCBI GI NO: 22331752 NR Description: expressed protein [Arabidopsis thaliana]
  misc_feature (149)..(318): NCBI GI NO: 34908512 NR Description: P0679C12.26
  misc_feature (44)..(140): NCBI GI NO: 34908512 NR Description: P0679C12.26
  misc_feature (48)..(318): NCBI GI NO: 7486010 NR Description: hypothetical protein F22O6
  misc_feature (48)..(247): NCBI GI NO: 15642097 NR Description: esterase/lipase YbfF, putative [Vibrio cholerae]
  misc_feature (48)..(209): NCBI GI NO: 28897611 NR Description: putative esterase/lipase YbfF
  misc_feature (50)..(237): NCBI GI NO: 27363654 NR Description: Predicted hydrolase or acyltransferase
MALVGETVGVGQKGQVAGSSSILAYDLIQGALVRWSSVMDRSLPEPPTAVFLHGILGCRKNWGTFARRLAQEFPTWQFLLVDLRCHGDSASIQKKDPHTVASAAMDVLKLVRDLRITPRVLVGHSFGGKVVLSMVDQAAKPLARPVRAWILDATPGKVRAGGDGEDHPEELISFLSTLPKEVPSKRHVVRALIQHGFSNDVAQWVVTNLRPSGSPGSQSSSFSWVFDLRGIAEMYQSYEETNLWKIVEDVPRGVHVNFLKAERSLHRWALEDLQRIHAAEELAVEEGGGVEMHVLEDAGHWVHTDNPDGLFRILSSSFQFQGGKT

SEQ ID NO: 8366 - DNA, 585 bp, Glycine max
  misc_feature (1)..(585): Ceres Seq. ID no. 13594248
caccaccacggtgcaagttgaagacgaaccacaatctgggaaaaggcaagacaaaaaaagtgcgcagggttaaggttgtggtttatagtttagtttatctatggctagcggcaccacaagaatgctagtgaaggagatgttgcaactctcttcttccacacttcacttctcttcttcggcgcttcgcggcctctctcctcctctgcccttctcaattcaattgcgacgctcgcgggggcgccctgcaattcgatgtgcttcctcttcctcagactcagatgcttccaacaaagtctcgtctcgtctgtcgcaggttcagcatcttcttcagcaggccgaacaccgcgctctctccgccgaccagggcccacctcctaaaatcaccttagatcatgttacggtgagctttgccagaagtggaggacctgggggtcagaatgtcaataaagtgaacaccaaggtggacatgcgcttcaatgttaaaaatgcatattggttgagtgacaggatcagagacaagattttgcaaacggagaaaaaccgtattaactgtttaaacacaataaagttggaacgggagggggg

SEQ ID NO: 8367 - protein, 161 aa, Glycine max
  peptide (1)..(161): Ceres Seq. ID no. 13594249
  misc_feature (6)..(150): NCBI GI NO: 27754314 NR Description: unknown protein [Arabidopsis thaliana]
  misc_feature (97)..(150): NCBI GI NO: 6630453 NR Description: F23N19.20 [Arabidopsis thaliana]
  misc_feature (94)..(160): NCBI GI NO: 4557657 NR Description: immature colon carcinoma transcript 1
  misc_feature (94)..(160): NCBI GI NO: 30585121 NR Description: Homo sapiens immature colon carcinoma transcript 1
  misc_feature (77)..(160): NCBI GI NO: 19387848 NR Description: immature colon carcinoma transcript 1
  misc_feature (94)..(160): NCBI GI NO: 27690532 NR Description: similar to immature colon carcinoma transcript 1
  misc_feature (94)..(160): NCBI GI NO: 12833859 NR Description: unnamed protein product [Mus musculus]
  misc_feature (94)..(160): NCBI GI NO: 20306641 NR Description: Ict1 protein [Mus musculus]
  misc_feature (94)..(149): NCBI GI NO: 19921098 NR Description: CG6094-PA [Drosophila melanogaster]
  misc_feature (123)..(150): NCBI GI NO: 15221608 NR Description: expressed protein [Arabidopsis thaliana]
MASGTTRMLVKEMLQLSSSTLHFSSSALRGLSPPLPFSIQLRRSRGRPAIRCASSSSDSDASNKVSSRLSQVQHLLQQAEHRALSADQGPPPKITLDHVTVSFARSGGPGGQNVNKVNTKVDMRFNVKNAYWLSDRIRDKILQTEKNRINCLNTIKLEREG

SEQ ID NO: 8368 - protein, 154 aa, Glycine max
  peptide (1)..(154): Ceres Seq. ID no. 13594250
  misc_feature (1)..(143): NCBI GI NO: 27754314 NR Description: unknown protein [Arabidopsis thaliana]
  misc_feature (90)..(143): NCBI GI NO: 6630453 NR Description: F23N19.20 [Arabidopsis thaliana]
  misc_feature (87)..(153): NCBI GI NO: 4557657 NR Description: immature colon carcinoma transcript 1
  misc_feature (87)..(153): NCBI GI NO: 30585121 NR Description: Homo sapiens immature colon carcinoma transcript 1
  misc_feature (70)..(153): NCBI GI NO: 19387848 NR Description: immature colon carcinoma transcript 1
  misc_feature (87)..(153): NCBI GI NO: 27690532 NR Description: similar to immature colon carcinoma transcript 1
  misc_feature (87)..(153): NCBI GI NO: 12833859 NR Description: unnamed protein product [Mus musculus]
  misc_feature (87)..(153): NCBI GI NO: 20306641 NR Description: Ict1 protein [Mus musculus]
  misc_feature (87)..(142): NCBI GI NO: 19921098 NR Description: CG6094-PA [Drosophila melanogaster]
  misc_feature (116)..(143): NCBI GI NO: 15221608 NR Description: expressed protein [Arabidopsis thaliana]
MLVKEMLQLSSSTLHFSSSALRGLSPPLPFSIQLRRSRGRPAIRCASSSSDSDASNKVSSRLSQVQHLLQQAEHRALSADQGPPPKITLDHVTVSFARSGGPGGQNVNKVNTKVDMRFNVKNAYWLSDRIRDKILQTEKNRINCLNTIKLEREG

SEQ ID NO: 8369 - protein, 149 aa, Glycine max
  peptide (1)..(149): Ceres Seq. ID no. 13594251
  misc_feature (1)..(138): NCBI GI NO: 27754314 NR Description: unknown protein [Arabidopsis thaliana]
  misc_feature (85)..(138): NCBI GI NO: 6630453 NR Description: F23N19.20 [Arabidopsis thaliana]
  misc_feature (82)..(148): NCBI GI NO: 4557657 NR Description: immature colon carcinoma transcript 1
  misc_feature (82)..(148): NCBI GI NO: 30585121 NR Description: Homo sapiens immature colon carcinoma transcript 1
  misc_feature (65)..(148): NCBI GI NO: 19387848 NR Description: immature colon carcinoma transcript 1
  misc_feature (82)..(148): NCBI GI NO: 27690532 NR Description: similar to immature colon carcinoma transcript 1
  misc_feature (82)..(148): NCBI GI NO: 12833859 NR Description: unnamed protein product [Mus musculus]
  misc_feature (82)..(148): NCBI GI NO: 20306641 NR Description: Ict1 protein [Mus musculus]
  misc_feature (82)..(137): NCBI GI NO: 19921098 NR Description: CG6094-PA [Drosophila melanogaster]
  misc_feature (111)..(138): NCBI GI NO: 15221608 NR Description: expressed protein [Arabidopsis thaliana]
MLQLSSSTLHFSSSALRGLSPPLPFSIQLRRSRGRPAIRCASSSSDSDASNKVSSRLSQVQHLLQQAEHRALSADQGPPPKITLDHVTVSFARSGGPGGQNVNKVNTKVDMRFNVKNAYWLSDRIRDKILQTEKNRINCLNTIKLEREG

SEQ ID NO: 8370 - DNA, 1206 bp, Glycine max
  misc_feature (1)..(1206): Ceres Seq. ID no. 15175898
atatactttttatgttactgttaatttatatttgacttaaatacatgttgattgtaaatccccagacattgtcttcaattcctaccaataaaaaaaaaatagatgttgatatgatttttggaattcaatattatcttactgtgtggttacgcatgtagaccatggcatggatactagatgagtattccaaattccacggttactctcctgcagtagtgactggaaaacctatagatcttggtggatctctcggtagagacgcggctacaggacgaggagtcctctttgcaacagaggctttgcttaatgagtatgggaagagtgtatctggacaacggtttgtcatacagggttttggaaatgtagggtcatgggctgcccaattaattagtaataaaggtggaaaagttgttgctgtgagtgacataactggagccataaagaacagcaatggtcttgacatcccaagcctacttgagcattccaaagtgcacaggggagtaaaaggattcaatggtagtgatccaatagaccctaactcaatattggttgaagattgtgatgttctagtcccagcagctcttgggggtgtcatcaatagggaaaatgcaaatgaaatcaaggccaaatttattgtggaagcagctaatcacccaactgacccagaagctgatgagattttgaagaagaaaggggttgtgatcctcccagacatatttgcaaattcaggaggcgttacagttagctactttgagtgggttcagaacatccaaggtttcatgtgggatgaggagaaagtgaacaatgagctaaagacctacatgaccaaaggtttcaaagatgtgaaggaaatgtgcaaaacccatgaatgtgatcttcgtatgggagccttcaccctggcagttaaccgtgtcgcacgtgctactgtccttaggggctgggaagcttgacatccattgcttctgctttcaataaattaattacagagctcccactctcagcaacacttcacaaagtttttgttgctttcaactaatgtgttgggtgaatcgtattttcacgccaaattttctttcaataaattagtatagtatataaatctttttgtaactacatgtgtggttctatgccacttcttgtgacagccacgctttttaatataatgtcactttgctttgaaaaaaaaaaatttgatttatcaaaggg

SEQ ID NO: 8371 - protein, 262 aa, Glycine max
  peptide (1)..(262): Ceres Seq. ID no. 15175899
  misc_feature (27)..(259): Pfam Name: Pfam Description:  Glutamate/ Leucine/Phenylalanine/Valine dehydrogenase
  misc_feature (1)..(262): NCBI GI NO: 15238762 NR Description: glutamate dehydrogenase (EC 1
  misc_feature (1)..(260): NCBI GI NO: 15228667 NR Description: glutamate dehydrogenase -related
  misc_feature (1)..(262): NCBI GI NO: 20873461 NR Description: glutamate dehydrogenase [Nicotiana tabacum]
  misc_feature (1)..(262): NCBI GI NO: 12643806 NR Description: Glutamate dehydrogenase B (GDH B)
  misc_feature (1)..(262): NCBI GI NO: 7431768 NR Description: glutamate dehydrogenase (EC 1
  misc_feature (1)..(262): NCBI GI NO: 28269441 NR Description: glutamate dehydrogenase
  misc_feature (1)..(262): NCBI GI NO: 4150965 NR Description: glutamate dehydrogenase [Asparagus officinalis]
  misc_feature (1)..(262): NCBI GI NO: 21314959 NR Description: NADH-glutamate dehydrogenase
  misc_feature (1)..(262): NCBI GI NO: 12229803 NR Description: Glutamate dehydrogenase (GDH) (Legdh1)
  misc_feature (1)..(262): NCBI GI NO: 7431775 NR Description: glutamate dehydrogenase (EC 1.4.1.2) - maize
MAWILDEYSKFHGYSPAVVTGKPIDLGGSLGRDAATGRGVLFATEALLNEYGKSVSGQRFVIQGFGNVGSWAAQLISNKGGKVVAVSDITGAIKNSNGLDIPSLLEHSKVHRGVKGFNGSDPIDPNSILVEDCDVLVPAALGGVINRENANEIKAKFIVEAANHPTDPEADEILKKKGVVILPDIFANSGGVTVSYFEWVQNIQGFMWDEEKVNNELKTYMTKGFKDVKEMCKTHECDLRMGAFTLAVNRVARATVLRGWEA

SEQ ID NO: 8372 - DNA, 1526 bp, Glycine max
  misc_feature (1)..(1526): Ceres Seq. ID no. 14314382
aaaaaacgcacgaaagattccatccatttgcgacttgggagagagtaccattgctccactccctctccctcttcgccggcggccaccatgtctttgtcggagttccgaccactcgacgacaagttcctcatcgaatacataaagtccgtccccgccctctcctccaaactcgccgacaacttcgacgacttatctgtcaaagaagtcggagatggcaaccttaacttcgtcttcattgtttccaaccccgcaggttcttttgtcatcaaacaggctctgccatacgttcgttgcataggggaatcgtggcctatgacgaaggagagagcgtattttgagtcactggcactgaaagaagagggtcgtttgagccccgaacatgttcctgaagtatatcactttgaccgtaccatgtctttgattggtatgcgttacttggagcctccacatataatcctcagaaaagggttgattgctgggattgagtaccctcttttggctcaacacatggctgatttcatggcaaagacactcttcttcacgtctctgcttttccgttccacatctgaccacaaacgagacgttgccgaattttgtgggaatgtggagttatgcaggctcactgagcaggttgttttctccgacccttataaagtttctcaatataatcgttggacttccccctatctcgatcgtgatgctgaggcagttcgggaagacaatccgctgaagcttgaagttgctgagctgaaatctaagttcattgagagggcccaggcactaatacatggagatctacacactggttctgtgatggttacccgtgaatcaactcaagttattgatccagaatttgcattttatggaccaatgggttttgatattggagcattcttgggaaacttgattttggctttctttgctcaagatgggcatgctgatcaagcaaatgatcgaaaagcctataaggagtggattcttaagacaatcgaagacagttggaatcttttctatcaaaaattcacttcactttgggatgagcacaaaaatggtgctggtgaagcatatcttccaacaatctataacaatcctgaggttcaactgcttgtacagaagaaatacatgacagatttgtttcacgacagtcttggatttggtgctgctaaaattattaggagaattgttggtgtggcacatgttgaggatttcgaatccattactgatgctgctaaacgggcaagttgtgaacggcgggcacttgatttagctaagatgcttctcaaagaaagaagaaaatttgaaggcattgctgaaattatttcagcaattcggcaatactagccataacaaggttttgctatatcaatagttcaatacctccgtaatgtatcgtgttccccaacattttaactgagttgctctagtaacagttttgatcactttctaattatattatccatactgataacatttctcttgtggaccatcttaaaatttatatccaccgtgatttttgaatgattttt

SEQ ID NO: 8373 - protein, 446 aa, Glycine max
  peptide (1)..(446): Ceres Seq. ID no. 14314383
  misc_feature (30)..(445): NCBI GI NO: 18402794 NR Description: expressed protein [Arabidopsis thaliana]
  misc_feature (35)..(446): NCBI GI NO: 32488394 NR Description: OSJNBa0043A12.24
  misc_feature (24)..(446): NCBI GI NO: 32488395 NR Description: OSJNBa0043A12.25
  misc_feature (34)..(445): NCBI GI NO: 27380009 NR Description: bll4898 [Bradyrhizobium japonicum]
  misc_feature (35)..(439): NCBI GI NO: 13476069 NR Description: hypothetical protein [Mesorhizobium loti]
  misc_feature (30)..(439): NCBI GI NO: 16265283 NR Description: conserved hypothetical protein
  misc_feature (59)..(446): NCBI GI NO: 18921366 NR Description: 5-methylthioribose kinase [Klebsiella pneumoniae]
  misc_feature (68)..(345): NCBI GI NO: 21402086 NR Description: Choline_kinase, Choline/ethanolamine kinase
  misc_feature (330)..(432): NCBI GI NO: 21402086 NR Description: Choline_kinase, Choline/ethanolamine kinase
  misc_feature (68)..(345): NCBI GI NO: 30022120 NR Description: 5-methylthioribose kinase
KKRTKDSIHLRLGREYHCSTPSPSSPAATMSLSEFRPLDDKFLIEYIKSVPALSSKLADNFDDLSVKEVGDGNLNFVFIVSNPAGSFVIKQALPYVRCIGESWPMTKERAYFESLALKEEGRLSPEHVPEVYHFDRTMSLIGMRYLEPPHIILRKGLIAGIEYPLLAQHMADFMAKTLFFTSLLFRSTSDHKRDVAEFCGNVELCRLTEQVVFSDPYKVSQYNRWTSPYLDRDAEAVREDNPLKLEVAELKSKFIERAQALIHGDLHTGSVMVTRESTQVIDPEFAFYGPMGFDIGAFLGNLILAFFAQDGHADQANDRKAYKEWILKTIEDSWNLFYQKFTSLWDEHKNGAGEAYLPTIYNNPEVQLLVQKKYMTDLFHDSLGFGAAKIIRRIVGVAHVEDFESITDAAKRASCERRALDLAKMLLKERRKFEGIAEIISAIRQY

SEQ ID NO: 8374 - protein, 417 aa, Glycine max
  peptide (1)..(417): Ceres Seq. ID no. 14314384
  misc_feature (1)..(416): NCBI GI NO: 18402794 NR Description: expressed protein [Arabidopsis thaliana]
  misc_feature (6)..(417): NCBI GI NO: 32488394 NR Description: OSJNBa0043A12.24
  misc_feature (1)..(417): NCBI GI NO: 32488395 NR Description: OSJNBa0043A12.25
  misc_feature (5)..(416): NCBI GI NO: 27380009 NR Description: bll4898 [Bradyrhizobium japonicum]
  misc_feature (6)..(410): NCBI GI NO: 13476069 NR Description: hypothetical protein [Mesorhizobium loti]
  misc_feature (1)..(410): NCBI GI NO: 16265283 NR Description: conserved hypothetical protein
  misc_feature (30)..(417): NCBI GI NO: 18921366 NR Description: 5-methylthioribose kinase [Klebsiella pneumoniae]
  misc_feature (39)..(316): NCBI GI NO: 21402086 NR Description: Choline_kinase, Choline/ethanolamine kinase
  misc_feature (301)..(403): NCBI GI NO: 21402086 NR Description: Choline_kinase, Choline/ethanolamine kinase
  misc_feature (39)..(316): NCBI GI NO: 30022120 NR Description: 5-methylthioribose kinase
MSLSEFRPLDDKFLIEYIKSVPALSSKLADNFDDLSVKEVGDGNLNFVFIVSNPAGSFVIKQALPYVRCIGESWPMTKERAYFESLALKEEGRLSPEHVPEVYHFDRTMSLIGMRYLEPPHIILRKGLIAGIEYPLLAQHMADFMAKTLFFTSLLFRSTSDHKRDVAEFCGNVELCRLTEQVVFSDPYKVSQYNRWTSPYLDRDAEAVREDNPLKLEVAELKSKFIERAQALIHGDLHTGSVMVTRESTQVIDPEFAFYGPMGFDIGAFLGNLILAFFAQDGHADQANDRKAYKEWILKTIEDSWNLFYQKFTSLWDEHKNGAGEAYLPTIYNNPEVQLLVQKKYMTDLFHDSLGFGAAKIIRRIVGVAHVEDFESITDAAKRASCERRALDLAKMLLKERRKFEGIAEIISAIRQY

SEQ ID NO: 8375 - protein, 342 aa, Glycine max
  peptide (1)..(342): Ceres Seq. ID no. 14314385
  misc_feature (1)..(341): NCBI GI NO: 18402794 NR Description: expressed protein [Arabidopsis thaliana]
  misc_feature (1)..(342): NCBI GI NO: 32488394 NR Description: OSJNBa0043A12.24
  misc_feature (1)..(342): NCBI GI NO: 32488395 NR Description: OSJNBa0043A12.25
  misc_feature (1)..(341): NCBI GI NO: 27380009 NR Description: bll4898 [Bradyrhizobium japonicum]
  misc_feature (1)..(335): NCBI GI NO: 13476069 NR Description: hypothetical protein [Mesorhizobium loti]
  misc_feature (1)..(335): NCBI GI NO: 16265283 NR Description: conserved hypothetical protein
  misc_feature (1)..(342): NCBI GI NO: 18921366 NR Description: 5-methylthioribose kinase [Klebsiella pneumoniae]
  misc_feature (1)..(241): NCBI GI NO: 21402086 NR Description: Choline_kinase, Choline/ethanolamine kinase
  misc_feature (226)..(328): NCBI GI NO: 21402086 NR Description: Choline_kinase, Choline/ethanolamine kinase
  misc_feature (1)..(241): NCBI GI NO: 30022120 NR Description: 5-methylthioribose kinase
MTKERAYFESLALKEEGRLSPEHVPEVYHFDRTMSLIGMRYLEPPHIILRKGLIAGIEYPLLAQHMADFMAKTLFFTSLLFRSTSDHKRDVAEFCGNVELCRLTEQVVFSDPYKVSQYNRWTSPYLDRDAEAVREDNPLKLEVAELKSKFIERAQALIHGDLHTGSVMVTRESTQVIDPEFAFYGPMGFDIGAFLGNLILAFFAQDGHADQANDRKAYKEWILKTIEDSWNLFYQKFTSLWDEHKNGAGEAYLPTIYNNPEVQLLVQKKYMTDLFHDSLGFGAAKIIRRIVGVAHVEDFESITDAAKRASCERRALDLAKMLLKERRKFEGIAEIISAIRQY

SEQ ID NO: 8376 - DNA, 970 bp, Glycine max
  misc_feature (1)..(970): Ceres Seq. ID no. 12608154
agaacatcctaatcgaaaaaattctcaaagcaatgcaacaaaaaatgttgaactccacacccacctgcttccaccgcaccaccactctcactccctctccttctcttctatccactcctcttccttcttgttcttcttcttccacccatcatcattcatatctacacccccgccactcctccttccacactcaacctcttcgcttaagcaacctccgctaccacacccatttgccatcaacccccaagacactcaaagtgaactgttccaccagcgagcctctgaaggtcatgatatcaggtgcacctgcatcgggcaaaggcacgcaatgtgaattgattgtccaaaagtttggattggtgcatatatcaacaggggatttgctaagagcagaggtagcggctgggactgaaattggaaataaagcaaaggagttcatgaacacgggtcaattggttcctgatgaaattgtgacagcgatggtggcagcacgattggctcgcgaagatgttaggcataaagggtggcttcttgatgggtaccctcggagttttggccaagcccagagtctggagaaaatgcagatacggcctgatgtgtatatcgtattagatgttcctgatgaaattctgatcgacagatgtgttggtagaaggctagacccagtgacagggaagatatatcatctaaagttttttccaccggatacagaagaaattaaagcaaggctgataactcggcctgatgacactgaggagaagttatttgaaaggatggactcatcatgaaatgatctcctaaagtcttgtctccgtggatgcgcagtagattttgttgcatgacaagtttgatcacaaaattaatgagaatttaaagatcttagttgtcaaagttttagactgtattttcagcagaatcattaaagacgctttatcagttagcataatgcattattaggatggtgtcattt

SEQ ID NO: 8377 - protein, 261 aa, Glycine max
  peptide (1)..(261): Ceres Seq. ID no. 12608155
  misc_feature (98)..(216): Pfam Name: Pfam Description:  Adenylate kinase
  misc_feature (24)..(258): NCBI GI NO: 22327339 NR Description: adenylate kinase -like protein
  misc_feature (97)..(258): NCBI GI NO: 10176815 NR Description: adenylate kinase-like [Arabidopsis thaliana]
  misc_feature (56)..(253): NCBI GI NO: 15238822 NR Description: putative protein; protein id: At5g47840
  misc_feature (91)..(260): NCBI GI NO: 1170606 NR Description: ADENYLATE KINASE, CHLOROPLAST
  misc_feature (93)..(258): NCBI GI NO: 37727511 NR Description: adenylate kinase [Trypanosoma cruzi]
  misc_feature (146)..(260): NCBI GI NO: 38175634 NR Description: putative Adenylate kinase, chloroplast
  misc_feature (75)..(260): NCBI GI NO: 7687936 NR Description: possible adenylate kinase [Leishmania major]
  misc_feature (94)..(258): NCBI GI NO: 1773156 NR Description: adenylate kinase [Escherichia coli]
  misc_feature (94)..(258): NCBI GI NO: 10121071 NR Description: Chain A, Mutant G10v Of Adenylate Kinase From E
  misc_feature (94)..(258): NCBI GI NO: 24111857 NR Description: adenylate kinase [Shigella flexneri 2a str. 301]
NILIEKILKAMQQKMLNSTPTCFHRTTTLTPSPSLLSTPLPSCSSSSTHHHSYLHPRHSSFHTQPLRLSNLRYHTHLPSTPKTLKVNCSTSEPLKVMISGAPASGKGTQCELIVQKFGLVHISTGDLLRAEVAAGTEIGNKAKEFMNTGQLVPDEIVTAMVAARLAREDVRHKGWLLDGYPRSFGQAQSLEKMQIRPDVYIVLDVPDEILIDRCVGRRLDPVTGKIYHLKFFPPDTEEIKARLITRPDDTEEKLFERMDSS

SEQ ID NO: 8378 - protein, 251 aa, Glycine max
  peptide (1)..(251): Ceres Seq. ID no. 12608156
  misc_feature (88)..(206): Pfam Name: Pfam Description:  Adenylate kinase
  misc_feature (14)..(248): NCBI GI NO: 22327339 NR Description: adenylate kinase -like protein
  misc_feature (87)..(248): NCBI GI NO: 10176815 NR Description: adenylate kinase-like [Arabidopsis thaliana]
  misc_feature (46)..(243): NCBI GI NO: 15238822 NR Description: putative protein; protein id: At5g47840
  misc_feature (81)..(250): NCBI GI NO: 1170606 NR Description: ADENYLATE KINASE, CHLOROPLAST
  misc_feature (83)..(248): NCBI GI NO: 37727511 NR Description: adenylate kinase [Trypanosoma cruzi]
  misc_feature (136)..(250): NCBI GI NO: 38175634 NR Description: putative Adenylate kinase, chloroplast
  misc_feature (65)..(250): NCBI GI NO: 7687936 NR Description: possible adenylate kinase [Leishmania major]
  misc_feature (84)..(248): NCBI GI NO: 1773156 NR Description: adenylate kinase [Escherichia coli]
  misc_feature (84)..(248): NCBI GI NO: 15800203 NR Description: adenylate kinase activity
  misc_feature (84)..(248): NCBI GI NO: 10121071 NR Description: Chain A, Mutant G10v Of Adenylate Kinase From E
MQQKMLNSTPTCFHRTTTLTPSPSLLSTPLPSCSSSSTHHHSYLHPRHSSFHTQPLRLSNLRYHTHLPSTPKTLKVNCSTSEPLKVMISGAPASGKGTQCELIVQKFGLVHISTGDLLRAEVAAGTEIGNKAKEFMNTGQLVPDEIVTAMVAARLAREDVRHKGWLLDGYPRSFGQAQSLEKMQIRPDVYIVLDVPDEILIDRCVGRRLDPVTGKIYHLKFFPPDTEEIKARLITRPDDTEEKLFERMDSS

SEQ ID NO: 8379 - protein, 247 aa, Glycine max
  peptide (1)..(247): Ceres Seq. ID no. 12608157
  misc_feature (84)..(202): Pfam Name: Pfam Description:  Adenylate kinase
  misc_feature (10)..(244): NCBI GI NO: 22327339 NR Description: adenylate kinase -like protein
  misc_feature (83)..(244): NCBI GI NO: 10176815 NR Description: adenylate kinase-like [Arabidopsis thaliana]
  misc_feature (42)..(239): NCBI GI NO: 15238822 NR Description: putative protein; protein id: At5g47840
  misc_feature (77)..(246): NCBI GI NO: 1170606 NR Description: ADENYLATE KINASE, CHLOROPLAST
  misc_feature (79)..(244): NCBI GI NO: 37727511 NR Description: adenylate kinase [Trypanosoma cruzi]
  misc_feature (132)..(246): NCBI GI NO: 38175634 NR Description: putative Adenylate kinase, chloroplast
  misc_feature (61)..(246): NCBI GI NO: 7687936 NR Description: possible adenylate kinase [Leishmania major]
  misc_feature (80)..(244): NCBI GI NO: 1773156 NR Description: adenylate kinase [Escherichia coli]
  misc_feature (80)..(244): NCBI GI NO: 10121071 NR Description: Chain A, Mutant G10v Of Adenylate Kinase From E
  misc_feature (80)..(244): NCBI GI NO: 26246489 NR Description: Adenylate kinase [Escherichia coli CFT073]
MLNSTPTCFHRTTTLTPSPSLLSTPLPSCSSSSTHHHSYLHPRHSSFHTQPLRLSNLRYHTHLPSTPKTLKVNCSTSEPLKVMISGAPASGKGTQCELIVQKFGLVHISTGDLLRAEVAAGTEIGNKAKEFMNTGQLVPDEIVTAMVAARLAREDVRHKGWLLDGYPRSFGQAQSLEKMQIRPDVYIVLDVPDEILIDRCVGRRLDPVTGKIYHLKFFPPDTEEIKARLITRPDDTEEKLFERMDSS

SEQ ID NO: 8380 - DNA, 1317 bp, Glycine max
  misc_feature (1)..(1317): Ceres Seq. ID no. 14314327
attatgttaggaagacgcccctttatccatttggccggacaccacacaccgaagctattcagctattgtctattgcattgccattttcaagtaatggcgctactacgtcttgtttgcttaccttcaacaaatcaattatccactcaaccccattcccattcccaatccacctctttctcttttcttcgcaaaacgccccattctcaacccatcaatttcagtctctcttcctttcactttccacgcctatcccttatcacaaccaaacaaacccttaacctcactcccacacattcctccacttccgaacaacaaaccgaggagcctcttgtctctgaagaagaattttctcgcaccaggttgctcgctcagaactgccctggacaagcacccctgaagacattcgcaccctcttcgaaaaacatgggaaagtcctcgaagtcgagctttctatgtataagaaaaacagaaaccggggtttggcctttgtcgaaatgggttccccagaagaggcactggaagctctcaataatctcgaatcgtatgagtttgagggtcgtgtaattaaagtcaattatgctcggccaaaaaaggagaaaacagcgccgccccctgtgaaaccaaaggtggtgacgtttaacttgtttgttgctaacttatcctatgaagcaagctccaaagatcttaaggagttttttgatttgggaactggtagagttgtctctgctgaggttgtgtatcgtgataatcctagaaggccgtctggatatggatttgtgtccttcaagtctaagaaagaagctgaggctgctcttgctgagttccaaggaaaggtttttatgggaaggccaatcagggtggatcggggtcggcgttttgttcaacaaccaggggacgggagtgcaaagtctgaagatactccttctgagttgagtgtgaatggggcagaagctccacaaccagcagaggggagtgcaaagtctgaagatactccttctgagttgagtgtgaatggggaagaagctgacaaagctgattgatatcagtttttccctgatgcatatcgatattattgatgttgtatgtccttgcttcagacattttgaaagtttgctcattcttgcagataatccgaaatctttgattggtttagattatgtgttttactggtggttttcacccttatataccagaggcccttgagatacaaggagcggataggtgtaagcacaagcacttccgtgattcaagaatccatttatcttcattgcataatttaacaattgttggcaagctactatatcttaagaaagcgat

SEQ ID NO: 8381 - protein, 195 aa, Glycine max
  peptide (1)..(195): Ceres Seq. ID no. 14314328
  misc_feature (64)..(136): Pfam Name: a.k.a. RRM, RBD, or RNP domain Pfam Description: RNA recognition motif.
  misc_feature (1)..(168): NCBI GI NO: 22328520 NR Description: RNA recognition motif (RRM)-containing protein
  misc_feature (9)..(168): NCBI GI NO: 25407472 NR Description: hypothetical protein AT4g09040
  misc_feature (1)..(159): NCBI GI NO: 15226983 NR Description: 33 kDa ribonucleoprotein, chloroplast
  misc_feature (1)..(176): NCBI GI NO: 38346724 NR Description: OSJNBa0086O06.22
  misc_feature (1)..(137): NCBI GI NO: 7446358 NR Description: cp31AHv protein - barley
  misc_feature (1)..(137): NCBI GI NO: 7446356 NR Description: Ps16 protein - wheat
  misc_feature (1)..(137): NCBI GI NO: 7446359 NR Description: nucleic acid-binding protein - barley
  misc_feature (1)..(137): NCBI GI NO: 133246 NR Description: 28 kDa ribonucleoprotein, chloroplast precursor
  misc_feature (1)..(141): NCBI GI NO: 7446357 NR Description: RNA-binding protein - garden pea
  misc_feature (1)..(141): NCBI GI NO: 7446361 NR Description: RNA-binding protein - fava bean (fragment)
MYKKNRNRGLAFVEMGSPEEALEALNNLESYEFEGRVIKVNYARPKKEKTAPPPVKPKVVTFNLFVANLSYEASSKDLKEFFDLGTGRVVSAEVVYRDNPRRPSGYGFVSFKSKKEAEAALAEFQGKVFMGRPIRVDRGRRFVQQPGDGSAKSEDTPSELSVNGAEAPQPAEGSAKSEDTPSELSVNGEEADKAD

SEQ ID NO: 8382 - protein, 187 aa, Glycine max
  peptide (1)..(187): Ceres Seq. ID no. 14314329
IMLGRRPFIHLAGHHTPKLFSYCLLHCHFQVMALLRLVCLPSTNQLSTQPHSHSQSTSFSFLRKTPHSQPINFSLSSFHFPRLSLITTKQTLNLTPTHSSTSEQQTEEPLVSEEEFSRTRLLAQNCPGQAPLKTFAPSSKNMGKSSKSSFLCIRKTETGVWPLSKWVPQKRHWKLSIISNRMSLRVV

SEQ ID NO: 8383 - protein, 186 aa, Glycine max
  peptide (1)..(186): Ceres Seq. ID no. 14314330
MLGRRPFIHLAGHHTPKLFSYCLLHCHFQVMALLRLVCLPSTNQLSTQPHSHSQSTSFSFLRKTPHSQPINFSLSSFHFPRLSLITTKQTLNLTPTHSSTSEQQTEEPLVSEEEFSRTRLLAQNCPGQAPLKTFAPSSKNMGKSSKSSFLCIRKTETGVWPLSKWVPQKRHWKLSIISNRMSLRVV

SEQ ID NO: 8384 - DNA, 951 bp, Glycine max
  misc_feature (1)..(951): Ceres Seq. ID no. 14306006
agtgaaggaaaactctctctctctcaaaaagagaatcttcaaaatgtcaatcacaacaggaatatgtcaagtagttgctgtttcattgcttttgggattactgagtgtgtattccttggaatgtgatgatgatcgctgcaaaactgggctgtgcaacaacactggtgcctgcatttgcaacctccctgatccttccaccatcttgaatggtgatagaactttcttcggggggaagttttgtgacgaagaaatgaccatgtgtgatgggacaaactccttctggtgtgaacatggggcaacttgtgaggagattgttcaaggagagaagtactcttgcaaatgtcccctaggatttgctggggagcattgtgagcattctggagcaccctgtggtcatactttttgtttccataatgctgaatgcttggctgaaacaggtgatgtttgccagtgcccttctgaatggaaaggcagtgctgattgctctcttccaaccacaccaacagatttttactcaatttcaactgacacaaaatcatctaaagtcagcagcagcagtgactccaataaggcactggctgtcttggcagtttcttcagtgggaggagctgctgctggtgccatttatggcaagaaactattcaacaagaaaaaaagagaggcaaggttccagcaattatctgaaatgcagactcaagggatattggatgatgatggtgatgaggaggatgaaaaccacaatatggtaccccaaagggtccatggtgatatttcacacaattagtgggcacttccttttccagcatcagaacattttagcactcttagctcaagtagttttttttgtcagttttcataattggcagtagcattttatttggtaagcttgagtagtactaatatttatatgattgtgcttaataaaaagatggcatgcaagcacatttttct

SEQ ID NO: 8385 - protein, 260 aa, Glycine max
  peptide (1)..(260): Ceres Seq. ID no. 14306007
  misc_feature (95)..(123): Pfam Name: Pfam Description:  EGF-like domain
  misc_feature (44)..(258): NCBI GI NO: 18858543 NR Description: deltaB [Danio rerio]
  misc_feature (40)..(158): NCBI GI NO: 1352528 NR Description: Neurogenic locus notch homolog protein 1 precursor
  misc_feature (40)..(158): NCBI GI NO: 31339070 NR Description: transmembrane receptor Notch1 D [Mus musculus]
  misc_feature (40)..(158): NCBI GI NO: 31339069 NR Description: transmembrane receptor Notch1 B [Mus musculus]
  misc_feature (40)..(158): NCBI GI NO: 31339071 NR Description: transmembrane receptor Notch1 [Mus musculus]
  misc_feature (40)..(158): NCBI GI NO: 31543332 NR Description: Notch gene homolog 1; Notch gene homolog 1,
  misc_feature (40)..(158): NCBI GI NO: 112074 NR Description: notch protein homolog - rat
  misc_feature (40)..(158): NCBI GI NO: 6093542 NR Description: Neurogenic locus notch homolog protein 1 precursor
  misc_feature (40)..(158): NCBI GI NO: 338675 NR Description: TAN1
  misc_feature (40)..(158): NCBI GI NO: 107215 NR Description: notch protein homolog TAN-1 precursor - human
VKENSLSLKKRIFKMSITTGICQVVAVSLLLGLLSVYSLECDDDRCKTGLCNNTGACICNLPDPSTILNGDRTFFGGKFCDEEMTMCDGTNSFWCEHGATCEEIVQGEKYSCKCPLGFAGEHCEHSGAPCGHTFCFHNAECLAETGDVCQCPSEWKGSADCSLPTTPTDFYSISTDTKSSKVSSSSDSNKALAVLAVSSVGGAAAGAIYGKKLFNKKKREARFQQLSEMQTQGILDDDGDEEDENHNMVPQRVHGDISHN

SEQ ID NO: 8386 - protein, 246 aa, Glycine max
  peptide (1)..(246): Ceres Seq. ID no. 14306008
  misc_feature (81)..(109): Pfam Name: Pfam Description:  EGF-like domain
  misc_feature (30)..(244): NCBI GI NO: 18858543 NR Description: deltaB [Danio rerio]
  misc_feature (26)..(144): NCBI GI NO: 1352528 NR Description: Neurogenic locus notch homolog protein 1 precursor
  misc_feature (26)..(144): NCBI GI NO: 31339069 NR Description: transmembrane receptor Notch1 B [Mus musculus]
  misc_feature (26)..(144): NCBI GI NO: 31543332 NR Description: Notch gene homolog 1; Notch gene homolog 1,
  misc_feature (26)..(144): NCBI GI NO: 31339071 NR Description: transmembrane receptor Notch1 [Mus musculus]
  misc_feature (26)..(144): NCBI GI NO: 31339070 NR Description: transmembrane receptor Notch1 D [Mus musculus]
  misc_feature (26)..(144): NCBI GI NO: 112074 NR Description: notch protein homolog - rat
  misc_feature (26)..(144): NCBI GI NO: 6093542 NR Description: Neurogenic locus notch homolog protein 1 precursor
  misc_feature (26)..(144): NCBI GI NO: 338675 NR Description: TAN1
  misc_feature (26)..(144): NCBI GI NO: 107215 NR Description: notch protein homolog TAN-1 precursor - human
MSITTGICQVVAVSLLLGLLSVYSLECDDDRCKTGLCNNTGACICNLPDPSTILNGDRTFFGGKFCDEEMTMCDGTNSFWCEHGATCEEIVQGEKYSCKCPLGFAGEHCEHSGAPCGHTFCFHNAECLAETGDVCQCPSEWKGSADCSLPTTPTDFYSISTDTKSSKVSSSSDSNKALAVLAVSSVGGAAAGAIYGKKLFNKKKREARFQQLSEMQTQGILDDDGDEEDENHNMVPQRVHGDISHN

SEQ ID NO: 8387 - protein, 177 aa, Glycine max
  peptide (1)..(177): Ceres Seq. ID no. 14306009
  misc_feature (12)..(40): Pfam Name: Pfam Description:  EGF-like domain
  misc_feature (1)..(175): NCBI GI NO: 18858543 NR Description: deltaB [Danio rerio]
  misc_feature (1)..(75): NCBI GI NO: 1352528 NR Description: Neurogenic locus notch homolog protein 1 precursor
  misc_feature (1)..(75): NCBI GI NO: 31339071 NR Description: transmembrane receptor Notch1 [Mus musculus]
  misc_feature (1)..(75): NCBI GI NO: 31543332 NR Description: Notch gene homolog 1; Notch gene homolog 1,
  misc_feature (1)..(75): NCBI GI NO: 31339070 NR Description: transmembrane receptor Notch1 D [Mus musculus]
  misc_feature (1)..(75): NCBI GI NO: 31339069 NR Description: transmembrane receptor Notch1 B [Mus musculus]
  misc_feature (1)..(75): NCBI GI NO: 112074 NR Description: notch protein homolog - rat
  misc_feature (1)..(75): NCBI GI NO: 6093542 NR Description: Neurogenic locus notch homolog protein 1 precursor
  misc_feature (1)..(75): NCBI GI NO: 338675 NR Description: TAN1
  misc_feature (1)..(75): NCBI GI NO: 107215 NR Description: notch protein homolog TAN-1 precursor - human
MTMCDGTNSFWCEHGATCEEIVQGEKYSCKCPLGFAGEHCEHSGAPCGHTFCFHNAECLAETGDVCQCPSEWKGSADCSLPTTPTDFYSISTDTKSSKVSSSSDSNKALAVLAVSSVGGAAAGAIYGKKLFNKKKREARFQQLSEMQTQGILDDDGDEEDENHNMVPQRVHGDISHN

SEQ ID NO: 8388 - DNA, 887 bp, Glycine max
  misc_feature (1)..(887): Ceres Seq. ID no. 13594244
aattgtgaagaaggataataaaaggcatagatggtctagggcgaggggaggcgacgaagaagaaaatgatggcaacaaccgcgcctgtgcggtggcaaccaccaaacattaggtttaggattgagccgaagagagcgatgagagtgaaagcctttggtaagggaggcagggatatggatagggtttggagtgaggcgtggcgaagtgctaacgatgggtttgagcggttcgtcttcgaagcgaagaagactgcggagcgcatcgaccggcgctattccctttcgcggcgtctctcctccgtggcgagggcggccgcagaccgagcccgcgagattgatcgtgagtttgagattggacaacgttaccgcactttgagcatcgatttccaaagaaactggcccaagtacaggaagcagctcaaggactttctggatagtccgcttggaaagagctttgctacactgctgttcatctggttagcactgtctggttggcttttccggatcctgataatcgcaacatgggtacttccatttgcaggacctcttctaattggaactttggccaacaccttagttattaaggggacttgtccggcttgcaagatgcaatttggtggttacaagaatcaaataatccgatgtacaggctgtggcaacattgtgtggcaacccaaaggtagaaccaactccaaatctaataagtcagaccccgacattattgatgtcgactttgaggagaggtgacactctcccagcccattcattctttacttctacactttgtaaagttaccaacatttttccatgcccaccctctccatctattctgttggacttcatatttctctcatgttttcaatttctttgttctttcccaggcataac

SEQ ID NO: 8389 - protein, 226 aa, Glycine max
  peptide (1)..(226): Ceres Seq. ID no. 13594245
  misc_feature (10)..(226): NCBI GI NO: 18406650 NR Description: expressed protein [Arabidopsis thaliana]
  misc_feature (9)..(226): NCBI GI NO: 37537000 NR Description: unknown protein
  misc_feature (7)..(226): NCBI GI NO: 7486940 NR Description: hypothetical protein At2g44870
MMATTAPVRWQPPNIRFRIEPKRAMRVKAFGKGGRDMDRVWSEAWRSANDGFERFVFEAKKTAERIDRRYSLSRRLSSVARAAADRAREIDREFEIGQRYRTLSIDFQRNWPKYRKQLKDFLDSPLGKSFATLLFIWLALSGWLFRILIIATWVLPFAGPLLIGTLANTLVIKGTCPACKMQFGGYKNQIIRCTGCGNIVWQPKGRTNSKSNKSDPDIIDVDFEER

SEQ ID NO: 8390 - protein, 225 aa, Glycine max
  peptide (1)..(225): Ceres Seq. ID no. 13594246
  misc_feature (9)..(225): NCBI GI NO: 18406650 NR Description: expressed protein [Arabidopsis thaliana]
  misc_feature (8)..(225): NCBI GI NO: 37537000 NR Description: unknown protein
  misc_feature (6)..(225): NCBI GI NO: 7486940 NR Description: hypothetical protein At2g44870
MATTAPVRWQPPNIRFRIEPKRAMRVKAFGKGGRDMDRVWSEAWRSANDGFERFVFEAKKTAERIDRRYSLSRRLSSVARAAADRAREIDREFEIGQRYRTLSIDFQRNWPKYRKQLKDFLDSPLGKSFATLLFIWLALSGWLFRILIIATWVLPFAGPLLIGTLANTLVIKGTCPACKMQFGGYKNQIIRCTGCGNIVWQPKGRTNSKSNKSDPDIIDVDFEER

SEQ ID NO: 8391 - protein, 202 aa, Glycine max
  peptide (1)..(202): Ceres Seq. ID no. 13594247
  misc_feature (1)..(202): NCBI GI NO: 18406650 NR Description: expressed protein [Arabidopsis thaliana]
  misc_feature (1)..(202): NCBI GI NO: 37537000 NR Description: unknown protein
  misc_feature (1)..(202): NCBI GI NO: 7486940 NR Description: hypothetical protein At2g44870
MRVKAFGKGGRDMDRVWSEAWRSANDGFERFVFEAKKTAERIDRRYSLSRRLSSVARAAADRAREIDREFEIGQRYRTLSIDFQRNWPKYRKQLKDFLDSPLGKSFATLLFIWLALSGWLFRILIIATWVLPFAGPLLIGTLANTLVIKGTCPACKMQFGGYKNQIIRCTGCGNIVWQPKGRTNSKSNKSDPDIIDVDFEER

SEQ ID NO: 8392 - DNA, 1084 bp, Glycine max
  misc_feature (1)..(1084): Ceres Seq. ID no. 14314194
ttttcaatttcaatatccgctcaaaccctaacctaactcctctcgtcgtcacaaaaagtcttcttctccgatcgttacgatgttggaactccgtctcgtgcaaggttcccttctgaagaaggttctggaatcgatcaaggagctcgtaaacgacgcgaacttcgactgctcctccaccgggttctccctccaggccatggattccagccacgtcgccctcgttgcgctcctcctccggtccgagggctttgagcactaccgctgcgaccgcaatacctccatgggcatgaacctcaacaacatggccaagatgctcaagtgcgccggcaatgacgacatcataaccatcaaggccgacgacggcagcgacaccgtcactttcatgttcgaaagccctacacaagataagatttctgattttgagatgaagctgatggacattgacagtgagcaccttgggattccagaggcagagtatcatgccattgttaagatgccatcctctgagtttgctaggatctgcaaggatctcagtagtattggtgacactgttgtcatttcaattactaaggagggtgttaagttttccaccaaaggagacattggaactgccaatatagtttgcaggcagaatacttctgtggacaagcctgaagaagctactgtcattgagatgaatgagcctgtgtccttgacatttgctttgcgatatatgaactcttttacaaaggcaacgccattgtccaacacagttaccattagtctgtcaaatgagctgccagttgtagtcgagtataagattgctgagatgggttatgtgcggttctatttggctcccaagatagaagaggatgaagaagatacgaaacctcaagtttaatctacctattagatgttgggttaggatattaggattttaatgccttttgaacttgtttttgttatacatctttgaagatattttaaccttgtgagcaacgaattggcattttgtggatttcttatgtgtattagtttcctgccaccttattttctcctgaatttattgtttattgtttagaacaatgtgaaacaattggtgtgc

SEQ ID NO: 8393 - protein, 266 aa, Glycine max
  peptide (1)..(266): Ceres Seq. ID no. 14314195
  misc_feature (127)..(254): Pfam Name: Pfam Description:  Proliferating cell nuclear antigen
  misc_feature (1)..(265): NCBI GI NO: 3608175 NR Description: proliferating cell nuclear antigen [Pisum sativum]
  misc_feature (1)..(264): NCBI GI NO: 10946427 NR Description: proliferating cell nuclear antigen
  misc_feature (1)..(264): NCBI GI NO: 6225836 NR Description: Proliferating cell nuclear antigen (PCNA)
  misc_feature (1)..(264): NCBI GI NO: 3947727 NR Description: proliferating cell nuclear antigen
  misc_feature (1)..(264): NCBI GI NO: 25005275 NR Description: proliferating cell nuclear antigen
  misc_feature (1)..(264): NCBI GI NO: 4406225 NR Description: proliferating cell nuclear antigen II
  misc_feature (1)..(264): NCBI GI NO: 129692 NR Description: PROLIFERATING CELL NUCLEAR ANTIGEN (PCNA) (CYCLIN)
  misc_feature (1)..(264): NCBI GI NO: 100160 NR Description: proliferating cell nuclear antigen (clone 4
  misc_feature (1)..(261): NCBI GI NO: 129691 NR Description: PROLIFERATING CELL NUCLEAR ANTIGEN (PCNA) (CYCLIN)
  misc_feature (1)..(265): NCBI GI NO: 15227564 NR Description: proliferating cell nuclear antigen, PCNA -related
MLELRLVQGSLLKKVLESIKELVNDANFDCSSTGFSLQAMDSSHVALVALLLRSEGFEHYRCDRNTSMGMNLNNMAKMLKCAGNDDIITIKADDGSDTVTFMFESPTQDKISDFEMKLMDIDSEHLGIPEAEYHAIVKMPSSEFARICKDLSSIGDTVVISITKEGVKFSTKGDIGTANIVCRQNTSVDKPEEATVIEMNEPVSLTFALRYMNSFTKATPLSNTVTISLSNELPVVVEYKIAEMGYVRFYLAPKIEEDEEDTKPQV

SEQ ID NO: 8394 - protein, 227 aa, Glycine max
  peptide (1)..(227): Ceres Seq. ID no. 14314196
  misc_feature (88)..(215): Pfam Name: Pfam Description:  Proliferating cell nuclear antigen
  misc_feature (1)..(226): NCBI GI NO: 3608175 NR Description: proliferating cell nuclear antigen [Pisum sativum]
  misc_feature (1)..(225): NCBI GI NO: 10946427 NR Description: proliferating cell nuclear antigen
  misc_feature (1)..(225): NCBI GI NO: 6225836 NR Description: Proliferating cell nuclear antigen (PCNA)
  misc_feature (1)..(225): NCBI GI NO: 3947727 NR Description: proliferating cell nuclear antigen
  misc_feature (1)..(225): NCBI GI NO: 25005275 NR Description: proliferating cell nuclear antigen
  misc_feature (1)..(225): NCBI GI NO: 4406225 NR Description: proliferating cell nuclear antigen II
  misc_feature (1)..(225): NCBI GI NO: 129692 NR Description: PROLIFERATING CELL NUCLEAR ANTIGEN (PCNA) (CYCLIN)
  misc_feature (1)..(225): NCBI GI NO: 100160 NR Description: proliferating cell nuclear antigen (clone 4
  misc_feature (1)..(222): NCBI GI NO: 129691 NR Description: PROLIFERATING CELL NUCLEAR ANTIGEN (PCNA) (CYCLIN)
  misc_feature (1)..(226): NCBI GI NO: 15227564 NR Description: proliferating cell nuclear antigen, PCNA -related
MDSSHVALVALLLRSEGFEHYRCDRNTSMGMNLNNMAKMLKCAGNDDIITIKADDGSDTVTFMFESPTQDKISDFEMKLMDIDSEHLGIPEAEYHAIVKMPSSEFARICKDLSSIGDTVVISITKEGVKFSTKGDIGTANIVCRQNTSVDKPEEATVIEMNEPVSLTFALRYMNSFTKATPLSNTVTISLSNELPVVVEYKIAEMGYVRFYLAPKIEEDEEDTKPQV

SEQ ID NO: 8395 - protein, 199 aa, Glycine max
  peptide (1)..(199): Ceres Seq. ID no. 14314197
  misc_feature (60)..(187): Pfam Name: Pfam Description:  Proliferating cell nuclear antigen
  misc_feature (1)..(198): NCBI GI NO: 3608175 NR Description: proliferating cell nuclear antigen [Pisum sativum]
  misc_feature (1)..(197): NCBI GI NO: 10946427 NR Description: proliferating cell nuclear antigen
  misc_feature (1)..(197): NCBI GI NO: 6225836 NR Description: Proliferating cell nuclear antigen (PCNA)
  misc_feature (1)..(197): NCBI GI NO: 3947727 NR Description: proliferating cell nuclear antigen
  misc_feature (1)..(197): NCBI GI NO: 25005275 NR Description: proliferating cell nuclear antigen
  misc_feature (1)..(197): NCBI GI NO: 4406225 NR Description: proliferating cell nuclear antigen II
  misc_feature (1)..(197): NCBI GI NO: 129692 NR Description: PROLIFERATING CELL NUCLEAR ANTIGEN (PCNA) (CYCLIN)
  misc_feature (1)..(197): NCBI GI NO: 100160 NR Description: proliferating cell nuclear antigen (clone 4
  misc_feature (1)..(194): NCBI GI NO: 129691 NR Description: PROLIFERATING CELL NUCLEAR ANTIGEN (PCNA) (CYCLIN)
  misc_feature (1)..(198): NCBI GI NO: 15227564 NR Description: proliferating cell nuclear antigen, PCNA -related
MGMNLNNMAKMLKCAGNDDIITIKADDGSDTVTFMFESPTQDKISDFEMKLMDIDSEHLGIPEAEYHAIVKMPSSEFARICKDLSSIGDTVVISITKEGVKFSTKGDIGTANIVCRQNTSVDKPEEATVIEMNEPVSLTFALRYMNSFTKATPLSNTVTISLSNELPVVVEYKIAEMGYVRFYLAPKIEEDEEDTKPQV

SEQ ID NO: 8396 - DNA, 1380 bp, Glycine max
  misc_feature (1)..(1380): Ceres Seq. ID no. 15168425
acacagttccctcacttctcttccctttgaccattcaaccttcctcgcctttgcctccgtttcaaaattgcgagaggcacttatttggtgaaggtataatcttgattcagaaaatatgctgcgtgactgagatggctggaggtgttattcagcagatattgaggaggaaactccaccctcggtttactaactctcccttgttgtcacccatcgtagcaaaaaaagatgatgctggctctactggcagtcagtccttaagagcacttgcattaattggagctggtttgtcaggtcttttcagtttttcaacaatggcagcagctgatgaagctgaacatggcctggcatgtccaagctatccatggcctcacaagggaattcttagttcatatgatcacgcttcgattcgtcgtggtcatcaagtttatacagaagtctgtgcttcctgccattctatgtctttgatatcgtatcgtgatttggttggtgttgcttatacagaagaagaggtaaaggctatggcagctgagattgaggtggttgatggccctaacgatgagggtgagatgtttacacgccctggtaaactcagtgatcgttttcctcagccatatgcaaatgaagcagctgctaggtttgctaatggaggagcttatcctccagatctaagtcttgttaccaaagcccgtcacaatggtcagaactatgtttttgcccttctgactggttatcgtgacccacctgctggtgtttcgataagagagggacttcattataatccttactttcctggtggagcaattgccatgcctaaaatgcttaatgatggtgctgtggaatatgaagatggtactcctgctacagaagctcagatggggaaggatgttgtgtcattcttaacttgggccgccgaacccgagatggaagagagaaaactgatgggatttaaatggatatttgtactgtcattggcactacttcaggctgcctattaccgccgcttgaggtggtcagttctaaagtctcgcaagctggttcttgatgttgtcaactagctctgcctcgagtttcattttcacttgaacaaagtttactgttggcaataatttgtcagatgattaagttgtttcatcatttcaaattctttcagctaagttaatgtttaatggaacaacaactagaagagtgttataattttgtttgagataaaaaaaaatgttccatgcacgagatgcgtttaatttttctcatcacccatctcggacttgtgtattgttgcattttccgagagctgttcctgtttcataaactattgaattttgtggaacttgtcgttattattcaagaaaaataatagataaatatgctcacgttggaaat

SEQ ID NO: 8397 - protein, 350 aa, Glycine max
  peptide (1)..(350): Ceres Seq. ID no. 15168426
  misc_feature (116)..(340): Pfam Name: Pfam Description:  Cytochrome C1 family
  misc_feature (44)..(350): NCBI GI NO: 15237497 NR Description: cytochrome c1 precursor [Arabidopsis thaliana]
  misc_feature (44)..(350): NCBI GI NO: 21593678 NR Description: cytochrome c, putative [Arabidopsis thaliana]
  misc_feature (44)..(350): NCBI GI NO: 15232125 NR Description: cytochrome c -related [Arabidopsis thaliana]
  misc_feature (44)..(350): NCBI GI NO: 15215624 NR Description: AT5g40810/MHK7_4 [Arabidopsis thaliana]
  misc_feature (44)..(350): NCBI GI NO: 15809956 NR Description: AT3g27240/K17E12_6 [Arabidopsis thaliana]
  misc_feature (75)..(350): NCBI GI NO: 7547401 NR Description: cytochrome c1 precursor [Solanum tuberosum]
  misc_feature (75)..(350): NCBI GI NO: 82263 NR Description: ubiquinol-cytochrome-c reductase (EC 1
  misc_feature (75)..(350): NCBI GI NO: 117765 NR Description: Cytochrome c1
  misc_feature (45)..(350): NCBI GI NO: 34907202 NR Description: putative cytochrome c1 precursor
  misc_feature (52)..(344): NCBI GI NO: 38969870 NR Description: Unknown (protein for MGC:75973)
TVPSLLFPLTIQPSSPLPPFQNCERHLFGEGIILIQKICCVTEMAGGVIQQILRRKLHPRFTNSPLLSPIVAKKDDAGSTGSQSLRALALIGAGLSGLFSFSTMAAADEAEHGLACPSYPWPHKGILSSYDHASIRRGHQVYTEVCASCHSMSLISYRDLVGVAYTEEEVKAMAAEIEVVDGPNDEGEMFTRPGKLSDRFPQPYANEAAARFANGGAYPPDLSLVTKARHNGQNYVFALLTGYRDPPAGVSIREGLHYNPYFPGGAIAMPKMLNDGAVEYEDGTPATEAQMGKDVVSFLTWAAEPEMEERKLMGFKWIFVLSLALLQAAYYRRLRWSVLKSRKLVLDVVN

SEQ ID NO: 8398 - protein, 307 aa, Glycine max
  peptide (1)..(307): Ceres Seq. ID no. 15168427
  misc_feature (73)..(297): Pfam Name: Pfam Description:  Cytochrome C1 family
  misc_feature (1)..(307): NCBI GI NO: 15237497 NR Description: cytochrome c1 precursor [Arabidopsis thaliana]
  misc_feature (1)..(307): NCBI GI NO: 21593678 NR Description: cytochrome c, putative [Arabidopsis thaliana]
  misc_feature (1)..(307): NCBI GI NO: 15232125 NR Description: cytochrome c -related [Arabidopsis thaliana]
  misc_feature (1)..(307): NCBI GI NO: 15215624 NR Description: AT5g40810/MHK7_4 [Arabidopsis thaliana]
  misc_feature (1)..(307): NCBI GI NO: 15809956 NR Description: AT3g27240/K17E12_6 [Arabidopsis thaliana]
  misc_feature (32)..(307): NCBI GI NO: 7547401 NR Description: cytochrome c1 precursor [Solanum tuberosum]
  misc_feature (32)..(307): NCBI GI NO: 82263 NR Description: ubiquinol-cytochrome-c reductase (EC 1
  misc_feature (32)..(307): NCBI GI NO: 117765 NR Description: Cytochrome c1
  misc_feature (2)..(307): NCBI GI NO: 34907202 NR Description: putative cytochrome c1 precursor
  misc_feature (9)..(301): NCBI GI NO: 38969870 NR Description: Unknown (protein for MGC:75973)
MAGGVIQQILRRKLHPRFTNSPLLSPIVAKKDDAGSTGSQSLRALALIGAGLSGLFSFSTMAAADEAEHGLACPSYPWPHKGILSSYDHASIRRGHQVYTEVCASCHSMSLISYRDLVGVAYTEEEVKAMAAEIEVVDGPNDEGEMFTRPGKLSDRFPQPYANEAAARFANGGAYPPDLSLVTKARHNGQNYVFALLTGYRDPPAGVSIREGLHYNPYFPGGAIAMPKMLNDGAVEYEDGTPATEAQMGKDVVSFLTWAAEPEMEERKLMGFKWIFVLSLALLQAAYYRRLRWSVLKSRKLVLDVVN

SEQ ID NO: 8399 - protein, 247 aa, Glycine max
  peptide (1)..(247): Ceres Seq. ID no. 15168428
  misc_feature (13)..(237): Pfam Name: Pfam Description:  Cytochrome C1 family
  misc_feature (1)..(247): NCBI GI NO: 15237497 NR Description: cytochrome c1 precursor [Arabidopsis thaliana]
  misc_feature (1)..(247): NCBI GI NO: 21593678 NR Description: cytochrome c, putative [Arabidopsis thaliana]
  misc_feature (1)..(247): NCBI GI NO: 15232125 NR Description: cytochrome c -related [Arabidopsis thaliana]
  misc_feature (1)..(247): NCBI GI NO: 15215624 NR Description: AT5g40810/MHK7_4 [Arabidopsis thaliana]
  misc_feature (1)..(247): NCBI GI NO: 15809956 NR Description: AT3g27240/K17E12_6 [Arabidopsis thaliana]
  misc_feature (1)..(247): NCBI GI NO: 7547401 NR Description: cytochrome c1 precursor [Solanum tuberosum]
  misc_feature (1)..(247): NCBI GI NO: 82263 NR Description: ubiquinol-cytochrome-c reductase (EC 1
  misc_feature (1)..(247): NCBI GI NO: 117765 NR Description: Cytochrome c1
  misc_feature (1)..(247): NCBI GI NO: 34907202 NR Description: putative cytochrome c1 precursor
  misc_feature (1)..(241): NCBI GI NO: 38969870 NR Description: Unknown (protein for MGC:75973)
MAAADEAEHGLACPSYPWPHKGILSSYDHASIRRGHQVYTEVCASCHSMSLISYRDLVGVAYTEEEVKAMAAEIEVVDGPNDEGEMFTRPGKLSDRFPQPYANEAAARFANGGAYPPDLSLVTKARHNGQNYVFALLTGYRDPPAGVSIREGLHYNPYFPGGAIAMPKMLNDGAVEYEDGTPATEAQMGKDVVSFLTWAAEPEMEERKLMGFKWIFVLSLALLQAAYYRRLRWSVLKSRKLVLDVVN

SEQ ID NO: 8400 - DNA, 1457 bp, Glycine max
  misc_feature (1)..(1457): Ceres Seq. ID no. 14314264
gaatcactctgcactctgcactctgcacaatgctttccctctccgtccctcctctcaacctcaaacccataacacccaatgacctctttctctcatcagcctctccctcacctcaccgtcgctacttcgtgaaacccatctccgccgtcctcaactcatcttccttcaagaaacctgagcagcctctgctgccgcagcatcaagtctaccagcccttccgccctcccccgtctcccctcccctcgcaattcggcaccctcgacatcgccggccgaatcgacatcctcgccaaccgcctcggcctctggtacgagtacgcgcccttaatcaattccctaatccgcgaaggcttctcccctccgacaatcgaagaaaccaccggcatctccggcgtcgagcagaaccgcctcatcgtcggggcgcaggtccgcgactccctcgtccactccaaggccgaccccgacctcctcgctgccttcgagaccggcggcgccgagctcctctacgagatccgtctcctcagcgcctcgcagcgcgtcgccgccgcgcgcttcctcgtcgagaatcgctgcgacgggaaggccgcgcaggagctcgcacgttccatgaaggatttcccgagccggcgcggggataaaggatgggcgaggttcgactacactctccccggggactgtctttcttttatgtattacaggcagagcagggagcataggaacccgtcggagcagaggacttcggcgctggagcaggcgctgcgcgtggcggagacggaggcggccaggaatatgattttggaggagttggaggggaatggtgaagagggggataaggtggatgcaggggagggtgctgtgcgtgttccggtggtgaggctgaggattggggaggtggcggaggcgagttcggtggtggtgttgccggtctccgcggcggaggagagggagattttggaggcgccgtatgagagtaggagccagggggtgtttggtgtggtggtggcggagaagggatggggaaaatgggtggtgttgccttcgtgggacccagtggttggtttaggaaaagggggtgttgtggtatcgtttcccgatgctagggttttgccgtggaaggtgaataggtggtataaggaggagcctatattggtggtggctgacaggagtaaaaaagaggtgggtgccgatgatgggttttatcttgtgaatgctgatggtgagggtttgaaggtcgagaggggttcgggattgaaggaaaagggtttcactcagagtttaggaactgtgttattggttgttagacctcccaaagaagaaaatgatgaattgagtgacgaagactgggagtgaactcaaatcaaagggaagggaatgattgagttgctaaagaatagcgataacaccacattatatatatatatatatggttttctcaattcaagaattgctagttaaccc

SEQ ID NO: 8401 - protein, 448 aa, Glycine max
  peptide (1)..(448): Ceres Seq. ID no. 14314265
  misc_feature (10)..(448): NCBI GI NO: 15241839 NR Description: expressed protein [Arabidopsis thaliana]
  misc_feature (34)..(448): NCBI GI NO: 18396920 NR Description: expressed protein [Arabidopsis thaliana]
  misc_feature (51)..(448): NCBI GI NO: 37534826 NR Description: unknown protein
  misc_feature (74)..(402): NCBI GI NO: 23127437 NR Description: hypothetical protein [Nostoc punctiforme]
  misc_feature (95)..(447): NCBI GI NO: 22299309 NR Description: ORF_ID:tlr1766~hypothetical protein
  misc_feature (74)..(406): NCBI GI NO: 23042669 NR Description: hypothetical protein
  misc_feature (74)..(391): NCBI GI NO: 17232742 NR Description: hypothetical protein [Nostoc sp. PCC 7120]
  misc_feature (87)..(390): NCBI GI NO: 16331838 NR Description: unknown protein [Synechocystis sp. PCC 6803]
  misc_feature (86)..(347): NCBI GI NO: 37521728 NR Description: hypothetical protein glr2159
ITLHSALCTMLSLSVPPLNLKPITPNDLFLSSASPSPHRRYFVKPISAVLNSSSFKKPEQPLLPQHQVYQPFRPPPSPLPSQFGTLDIAGRIDILANRLGLWYEYAPLINSLIREGFSPPTIEETTGISGVEQNRLIVGAQVRDSLVHSKADPDLLAAFETGGAELLYEIRLLSASQRVAAARFLVENRCDGKAAQELARSMKDFPSRRGDKGWARFDYTLPGDCLSFMYYRQSREHRNPSEQRTSALEQALRVAETEAARNMILEELEGNGEEGDKVDAGEGAVRVPVVRLRIGEVAEASSVVVLPVSAAEEREILEAPYESRSQGVFGVVVAEKGWGKWVVLPSWDPVVGLGKGGVVVSFPDARVLPWKVNRWYKEEPILVVADRSKKEVGADDGFYLVNADGEGLKVERGSGLKEKGFTQSLGTVLLVVRPPKEENDELSDEDWE

SEQ ID NO: 8402 - protein, 439 aa, Glycine max
  peptide (1)..(439): Ceres Seq. ID no. 14314266
  misc_feature (1)..(439): NCBI GI NO: 15241839 NR Description: expressed protein [Arabidopsis thaliana]
  misc_feature (25)..(439): NCBI GI NO: 18396920 NR Description: expressed protein [Arabidopsis thaliana]
  misc_feature (42)..(439): NCBI GI NO: 37534826 NR Description: unknown protein
  misc_feature (65)..(393): NCBI GI NO: 23127437 NR Description: hypothetical protein [Nostoc punctiforme]
  misc_feature (86)..(438): NCBI GI NO: 22299309 NR Description: ORF_ID:tlr1766~hypothetical protein
  misc_feature (65)..(397): NCBI GI NO: 23042669 NR Description: hypothetical protein
  misc_feature (65)..(382): NCBI GI NO: 17232742 NR Description: hypothetical protein [Nostoc sp. PCC 7120]
  misc_feature (78)..(381): NCBI GI NO: 16331838 NR Description: unknown protein [Synechocystis sp. PCC 6803]
  misc_feature (77)..(338): NCBI GI NO: 37521728 NR Description: hypothetical protein glr2159
MLSLSVPPLNLKPITPNDLFLSSASPSPHRRYFVKPISAVLNSSSFKKPEQPLLPQHQVYQPFRPPPSPLPSQFGTLDIAGRIDILANRLGLWYEYAPLINSLIREGFSPPTIEETTGISGVEQNRLIVGAQVRDSLVHSKADPDLLAAFETGGAELLYEIRLLSASQRVAAARFLVENRCDGKAAQELARSMKDFPSRRGDKGWARFDYTLPGDCLSFMYYRQSREHRNPSEQRTSALEQALRVAETEAARNMILEELEGNGEEGDKVDAGEGAVRVPVVRLRIGEVAEASSVVVLPVSAAEEREILEAPYESRSQGVFGVVVAEKGWGKWVVLPSWDPVVGLGKGGVVVSFPDARVLPWKVNRWYKEEPILVVADRSKKEVGADDGFYLVNADGEGLKVERGSGLKEKGFTQSLGTVLLVVRPPKEENDELSDEDWE

SEQ ID NO: 8403 - protein, 247 aa, Glycine max
  peptide (1)..(247): Ceres Seq. ID no. 14314267
  misc_feature (1)..(247): NCBI GI NO: 15241839 NR Description: expressed protein [Arabidopsis thaliana]
  misc_feature (1)..(247): NCBI GI NO: 18396920 NR Description: expressed protein [Arabidopsis thaliana]
  misc_feature (1)..(247): NCBI GI NO: 37534826 NR Description: unknown protein
  misc_feature (1)..(201): NCBI GI NO: 23127437 NR Description: hypothetical protein [Nostoc punctiforme]
  misc_feature (1)..(246): NCBI GI NO: 22299309 NR Description: ORF_ID:tlr1766~hypothetical protein
  misc_feature (1)..(205): NCBI GI NO: 23042669 NR Description: hypothetical protein
  misc_feature (1)..(190): NCBI GI NO: 17232742 NR Description: hypothetical protein [Nostoc sp. PCC 7120]
  misc_feature (1)..(189): NCBI GI NO: 16331838 NR Description: unknown protein [Synechocystis sp. PCC 6803]
  misc_feature (1)..(146): NCBI GI NO: 37521728 NR Description: hypothetical protein glr2159
MKDFPSRRGDKGWARFDYTLPGDCLSFMYYRQSREHRNPSEQRTSALEQALRVAETEAARNMILEELEGNGEEGDKVDAGEGAVRVPVVRLRIGEVAEASSVVVLPVSAAEEREILEAPYESRSQGVFGVVVAEKGWGKWVVLPSWDPVVGLGKGGVVVSFPDARVLPWKVNRWYKEEPILVVADRSKKEVGADDGFYLVNADGEGLKVERGSGLKEKGFTQSLGTVLLVVRPPKEENDELSDEDWE

SEQ ID NO: 8404 - DNA, 1103 bp, Glycine max
  misc_feature (1)..(1103): Ceres Seq. ID no. 14306066
attcccacaacacaacacaacgcacaaacacacaaaaaatttctagagcgagaaagtgagaggagagagaaagtagctgatcctccatggcctccaccaaggaacgcgaaaactttgtctacaccgccaagctcgccgaacaagccgaacgctatgaagaaatggtggaagcaatgaagaatgtggcgaagctgaacgtggaattgacggtcgaggagcggaaccttctgtcggtagggtacaagaacgtggtgggtgctcgtagggcttcgtggaggattctatcgtcgattgaacagaaagaagaagctaaagggaacgatgtgagtgtgaagaggataaaggagtataggcagaaggtggagtctgagttgtccaatatctgcagtgatatcatgactgttattgatgaacaccttattccctctagctctgctggtgaacctagtgtctttttctacaaaatgaagggggactattaccggtacctcgcggagttcaagtccggtgatgagagaaaagaggctgctgatcattccatgaaggcgtatcagtcggcttccactactgcagaggctgagttaccacccacacatcccatccgtttgggcctggctttgaacttctctgtcttttattatgaaattttgaactctcctgaaagggcctgtcaccttgctaagcaggcatttgatgaagccatctctgagttggatactctgagcgaggagtcttacaaagacagcaccctaattatgcagcttctgagggacaatctcaccctgtggacttctgacatccctgaagaaggagctgaggaacaaaaggtggattctgccagagctgctggaggtgacaatgcatagtgaagcaggtattggctaggaatttgtggtgtcatacgagaaggctagtctttctcttgataatttaccattaggatgtagtaatagaacatggagttggtctctagaaaatcaccatagggctttgtgagccttttattctatgcgtgtgctttctgttactggatggagactggagttgagatttgtatgttgtttgcctgtgattcagtgaatttcttcattttgacttctttc

SEQ ID NO: 8405 - protein, 259 aa, Glycine max
  peptide (1)..(259): Ceres Seq. ID no. 14306067
  misc_feature (7)..(242): Pfam Name: Pfam Description:  14-3-3 protein
  misc_feature (1)..(259): NCBI GI NO: 3023196 NR Description: 14-3-3-LIKE PROTEIN C (SGF14C)
  misc_feature (1)..(259): NCBI GI NO: 1168192 NR Description: 14-3-3-LIKE PROTEIN B (VFA-1433B)
  misc_feature (1)..(259): NCBI GI NO: 2822483 NR Description: 14-3-3 protein homolog [Maackia amurensis]
  misc_feature (1)..(259): NCBI GI NO: 3023197 NR Description: 14-3-3-LIKE PROTEIN D (SGF14D)
  misc_feature (1)..(259): NCBI GI NO: 11138322 NR Description: vf14-3-3d protein [Vicia faba]
  misc_feature (1)..(259): NCBI GI NO: 6752903 NR Description: 14-3-3-like protein [Euphorbia esula]
  misc_feature (1)..(259): NCBI GI NO: 8515890 NR Description: 14-3-3 protein [Populus x canescens]
  misc_feature (1)..(259): NCBI GI NO: 8099061 NR Description: 14-3-3 protein [Populus x canescens]
  misc_feature (1)..(259): NCBI GI NO: 26454611 NR Description: 14-3-3 protein 9
  misc_feature (1)..(259): NCBI GI NO: 15778154 NR Description: 14-3-3 protein [Nicotiana tabacum]
MASTKERENFVYTAKLAEQAERYEEMVEAMKNVAKLNVELTVEERNLLSVGYKNVVGARRASWRILSSIEQKEEAKGNDVSVKRIKEYRQKVESELSNICSDIMTVIDEHLIPSSSAGEPSVFFYKMKGDYYRYLAEFKSGDERKEAADHSMKAYQSASTTAEAELPPTHPIRLGLALNFSVFYYEILNSPERACHLAKQAFDEAISELDTLSEESYKDSTLIMQLLRDNLTLWTSDIPEEGAEEQKVDSARAAGGDNA

SEQ ID NO: 8406 - protein, 234 aa, Glycine max
  peptide (1)..(234): Ceres Seq. ID no. 14306068
  misc_feature (1)..(217): Pfam Name: Pfam Description:  14-3-3 protein
  misc_feature (1)..(234): NCBI GI NO: 3023196 NR Description: 14-3-3-LIKE PROTEIN C (SGF14C)
  misc_feature (1)..(234): NCBI GI NO: 1168192 NR Description: 14-3-3-LIKE PROTEIN B (VFA-1433B)
  misc_feature (1)..(234): NCBI GI NO: 2822483 NR Description: 14-3-3 protein homolog [Maackia amurensis]
  misc_feature (1)..(234): NCBI GI NO: 3023197 NR Description: 14-3-3-LIKE PROTEIN D (SGF14D)
  misc_feature (1)..(234): NCBI GI NO: 11138322 NR Description: vf14-3-3d protein [Vicia faba]
  misc_feature (1)..(234): NCBI GI NO: 6752903 NR Description: 14-3-3-like protein [Euphorbia esula]
  misc_feature (1)..(234): NCBI GI NO: 8515890 NR Description: 14-3-3 protein [Populus x canescens]
  misc_feature (1)..(234): NCBI GI NO: 8099061 NR Description: 14-3-3 protein [Populus x canescens]
  misc_feature (1)..(234): NCBI GI NO: 26454611 NR Description: 14-3-3 protein 9
  misc_feature (1)..(234): NCBI GI NO: 15778154 NR Description: 14-3-3 protein [Nicotiana tabacum]
MVEAMKNVAKLNVELTVEERNLLSVGYKNVVGARRASWRILSSIEQKEEAKGNDVSVKRIKEYRQKVESELSNICSDIMTVIDEHLIPSSSAGEPSVFFYKMKGDYYRYLAEFKSGDERKEAADHSMKAYQSASTTAEAELPPTHPIRLGLALNFSVFYYEILNSPERACHLAKQAFDEAISELDTLSEESYKDSTLIMQLLRDNLTLWTSDIPEEGAEEQKVDSARAAGGDNA

SEQ ID NO: 8407 - protein, 230 aa, Glycine max
  peptide (1)..(230): Ceres Seq. ID no. 14306069
  misc_feature (1)..(213): Pfam Name: Pfam Description:  14-3-3 protein
  misc_feature (1)..(230): NCBI GI NO: 3023196 NR Description: 14-3-3-LIKE PROTEIN C (SGF14C)
  misc_feature (1)..(230): NCBI GI NO: 1168192 NR Description: 14-3-3-LIKE PROTEIN B (VFA-1433B)
  misc_feature (1)..(230): NCBI GI NO: 2822483 NR Description: 14-3-3 protein homolog [Maackia amurensis]
  misc_feature (1)..(230): NCBI GI NO: 3023197 NR Description: 14-3-3-LIKE PROTEIN D (SGF14D)
  misc_feature (1)..(230): NCBI GI NO: 11138322 NR Description: vf14-3-3d protein [Vicia faba]
  misc_feature (1)..(230): NCBI GI NO: 6752903 NR Description: 14-3-3-like protein [Euphorbia esula]
  misc_feature (1)..(230): NCBI GI NO: 8515890 NR Description: 14-3-3 protein [Populus x canescens]
  misc_feature (1)..(230): NCBI GI NO: 8099061 NR Description: 14-3-3 protein [Populus x canescens]
  misc_feature (1)..(230): NCBI GI NO: 26454611 NR Description: 14-3-3 protein 9
  misc_feature (1)..(230): NCBI GI NO: 15778154 NR Description: 14-3-3 protein [Nicotiana tabacum]
MKNVAKLNVELTVEERNLLSVGYKNVVGARRASWRILSSIEQKEEAKGNDVSVKRIKEYRQKVESELSNICSDIMTVIDEHLIPSSSAGEPSVFFYKMKGDYYRYLAEFKSGDERKEAADHSMKAYQSASTTAEAELPPTHPIRLGLALNFSVFYYEILNSPERACHLAKQAFDEAISELDTLSEESYKDSTLIMQLLRDNLTLWTSDIPEEGAEEQKVDSARAAGGDNA

SEQ ID NO: 8408 - DNA, 1866 bp, Glycine max
  misc_feature (1)..(1866): Ceres Seq. ID no. 14314276
aattctccaccaaccccattctctctttctctctttacataactcaatttctccttgtatcattttcactacacatattacattattccttccaaaatgagcacgcagctgaaaaggttcaactcaatggaacgcaggccaagaatgctgaaggacttcctcagcgagaatctaaactcgtgctcctcaagcggcttcaaatcacttccaagaaaaccaaccaacaacaacagcatgcacagcctcatcgaaatggaactcaaatcttcatcaccctttcaaacactcatgaacaccataagaagcatctctctcttcacctcaaaatcaccctccgtgctttctctaccgaggagcctctcacgcaagctatcatcttcaaggagaaaaacaagaacaagaagaagaaggagccatgtgtgcagcagcgatgtcaacatcacaacggtggtgaagatcaaggacatcatacggtggaagtcattcagggatatcgtggtggaaccttctcttccaccaccaccgttggatttcatggtggggtccaccaacaccacttgtagtagctgtagcagtggctctagttggactgagagtgatttttttttaacctcgtcctgggaagaaccacaaaacgacaacgttgaagcgggtaaaaggttttcatttttttcaccccttgttgtcggcaaggactccggggctacggacacttcaacttgccaagaagaacaacacagtccagtttcagttcttcacgttggagaagatgatttctcaccttttgatcaaagtcttgccaatattctaaggagaaaacagaagttcatacaaacagttcaaaaattggagagtcatgcaaaatttgaccttgcaaacttagaccaatgtctctcattggatgacaactctggctatgatgaagaatatgaagaagaagaagatgatgataatgatgacattgaagaacaagattggattgaggaaaaggcaaagcagctgctacattgtgtcaaagcaagagtttcagcacatggctgtatagactatttggatacacttctgttggattttttcagggaagaactaagtggaagtagaaaccaatacaagaatgaagaggagtttgagttggagacattgagaataactgaggattggataaatgggtcatttgcttttgatgcagggcatgctgacaaacatgcttacataaaggacatggagaggagagatcagtggagtaggttggaggaggatcaagaagaattggcctttgaaattgagacagctatattgcatagtttgattgctgatcttctggacctggatgcttaatacttaatagtttcccttttcaaagttcaaatcaagttttggcaattgcttcttcgcctccataatggcttcgtgtacctttttaagtttatgaaacacctaattcggaatgtaaattacattccagaaagactaattcgaaatgtaattttacattccaggttaggtggaagcaattgcctcaagttctttaagatctctgggcctttagcctcacttttctcaacagaaattatctggccgcacttgaagtccgaatcagaaaagtaggtttcatcctacagcacccatttagattttaggcttaccaaccagaccagaaaaataaggatacctaccaaccaagggcagagggatgcctacttttgtggtaacaaaggacatataggtcagagtttggtgagttttggatactgttatatgaaggggtaatgagatgctagtggacataagtacatgattgggctgtactgtacttaaatttagttatggcttaattagattttggactttggagtgtagcatatt

SEQ ID NO: 8409 - protein, 413 aa, Glycine max
  peptide (1)..(413): Ceres Seq. ID no. 14314277
  misc_feature (11)..(410): NCBI GI NO: 18411440 NR Description: expressed protein [Arabidopsis thaliana]
  misc_feature (17)..(407): NCBI GI NO: 21593216 NR Description: unknown [Arabidopsis thaliana]
  misc_feature (245)..(407): NCBI GI NO: 7485281 NR Description: hypothetical protein A_TM018A10
MSTQLKRFNSMERRPRMLKDFLSENLNSCSSSGFKSLPRKPTNNNSMHSLIEMELKSSSPFQTLMNTIRSISLFTSKSPSVLSLPRSLSRKLSSSRRKTRTRRRRSHVCSSDVNITTVVKIKDIIRWKSFRDIVVEPSLPPPPLDFMVGSTNTTCSSCSSGSSWTESDFFLTSSWEEPQNDNVEAGKRFSFFSPLVVGKDSGATDTSTCQEEQHSPVSVLHVGEDDFSPFDQSLANILRRKQKFIQTVQKLESHAKFDLANLDQCLSLDDNSGYDEEYEEEEDDDNDDIEEQDWIEEKAKQLLHCVKARVSAHGCIDYLDTLLLDFFREELSGSRNQYKNEEEFELETLRITEDWINGSFAFDAGHADKHAYIKDMERRDQWSRLEEDQEELAFEIETAILHSLIADLLDLDA

SEQ ID NO: 8410 - protein, 403 aa, Glycine max
  peptide (1)..(403): Ceres Seq. ID no. 14314278
  misc_feature (1)..(400): NCBI GI NO: 18411440 NR Description: expressed protein [Arabidopsis thaliana]
  misc_feature (7)..(397): NCBI GI NO: 21593216 NR Description: unknown [Arabidopsis thaliana]
  misc_feature (235)..(397): NCBI GI NO: 7485281 NR Description: hypothetical protein A_TM018A10
MERRPRMLKDFLSENLNSCSSSGFKSLPRKPTNNNSMHSLIEMELKSSSPFQTLMNTIRSISLFTSKSPSVLSLPRSLSRKLSSSRRKTRTRRRRSHVCSSDVNITTVVKIKDIIRWKSFRDIVVEPSLPPPPLDFMVGSTNTTCSSCSSGSSWTESDFFLTSSWEEPQNDNVEAGKRFSFFSPLVVGKDSGATDTSTCQEEQHSPVSVLHVGEDDFSPFDQSLANILRRKQKFIQTVQKLESHAKFDLANLDQCLSLDDNSGYDEEYEEEEDDDNDDIEEQDWIEEKAKQLLHCVKARVSAHGCIDYLDTLLLDFFREELSGSRNQYKNEEEFELETLRITEDWINGSFAFDAGHADKHAYIKDMERRDQWSRLEEDQEELAFEIETAILHSLIADLLDLDA

SEQ ID NO: 8411 - protein, 397 aa, Glycine max
  peptide (1)..(397): Ceres Seq. ID no. 14314279
  misc_feature (1)..(394): NCBI GI NO: 18411440 NR Description: expressed protein [Arabidopsis thaliana]
  misc_feature (1)..(391): NCBI GI NO: 21593216 NR Description: unknown [Arabidopsis thaliana]
  misc_feature (229)..(391): NCBI GI NO: 7485281 NR Description: hypothetical protein A_TM018A10
MLKDFLSENLNSCSSSGFKSLPRKPTNNNSMHSLIEMELKSSSPFQTLMNTIRSISLFTSKSPSVLSLPRSLSRKLSSSRRKTRTRRRRSHVCSSDVNITTVVKIKDIIRWKSFRDIVVEPSLPPPPLDFMVGSTNTTCSSCSSGSSWTESDFFLTSSWEEPQNDNVEAGKRFSFFSPLVVGKDSGATDTSTCQEEQHSPVSVLHVGEDDFSPFDQSLANILRRKQKFIQTVQKLESHAKFDLANLDQCLSLDDNSGYDEEYEEEEDDDNDDIEEQDWIEEKAKQLLHCVKARVSAHGCIDYLDTLLLDFFREELSGSRNQYKNEEEFELETLRITEDWINGSFAFDAGHADKHAYIKDMERRDQWSRLEEDQEELAFEIETAILHSLIADLLDLDA

SEQ ID NO: 8412 - DNA, 1486 bp, Glycine max
  misc_feature (1)..(1486): Ceres Seq. ID no. 14314300
gcaattcctctgtctgttccttcaattcttcaaatcccgaaattgtcatttttaatctcgctgcaaattgcgctcacgattctttgctttccttcgaaactctcccaaatcccacttctttctctctcataaataaattcgccacctttgtatttttgcgtaactgctctgcaccttattgattcttctctctctctccattctccaattctccatttcgatctgcagctccccgctttcaaagctctgaaatttccgattcgggatggagaaatacgagctcgtgaaggatataggatctgggaatttcggtgtggccaggctcatgcgacacaaagacaccaaggagcttgttgccatgaaatacattgaacggggtcacaagattgatgagaatgttgcgagggaaatcataaaccatagaagtcttcggcaccccaatattattcggttcaaggaggtggttctgactccaacccatctgggtattgttatggagtatgcggctggtggagagctctttgagaggatttgcagtgctggaagattcagcgaagatgaggctcgatatttcttccagcagctcatctcaggagttagctactgtcattccatgcaaatctgtcatcgagacttgaagctggagaacacattattggatggcagcccagccccacggctcaaaatttgtgattttggctattctaagtcatctctgcttcattctaggcctaagtcaacggtgggaaccccggcctacattgcacctgaggttctttcacgtagagagtatgatggaaagttagcagatgtatggtcctgtggagtgactctttatgtaatgctggtgggagcatacccatttgaagaccaagaggatcccaaaaatttcaggaaaaccatcaatcgaattatggctgttcaatacaagattccagactacgttcacatatctcaagactgtagacatcttctatctcgcatttttgtggcaaatccagctaggagaatcaccattaaggaaatcaagtcccacccatggtttgtaaagaacttgcccagagaattaacagaagtagctcaagctgcctactacagaaaagaaaacccaaccttttctcttcagagtatagaggacatcatgaatattgttgaggaggccaaggctccacctccagcatccaggtcaattggaggatttggctggggaggggaggaagaagaagaggatgaaacaaaagaagcagtggctgagactgaagaagatgagtacgaaaagagagtcaaggaagcacaagcaagtggggaatttcatgtcagttaaaaagtgtttatttttagatagagagcaattgattcttggtttcctttgcacttagctaagttcaactaaggtgagtgtgttttgcttgtatgtataaaattaagttttccgcatgggacatatagtttaataaatggctgtacatttttttaaggttgtgcg

SEQ ID NO: 8413 - protein, 352 aa, Glycine max
  peptide (1)..(352): Ceres Seq. ID no. 14314301
  misc_feature (4)..(260): Pfam Name: Pfam Description:  Protein kinase domain
  misc_feature (1)..(352): NCBI GI NO: 19568098 NR Description: osmotic stress-activated protein kinase
  misc_feature (1)..(352): NCBI GI NO: 38343920 NR Description: serin/threonine protein kinase [Fagus sylvatica]
  misc_feature (1)..(352): NCBI GI NO: 1362051 NR Description: protein kinase SPK-3 (EC 2.7.1.-) - soybean
  misc_feature (1)..(348): NCBI GI NO: 2129803 NR Description: probable serine/threonine-specific protein kinase
  misc_feature (1)..(348): NCBI GI NO: 7434329 NR Description: protein kinase PK1 (EC 2
  misc_feature (1)..(352): NCBI GI NO: 1362026 NR Description: probable serine/threonine-specific protein kinase
  misc_feature (1)..(352): NCBI GI NO: 15220251 NR Description: serine/threonine protein kinase, putative
  misc_feature (1)..(352): NCBI GI NO: 1161254 NR Description: protein kinase [Glycine max]
  misc_feature (1)..(352): NCBI GI NO: 21618062 NR Description: putative serine/threonine-protein kinase
  misc_feature (1)..(352): NCBI GI NO: 15219836 NR Description: serine/threonine protein kinase, putative
MEKYELVKDIGSGNFGVARLMRHKDTKELVAMKYIERGHKIDENVAREIINHRSLRHPNIIRFKEVVLTPTHLGIVMEYAAGGELFERICSAGRFSEDEARYFFQQLISGVSYCHSMQICHRDLKLENTLLDGSPAPRLKICDFGYSKSSLLHSRPKSTVGTPAYIAPEVLSRREYDGKLADVWSCGVTLYVMLVGAYPFEDQEDPKNFRKTINRIMAVQYKIPDYVHISQDCRHLLSRIFVANPARRITIKEIKSHPWFVKNLPRELTEVAQAAYYRKENPTFSLQSIEDIMNIVEEAKAPPPASRSIGGFGWGGEEEEEDETKEAVAETEEDEYEKRVKEAQASGEFHVS

SEQ ID NO: 8414 - protein, 332 aa, Glycine max
  peptide (1)..(332): Ceres Seq. ID no. 14314302
  misc_feature (1)..(240): Pfam Name: Pfam Description:  Protein kinase domain
  misc_feature (1)..(332): NCBI GI NO: 19568098 NR Description: osmotic stress-activated protein kinase
  misc_feature (1)..(332): NCBI GI NO: 38343920 NR Description: serin/threonine protein kinase [Fagus sylvatica]
  misc_feature (1)..(332): NCBI GI NO: 1362051 NR Description: protein kinase SPK-3 (EC 2.7.1.-) - soybean
  misc_feature (1)..(328): NCBI GI NO: 2129803 NR Description: probable serine/threonine-specific protein kinase
  misc_feature (1)..(328): NCBI GI NO: 7434329 NR Description: protein kinase PK1 (EC 2
  misc_feature (1)..(332): NCBI GI NO: 1362026 NR Description: probable serine/threonine-specific protein kinase
  misc_feature (1)..(332): NCBI GI NO: 15220251 NR Description: serine/threonine protein kinase, putative
  misc_feature (1)..(332): NCBI GI NO: 1161254 NR Description: protein kinase [Glycine max]
  misc_feature (1)..(332): NCBI GI NO: 21618062 NR Description: putative serine/threonine-protein kinase
  misc_feature (1)..(332): NCBI GI NO: 15219836 NR Description: serine/threonine protein kinase, putative
MRHKDTKELVAMKYIERGHKIDENVAREIINHRSLRHPNIIRFKEVVLTPTHLGIVMEYAAGGELFERICSAGRFSEDEARYFFQQLISGVSYCHSMQICHRDLKLENTLLDGSPAPRLKICDFGYSKSSLLHSRPKSTVGTPAYIAPEVLSRREYDGKLADVWSCGVTLYVMLVGAYPFEDQEDPKNFRKTINRIMAVQYKIPDYVHISQDCRHLLSRIFVANPARRITIKEIKSHPWFVKNLPRELTEVAQAAYYRKENPTFSLQSIEDIMNIVEEAKAPPPASRSIGGFGWGGEEEEEDETKEAVAETEEDEYEKRVKEAQASGEFHVS

SEQ ID NO: 8415 - protein, 321 aa, Glycine max
  peptide (1)..(321): Ceres Seq. ID no. 14314303
  misc_feature (1)..(229): Pfam Name: Pfam Description:  Protein kinase domain
  misc_feature (1)..(321): NCBI GI NO: 19568098 NR Description: osmotic stress-activated protein kinase
  misc_feature (1)..(321): NCBI GI NO: 38343920 NR Description: serin/threonine protein kinase [Fagus sylvatica]
  misc_feature (1)..(321): NCBI GI NO: 1362051 NR Description: protein kinase SPK-3 (EC 2.7.1.-) - soybean
  misc_feature (1)..(317): NCBI GI NO: 2129803 NR Description: probable serine/threonine-specific protein kinase
  misc_feature (1)..(317): NCBI GI NO: 7434329 NR Description: protein kinase PK1 (EC 2
  misc_feature (1)..(321): NCBI GI NO: 1362026 NR Description: probable serine/threonine-specific protein kinase
  misc_feature (1)..(321): NCBI GI NO: 15220251 NR Description: serine/threonine protein kinase, putative
  misc_feature (1)..(321): NCBI GI NO: 1161254 NR Description: protein kinase [Glycine max]
  misc_feature (1)..(321): NCBI GI NO: 21618062 NR Description: putative serine/threonine-protein kinase
  misc_feature (1)..(321): NCBI GI NO: 15219836 NR Description: serine/threonine protein kinase, putative
MKYIERGHKIDENVAREIINHRSLRHPNIIRFKEVVLTPTHLGIVMEYAAGGELFERICSAGRFSEDEARYFFQQLISGVSYCHSMQICHRDLKLENTLLDGSPAPRLKICDFGYSKSSLLHSRPKSTVGTPAYIAPEVLSRREYDGKLADVWSCGVTLYVMLVGAYPFEDQEDPKNFRKTINRIMAVQYKIPDYVHISQDCRHLLSRIFVANPARRITIKEIKSHPWFVKNLPRELTEVAQAAYYRKENPTFSLQSIEDIMNIVEEAKAPPPASRSIGGFGWGGEEEEEDETKEAVAETEEDEYEKRVKEAQASGEFHVS

SEQ ID NO: 8416 - DNA, 1551 bp, Glycine max
  misc_feature (1)..(1551): Ceres Seq. ID no. 14314331
cttgctctcactctcactccgtctccggtggcctcaaaccgctccctcacaattccaaacaccgcgtgcgctgcccacatctccgttcgcatctcctccttgaccagctcgaagtttctctccagtgttgctttgtgagaagtcgttcttgcttgaagtggcttttcattcacaagctctttgagactttcttggagaagagatgtaggagttggactaaggtttcttccaattttcaattgggcacagccacaatcttattctacttaaccttcctcaccttttcggatacctaaggcgaagtatagctaaaaaatgggagtggagagagaagagaaggtgtctttggaactcagcgaagaaattcttcagagtatggaagtgggaatgtccttcaaagactataacggtagaattagttcgttggattttcacagggcatccagttatctagtgaccgctagtgatgatgaatccattcgtctgtatgatgttactggtggaacatgtttgaagacaattaatagcaagaagtatggagttgacctggtttgcttcacatctcatcctacaactgtcatttactcttcaaaaaatggttgggatgaatctttgcggcttctatcgttgcatgataacaagtatttgagatatttcaaaggtcaccatgacagggttgtgtctctaagcttatgctctcgaaaagactgctttatatctggatctctagatcgaactgttttactgtgggatcaaagggctgagaagtgccagggacttttacatgtacaaggaagacctgctatatcatatgatgatccagggcttgtctttgcaattgcctttggaggatacataagaatgtttgatgcccgcaagtatgaaaagggtccctttgagatattttctgttgggggagatatttctgatgcaaatgttgtgaaatttagtaatgatgggagactaatgcttttaacaacggcagatgggcatattcatgtgcttgacacatttcgtggcacacttttatccacatataatgtcacacctgtctcatgcaactccacattagaagcttctttcagccctgagggaatgttcataatatctggttctggagaaggcagcatctacgcatggagtgttcgaagtggcaaagaagttgcaagttggaggagtgcaacttctgatactggacctcctgtaataaagtgggctcctggaagtcttatgtttgctacaggatcatctgagttgtcattctgggttcctgatttgtctaagttgggatcctatgttggaagaaagtagaaacaaatcaaacaatgcatgataaaactattgtttgcctattaacccactgaaaggtaattttttttattaatactacacaaatttaactgtgccgaatggcgtcgtgtgatccatgtagccgacctcacctagtgggataaaactttgttgttgttgcactacacaaagtgacagattttgccatgtttttgtaaatattcttcaccgaagagcaatggatatttcaatgatcctcct

SEQ ID NO: 8417 - protein, 331 aa, Glycine max
  peptide (1)..(331): Ceres Seq. ID no. 14314332
  misc_feature (109)..(146): Pfam Name: Pfam Description:  WD domain, G-beta repeat
  misc_feature (3)..(331): NCBI GI NO: 30698206 NR Description: transducin / WD-40 repeat protein family
  misc_feature (4)..(331): NCBI GI NO: 18425050 NR Description: transducin / WD-40 repeat protein family
  misc_feature (4)..(331): NCBI GI NO: 21536827 NR Description: WD repeat protein-like [Arabidopsis thaliana]
  misc_feature (9)..(331): NCBI GI NO: 28564824 NR Description: OSJNBb0005G07.13
  misc_feature (12)..(320): NCBI GI NO: 15241434 NR Description: transducin / WD-40 repeat protein family
  misc_feature (11)..(321): NCBI GI NO: 28277563 NR Description: Similar to RIKEN cDNA 9430077D24 gene
  misc_feature (18)..(321): NCBI GI NO: 21618713 NR Description: RIKEN cDNA 9430077D24 gene [Mus musculus]
  misc_feature (9)..(319): NCBI GI NO: 19920938 NR Description: CG17293-PA [Drosophila melanogaster]
  misc_feature (11)..(321): NCBI GI NO: 29727992 NR Description: similar to CG17293-PA [Homo sapiens]
  misc_feature (39)..(321): NCBI GI NO: 34877546 NR Description: similar to CG17293-PA [Rattus norvegicus]
MGVEREEKVSLELSEEILQSMEVGMSFKDYNGRISSLDFHRASSYLVTASDDESIRLYDVTGGTCLKTINSKKYGVDLVCFTSHPTTVIYSSKNGWDESLRLLSLHDNKYLRYFKGHHDRVVSLSLCSRKDCFISGSLDRTVLLWDQRAEKCQGLLHVQGRPAISYDDPGLVFAIAFGGYIRMFDARKYEKGPFEIFSVGGDISDANVVKFSNDGRLMLLTTADGHIHVLDTFRGTLLSTYNVTPVSCNSTLEASFSPEGMFIISGSGEGSIYAWSVRSGKEVASWRSATSDTGPPVIKWAPGSLMFATGSSELSFWVPDLSKLGSYVGRK

SEQ ID NO: 8418 - protein, 311 aa, Glycine max
  peptide (1)..(311): Ceres Seq. ID no. 14314333
  misc_feature (89)..(126): Pfam Name: Pfam Description:  WD domain, G-beta repeat
  misc_feature (1)..(311): NCBI GI NO: 30698206 NR Description: transducin / WD-40 repeat protein family
  misc_feature (1)..(311): NCBI GI NO: 18425050 NR Description: transducin / WD-40 repeat protein family
  misc_feature (1)..(311): NCBI GI NO: 21536827 NR Description: WD repeat protein-like [Arabidopsis thaliana]
  misc_feature (1)..(311): NCBI GI NO: 28564824 NR Description: OSJNBb0005G07.13
  misc_feature (1)..(300): NCBI GI NO: 15241434 NR Description: transducin / WD-40 repeat protein family
  misc_feature (1)..(301): NCBI GI NO: 28277563 NR Description: Similar to RIKEN cDNA 9430077D24 gene
  misc_feature (1)..(301): NCBI GI NO: 21618713 NR Description: RIKEN cDNA 9430077D24 gene [Mus musculus]
  misc_feature (1)..(299): NCBI GI NO: 19920938 NR Description: CG17293-PA [Drosophila melanogaster]
  misc_feature (1)..(301): NCBI GI NO: 29727992 NR Description: similar to CG17293-PA [Homo sapiens]
  misc_feature (19)..(301): NCBI GI NO: 34877546 NR Description: similar to CG17293-PA [Rattus norvegicus]
MEVGMSFKDYNGRISSLDFHRASSYLVTASDDESIRLYDVTGGTCLKTINSKKYGVDLVCFTSHPTTVIYSSKNGWDESLRLLSLHDNKYLRYFKGHHDRVVSLSLCSRKDCFISGSLDRTVLLWDQRAEKCQGLLHVQGRPAISYDDPGLVFAIAFGGYIRMFDARKYEKGPFEIFSVGGDISDANVVKFSNDGRLMLLTTADGHIHVLDTFRGTLLSTYNVTPVSCNSTLEASFSPEGMFIISGSGEGSIYAWSVRSGKEVASWRSATSDTGPPVIKWAPGSLMFATGSSELSFWVPDLSKLGSYVGRK

SEQ ID NO: 8419 - protein, 307 aa, Glycine max
  peptide (1)..(307): Ceres Seq. ID no. 14314334
  misc_feature (85)..(122): Pfam Name: Pfam Description:  WD domain, G-beta repeat
  misc_feature (1)..(307): NCBI GI NO: 30698206 NR Description: transducin / WD-40 repeat protein family
  misc_feature (1)..(307): NCBI GI NO: 18425050 NR Description: transducin / WD-40 repeat protein family
  misc_feature (1)..(307): NCBI GI NO: 21536827 NR Description: WD repeat protein-like [Arabidopsis thaliana]
  misc_feature (1)..(307): NCBI GI NO: 28564824 NR Description: OSJNBb0005G07.13
  misc_feature (1)..(296): NCBI GI NO: 15241434 NR Description: transducin / WD-40 repeat protein family
  misc_feature (1)..(297): NCBI GI NO: 28277563 NR Description: Similar to RIKEN cDNA 9430077D24 gene
  misc_feature (1)..(297): NCBI GI NO: 21618713 NR Description: RIKEN cDNA 9430077D24 gene [Mus musculus]
  misc_feature (1)..(295): NCBI GI NO: 19920938 NR Description: CG17293-PA [Drosophila melanogaster]
  misc_feature (1)..(297): NCBI GI NO: 29727992 NR Description: similar to CG17293-PA [Homo sapiens]
  misc_feature (15)..(297): NCBI GI NO: 34877546 NR Description: similar to CG17293-PA [Rattus norvegicus]
MSFKDYNGRISSLDFHRASSYLVTASDDESIRLYDVTGGTCLKTINSKKYGVDLVCFTSHPTTVIYSSKNGWDESLRLLSLHDNKYLRYFKGHHDRVVSLSLCSRKDCFISGSLDRTVLLWDQRAEKCQGLLHVQGRPAISYDDPGLVFAIAFGGYIRMFDARKYEKGPFEIFSVGGDISDANVVKFSNDGRLMLLTTADGHIHVLDTFRGTLLSTYNVTPVSCNSTLEASFSPEGMFIISGSGEGSIYAWSVRSGKEVASWRSATSDTGPPVIKWAPGSLMFATGSSELSFWVPDLSKLGSYVGRK

SEQ ID NO: 8420 - DNA, 868 bp, Glycine max
  misc_feature (1)..(868): Ceres Seq. ID no. 13594241
atatcgatcccaagcctccctccgtagccagttagttctcatttctaatattgcttccaaaatctctctctctctctctctctggggggtatgtgtgttgttcagtacaactagttttggtatagctagctgctcttcatttgattttgctcgcagtcgcagctccaatccaaatatggaggcgatcactgcttccttagagaggtctcttcaaaactgttccttaaacaataccaacaacaaccatcagcagagcaggaggccggaagaagatgatgggtcagctacagatggaggcataggaatctcatcctgctcagacgatgtcccggacccggataatagtcatatctccgacaccactttagagctcaactcccacatctcactcccttatcattgggagcaatgcctagatttaaagacgggggaaatatattacattaactggaggaacgggatgaaagcaaaggaggatccaagaagcaggagggcagattatagtgtaagtagggattgtgagtccgaagaagaagaagaagaagagagctggtacgacagcgaagagtcttcatcggagtcatgcccttcttcatccaaagagcactatgatgagggacaggtagagaaacagaataacaatgttctggtggtggctgggtgcaagggctgtctcatgtatttcatggtgcccaaacaggttgaagactgcccaaaatgtactggtcaactcctccacttcgatcgatccgaaaatggctctccatgattaattcccactcctcttttctccttgtgtttccttcttcgcttctcttttctttttgctgtgactgtcaaattaaactatagttctctctttttttgt

SEQ ID NO: 8421 - protein, 255 aa, Glycine max
  peptide (1)..(255): Ceres Seq. ID no. 13594242
  misc_feature (112)..(254): NCBI GI NO: 33113263 NR Description: Humj1 [Humulus japonicus]
  misc_feature (114)..(254): NCBI GI NO: 25408280 NR Description: hypothetical protein At2g33510
  misc_feature (114)..(254): NCBI GI NO: 30685734 NR Description: expressed protein [Arabidopsis thaliana]
  misc_feature (114)..(254): NCBI GI NO: 28393658 NR Description: unknown protein [Arabidopsis thaliana]
  misc_feature (91)..(255): NCBI GI NO: 15217816 NR Description: hypothetical protein [Arabidopsis thaliana]
YRSQASLRSQLVLISNIASKISLSLSLWGVCVLFSTTSFGIASCSSFDFARSRSSNPNMEAITASLERSLQNCSLNNTNNNHQQSRRPEEDDGSATDGGIGISSCSDDVPDPDNSHISDTTLELNSHISLPYHWEQCLDLKTGEIYYINWRNGMKAKEDPRSRRADYSVSRDCESEEEEEEESWYDSEESSSESCPSSSKEHYDEGQVEKQNNNVLVVAGCKGCLMYFMVPKQVEDCPKCTGQLLHFDRSENGSP

SEQ ID NO: 8422 - protein, 197 aa, Glycine max
  peptide (1)..(197): Ceres Seq. ID no. 13594243
  misc_feature (54)..(196): NCBI GI NO: 33113263 NR Description: Humj1 [Humulus japonicus]
  misc_feature (56)..(196): NCBI GI NO: 25408280 NR Description: hypothetical protein At2g33510
  misc_feature (56)..(196): NCBI GI NO: 30685734 NR Description: expressed protein [Arabidopsis thaliana]
  misc_feature (56)..(196): NCBI GI NO: 28393658 NR Description: unknown protein [Arabidopsis thaliana]
  misc_feature (33)..(197): NCBI GI NO: 15217816 NR Description: hypothetical protein [Arabidopsis thaliana]
MEAITASLERSLQNCSLNNTNNNHQQSRRPEEDDGSATDGGIGISSCSDDVPDPDNSHISDTTLELNSHISLPYHWEQCLDLKTGEIYYINWRNGMKAKEDPRSRRADYSVSRDCESEEEEEEESWYDSEESSSESCPSSSKEHYDEGQVEKQNNNVLVVAGCKGCLMYFMVPKQVEDCPKCTGQLLHFDRSENGSP

SEQ ID NO: 8423 - DNA, 1361 bp, Glycine max
  misc_feature (1)..(1361): Ceres Seq. ID no. 14316507
gatagcgcttacagtaagaggtgagaaagagagacaaatcggcagaagcaaggaggctgagagcgagagagcaactgcacgcactgtaactcctaacttcccagatcgtcttcttcctcttttctctccggtgattgttggaactcagagagcttctttgatggaacaggttagtaaaacgcactgcgttttgaagcttcactttcacttttgagtttcgattctttccctctactctgcgtatgtgtgcgttttgtgaatttctgcagtacgagaaggttgagaagataggcgaaggaacatacggcgtcgtttacaagggtcgcgaccgcgtcaccaacgagaccatcgcgttgaagaagattcgcctcgagcaggaggatgagggggttcccagcaccgccattcgcgagatttctctcttgaaagaaatgcagcacaggaacattgttaggttgcaggatgtagtgcacgatgagaagagtttgtatctggtttttgagtaccttgacttagatctaaagaagcacatggattcatctccagaatttgcaaaagatccacgacaagtaaaaatgttcctgtaccaaattctctgtggcattgcatactgtcattcacatagagttcttcatcgagacttaaaaccacagaatttgttgatagatcgcagcactaatgcactgaaacttgcagattttggattggccagggcttttggaattcctgttaggacatttacacatgaggtggtaacactgtggtacagagctccggaaattttgcttggatcccgtcagtattctaccccagttgatatttggtcagtgggatgcatatttgcagagatggtaaatcaacgaccacttttccctggggactctgagattgatgaattgtttaaaatattcagaatcatgggtacaccaaatgaagatacatggcctggagtgacatcattgccagattttaaatcagcctttcccaaatggcaacctaaggacctgaaaaatgtggttccaaatcttgagccagctggtcttgatcttctttctagcatgctttacttggatcccagcaaaagaattactgctaggagcgctcttgagcatgaatacttcaaagacattaaatttgtaccctgatttcttatcttcaaggctgaggtgtcttattagtatgtgtagcatttatgggttttgactcaaacgcgtgttgtccttgcttttttcttcaatgcttttggaccgaatcatatttcatttatttgttcttacatttttatttagtatgtgtgatcttgttacctatttacccgtttaatgtattagtctcgatgcaatgcaactagcaaatttcag

SEQ ID NO: 8424 - protein, 300 aa, Glycine max
  peptide (1)..(300): Ceres Seq. ID no. 14316508
  misc_feature (10)..(293): Pfam Name: Pfam Description:  Protein kinase domain
  misc_feature (9)..(300): NCBI GI NO: 1835258 NR Description: cdc2 kinase homologue [Sesbania rostrata]
  misc_feature (9)..(300): NCBI GI NO: 3608177 NR Description: cdc2 [Pisum sativum]
  misc_feature (9)..(300): NCBI GI NO: 24636266 NR Description: Cell division control protein 2 homolog (p34cdc2)
  misc_feature (9)..(300): NCBI GI NO: 1705676 NR Description: Cell division control protein 2 homolog (p34cdc2)
  misc_feature (9)..(300): NCBI GI NO: 2117788 NR Description: protein kinase (EC 2.7.1.37) cdc2 homolog - cowpea
  misc_feature (9)..(300): NCBI GI NO: 461702 NR Description: CELL DIVISION CONTROL PROTEIN 2 HOMOLOG 2
  misc_feature (9)..(300): NCBI GI NO: 13249052 NR Description: CDC2 homolog
  misc_feature (11)..(300): NCBI GI NO: 115924 NR Description: CELL DIVISION CONTROL PROTEIN 2 HOMOLOG 1
  misc_feature (9)..(300): NCBI GI NO: 9885803 NR Description: cyclin-dependent kinase A:4 [Nicotiana tabacum]
  misc_feature (9)..(300): NCBI GI NO: 25989351 NR Description: cyclin-dependent kinase [Helianthus tuberosus]
MCAFCEFLQYEKVEKIGEGTYGVVYKGRDRVTNETIALKKIRLEQEDEGVPSTAIREISLLKEMQHRNIVRLQDVVHDEKSLYLVFEYLDLDLKKHMDSSPEFAKDPRQVKMFLYQILCGIAYCHSHRVLHRDLKPQNLLIDRSTNALKLADFGLARAFGIPVRTFTHEVVTLWYRAPEILLGSRQYSTPVDIWSVGCIFAEMVNQRPLFPGDSEIDELFKIFRIMGTPNEDTWPGVTSLPDFKSAFPKWQPKDLKNVVPNLEPAGLDLLSSMLYLDPSKRITARSALEHEYFKDIKFVP

SEQ ID NO: 8425 - protein, 237 aa, Glycine max
  peptide (1)..(237): Ceres Seq. ID no. 14316509
  misc_feature (1)..(230): Pfam Name: Pfam Description:  Protein kinase domain
  misc_feature (1)..(237): NCBI GI NO: 1835258 NR Description: cdc2 kinase homologue [Sesbania rostrata]
  misc_feature (1)..(237): NCBI GI NO: 3608177 NR Description: cdc2 [Pisum sativum]
  misc_feature (1)..(237): NCBI GI NO: 24636266 NR Description: Cell division control protein 2 homolog (p34cdc2)
  misc_feature (1)..(237): NCBI GI NO: 1705676 NR Description: Cell division control protein 2 homolog (p34cdc2)
  misc_feature (1)..(237): NCBI GI NO: 2117788 NR Description: protein kinase (EC 2.7.1.37) cdc2 homolog - cowpea
  misc_feature (1)..(237): NCBI GI NO: 461702 NR Description: CELL DIVISION CONTROL PROTEIN 2 HOMOLOG 2
  misc_feature (1)..(237): NCBI GI NO: 13249052 NR Description: CDC2 homolog
  misc_feature (1)..(237): NCBI GI NO: 115924 NR Description: CELL DIVISION CONTROL PROTEIN 2 HOMOLOG 1
  misc_feature (1)..(237): NCBI GI NO: 9885803 NR Description: cyclin-dependent kinase A:4 [Nicotiana tabacum]
  misc_feature (1)..(237): NCBI GI NO: 25989351 NR Description: cyclin-dependent kinase [Helianthus tuberosus]
MQHRNIVRLQDVVHDEKSLYLVFEYLDLDLKKHMDSSPEFAKDPRQVKMFLYQILCGIAYCHSHRVLHRDLKPQNLLIDRSTNALKLADFGLARAFGIPVRTFTHEVVTLWYRAPEILLGSRQYSTPVDIWSVGCIFAEMVNQRPLFPGDSEIDELFKIFRIMGTPNEDTWPGVTSLPDFKSAFPKWQPKDLKNVVPNLEPAGLDLLSSMLYLDPSKRITARSALEHEYFKDIKFVP

SEQ ID NO: 8426 - protein, 204 aa, Glycine max
  peptide (1)..(204): Ceres Seq. ID no. 14316510
  misc_feature (1)..(197): Pfam Name: Pfam Description:  Protein kinase domain
  misc_feature (1)..(204): NCBI GI NO: 1835258 NR Description: cdc2 kinase homologue [Sesbania rostrata]
  misc_feature (1)..(204): NCBI GI NO: 3608177 NR Description: cdc2 [Pisum sativum]
  misc_feature (1)..(204): NCBI GI NO: 24636266 NR Description: Cell division control protein 2 homolog (p34cdc2)
  misc_feature (1)..(204): NCBI GI NO: 1705676 NR Description: Cell division control protein 2 homolog (p34cdc2)
  misc_feature (1)..(204): NCBI GI NO: 2117788 NR Description: protein kinase (EC 2.7.1.37) cdc2 homolog - cowpea
  misc_feature (1)..(204): NCBI GI NO: 461702 NR Description: CELL DIVISION CONTROL PROTEIN 2 HOMOLOG 2
  misc_feature (1)..(204): NCBI GI NO: 13249052 NR Description: CDC2 homolog
  misc_feature (1)..(204): NCBI GI NO: 115924 NR Description: CELL DIVISION CONTROL PROTEIN 2 HOMOLOG 1
  misc_feature (1)..(204): NCBI GI NO: 9885803 NR Description: cyclin-dependent kinase A:4 [Nicotiana tabacum]
  misc_feature (1)..(204): NCBI GI NO: 25989351 NR Description: cyclin-dependent kinase [Helianthus tuberosus]
MDSSPEFAKDPRQVKMFLYQILCGIAYCHSHRVLHRDLKPQNLLIDRSTNALKLADFGLARAFGIPVRTFTHEVVTLWYRAPEILLGSRQYSTPVDIWSVGCIFAEMVNQRPLFPGDSEIDELFKIFRIMGTPNEDTWPGVTSLPDFKSAFPKWQPKDLKNVVPNLEPAGLDLLSSMLYLDPSKRITARSALEHEYFKDIKFVP

SEQ ID NO: 8427 - DNA, 1395 bp, Glycine max
  misc_feature (1)..(1395): Ceres Seq. ID no. 14314212
ctaatcgaaaaaaaaatgcctcctcctcttccatctctctgcaacttcaacttggcgatactcttcctcttcctcacacccactttccaaatccccctcatagccccaatctcaaaagacgacaccacccaactctacactctctccgtgttcctgaaaaccccactccaacccacaaaactccacctccaccttggctcctccctcagctgggtcctctgcgactccacctacacctcctcctcctcccaccacatcccctgcaacacccctctctgcaactccttcccctccaacgcatgctccaacaactcctccctctgcgccctcttccccgaaaaccccgtcacaagaaacaccctcctggacaccgccctcatcgattccctcgctcttcccacctacgacgcttcctcctctctcgtcctcatctccgacttcatcttctcctgcgccacggcccatcttctccagggcctcgccgccaatgcattgggcctcgcctcattgggccggtccaactactccctcccggcccaaatcagcacttcattaacctcacctcgttctttcactctctgcctgccagcttcatcagccaacacaggggcagctatattcgcctccactgcctcctcatttcttttctcttccaaaattgaccttacttacacacaactcatcgtaaaccccgttgccgacaccgtcgtcaccgacaatccacaaccgtctgatgagtatttcataaacttaacctcaatcaaaatcaacggtaagcctctttatatcaactcctccatcctcaccgttgatcagaccggcttcggtgggaccaagataagcactgcggaaccctacactgttttagaaacttctatttacagactatttgttcagcgttttgtgaacgagtcctctgcttttaacttgacggtgacggaagcagttgagccgtttggcgtgtgctaccctgcgggggatctcacggagacacgagttggacccgcggtgcccaccgttgatctggtgatgcacagcgaggacgtgttctggagaatctttggcgggaattcgatggtgagggttgcgaagggaggagtggatgtgtggtgtttgggttttgtggacggtgggacccgcgggagaactcccattgtaatcggagggcatcagttggaggataatttaatgcagtttgatcttgactcaaatagattcggtttcacttcgactctcttgcttcaggatgccaaatgttctaatctcaaggtcaataattttgcaaatggaattaaataaattccaattcaaaaaatatgtataggtaatttgattgtttctattttttctgtaacactattacctgttttattacatgttgtaatcaaatgttcc

SEQ ID NO: 8428 - protein, 432 aa, Glycine max
  peptide (1)..(432): Ceres Seq. ID no. 14314213
  misc_feature (27)..(410): Pfam Name: Pfam Description:  Eukaryotic aspartyl protease
  misc_feature (27)..(421): NCBI GI NO: 7488910 NR Description: dermal glycoprotein precursor
  misc_feature (33)..(428): NCBI GI NO: 32482806 NR Description: putative xyloglucanase inhibitor
  misc_feature (33)..(421): NCBI GI NO: 27372527 NR Description: xyloglucan-specific fungal endoglucanase inhibitor protein precursor
  misc_feature (11)..(428): NCBI GI NO: 21537233 NR Description: EDGP precursor [Arabidopsis thaliana]
  misc_feature (11)..(428): NCBI GI NO: 15218740 NR Description: expressed protein [Arabidopsis thaliana]
  misc_feature (27)..(428): NCBI GI NO: 18379072 NR Description: expressed protein [Arabidopsis thaliana]
  misc_feature (33)..(426): NCBI GI NO: 11191819 NR Description: conglutin gamma [Lupinus albus]
  misc_feature (16)..(421): NCBI GI NO: 34907230 NR Description: putative dermal glycoprotein precursor
  misc_feature (66)..(420): NCBI GI NO: 10334495 NR Description: putative extracellular dermal glycoprotein
  misc_feature (27)..(426): NCBI GI NO: 662366 NR Description: conglutin gamma [Lupinus angustifolius]
LIEKKMPPPLPSLCNFNLAILFLFLTPTFQIPLIAPISKDDTTQLYTLSVFLKTPLQPTKLHLHLGSSLSWVLCDSTYTSSSSHHIPCNTPLCNSFPSNACSNNSSLCALFPENPVTRNTLLDTALIDSLALPTYDASSSLVLISDFIFSCATAHLLQGLAANALGLASLGRSNYSLPAQISTSLTSPRSFTLCLPASSANTGAAIFASTASSFLFSSKIDLTYTQLIVNPVADTVVTDNPQPSDEYFINLTSIKINGKPLYINSSILTVDQTGFGGTKISTAEPYTVLETSIYRLFVQRFVNESSAFNLTVTEAVEPFGVCYPAGDLTETRVGPAVPTVDLVMHSEDVFWRIFGGNSMVRVAKGGVDVWCLGFVDGGTRGRTPIVIGGHQLEDNLMQFDLDSNRFGFTSTLLLQDAKCSNLKVNNFANGIK

SEQ ID NO: 8429 - protein, 427 aa, Glycine max
  peptide (1)..(427): Ceres Seq. ID no. 14314214
  misc_feature (22)..(405): Pfam Name: Pfam Description:  Eukaryotic aspartyl protease
  misc_feature (22)..(416): NCBI GI NO: 7488910 NR Description: dermal glycoprotein precursor
  misc_feature (28)..(423): NCBI GI NO: 32482806 NR Description: putative xyloglucanase inhibitor
  misc_feature (28)..(416): NCBI GI NO: 27372527 NR Description: xyloglucan-specific fungal endoglucanase inhibitor protein precursor
  misc_feature (6)..(423): NCBI GI NO: 21537233 NR Description: EDGP precursor [Arabidopsis thaliana]
  misc_feature (6)..(423): NCBI GI NO: 15218740 NR Description: expressed protein [Arabidopsis thaliana]
  misc_feature (22)..(423): NCBI GI NO: 18379072 NR Description: expressed protein [Arabidopsis thaliana]
  misc_feature (28)..(421): NCBI GI NO: 11191819 NR Description: conglutin gamma [Lupinus albus]
  misc_feature (11)..(416): NCBI GI NO: 34907230 NR Description: putative dermal glycoprotein precursor
  misc_feature (61)..(415): NCBI GI NO: 10334495 NR Description: putative extracellular dermal glycoprotein
  misc_feature (22)..(421): NCBI GI NO: 662366 NR Description: conglutin gamma [Lupinus angustifolius]
MPPPLPSLCNFNLAILFLFLTPTFQIPLIAPISKDDTTQLYTLSVFLKTPLQPTKLHLHLGSSLSWVLCDSTYTSSSSHHIPCNTPLCNSFPSNACSNNSSLCALFPENPVTRNTLLDTALIDSLALPTYDASSSLVLISDFIFSCATAHLLQGLAANALGLASLGRSNYSLPAQISTSLTSPRSFTLCLPASSANTGAAIFASTASSFLFSSKIDLTYTQLIVNPVADTVVTDNPQPSDEYFINLTSIKINGKPLYINSSILTVDQTGFGGTKISTAEPYTVLETSIYRLFVQRFVNESSAFNLTVTEAVEPFGVCYPAGDLTETRVGPAVPTVDLVMHSEDVFWRIFGGNSMVRVAKGGVDVWCLGFVDGGTRGRTPIVIGGHQLEDNLMQFDLDSNRFGFTSTLLLQDAKCSNLKVNNFANGIK

SEQ ID NO: 8430 - protein, 219 aa, Glycine max
  peptide (1)..(219): Ceres Seq. ID no. 14314215
NRKKNASSSSISLQLQLGDTLPLPHTHFPNPPHSPNLKRRHHPTLHSLRVPENPTPTHKTPPPPWLLPQLGPLRLHLHLLLLPPHPLQHPSLQLLPLQRMLQQLLPLRPLPRKPRHKKHPPGHRPHRFPRSSHLRRFLLSRPHLRLHLLLRHGPSSPGPRRQCIGPRLIGPVQLLPPGPNQHFINLTSFFHSLPASFISQHRGSYIRLHCLLISFLFQN

SEQ ID NO: 8431 - DNA, 1380 bp, Glycine max
  misc_feature (1)..(1380): Ceres Seq. ID no. 15177022
actaaaatacactaattgcctctctctttccctttcttcttcttctccgtcttcttcacactgagttgactgagtcttcgtaactcgctctctactgtctcagctactcatcgcattctctgcatttatcctccgatcacattttctctctcttcgttcgactatagctgacagggatgtcggagaaagctcttagggatctcaatacaattcttggaactgaaaggaagaatgaggactccagtaaggcatgtttatccaagccttctgttgacaatgctgttgaaaatattgaagaatggcaaaagaaaaataatagtccctccttggtttctccagctgttaatggaaatctggctgtgactgctaattctggtgcggaggttgtaaatccagaagtagaatatattgaatctgagaacttgaatgatgtagacgatattgatacttgtctcaagaccctattagctggacttgactcaaaggattgggtcctggtttgtgacacactgaataacgtacgtcgattgtctatatttcataaggaagcaatgcttgatatgctgggggatgtgatcacatctattgcaaagtcactgaaaagtcctagaagtgctgtttgcaaaactgccattatgacatctgcagacattttcagtgcatataatgatcttataatagattcattggaccctctgctagtacaacttcttctcaagtcttcacaagacaaacgctttgtatgtgaggcagctgaaaaagccttgatatcaatgactatttggatttcccctatttctttattgccaaaattgcaaccataccttaagaacaagaatcctcgtatccgtgcaaaagcatcaatgtgcttttctcggagtgttcctcagctgggtgcagaaggcataaagacatatgggattgacaaattgatccaagtagctgcatctcagttgagtgaccagctcccagagtccagggaagcggcccgaactctacttctcgagcttcaaaatgtgtatgagaaatctcatgatctcatcaagccagctactcctactgtcaataatgagcatactgtgaatgaggagaatccagaggtgagttcttgggaaagcttctgtcagtcaaaactttctcctcttagtgctcaagctgtacttcgtgtaaccaccagtatcgctcgggagggtcttgtttcatgacacgcacattaaacctcactttgcggctttcatcatttccttgtttgcttatcattttcttctgtaaatacagtgcgacaattgagatgattgagttgagttgtcgtcgaagcacgtattgagcccaagatttataatgtgtattctattattttccccctagctgttgttacct

SEQ ID NO: 8432 - protein, 342 aa, Glycine max
  peptide (1)..(342): Ceres Seq. ID no. 15177023
  misc_feature (1)..(342): NCBI GI NO: 15241493 NR Description: expressed protein [Arabidopsis thaliana]
  misc_feature (1)..(342): NCBI GI NO: 18395821 NR Description: expressed protein [Arabidopsis thaliana]
  misc_feature (1)..(342): NCBI GI NO: 21537265 NR Description: unknown [Arabidopsis thaliana]
  misc_feature (1)..(241): NCBI GI NO: 15229670 NR Description: expressed protein [Arabidopsis thaliana]
  misc_feature (269)..(342): NCBI GI NO: 15229670 NR Description: expressed protein [Arabidopsis thaliana]
  misc_feature (1)..(276): NCBI GI NO: 9294314 NR Description: gb|AAF24615
  misc_feature (31)..(334): NCBI GI NO: 18414533 NR Description: expressed protein [Arabidopsis thaliana]
  misc_feature (31)..(334): NCBI GI NO: 21593517 NR Description: unknown [Arabidopsis thaliana]
  misc_feature (133)..(334): NCBI GI NO: 7485173 NR Description: hypothetical protein - Arabidopsis thaliana
  misc_feature (90)..(302): NCBI GI NO: 21064295 NR Description: LP02990p [Drosophila melanogaster]
MSEKALRDLNTILGTERKNEDSSKACLSKPSVDNAVENIEEWQKKNNSPSLVSPAVNGNLAVTANSGAEVVNPEVEYIESENLNDVDDIDTCLKTLLAGLDSKDWVLVCDTLNNVRRLSIFHKEAMLDMLGDVITSIAKSLKSPRSAVCKTAIMTSADIFSAYNDLIIDSLDPLLVQLLLKSSQDKRFVCEAAEKALISMTIWISPISLLPKLQPYLKNKNPRIRAKASMCFSRSVPQLGAEGIKTYGIDKLIQVAASQLSDQLPESREAARTLLLELQNVYEKSHDLIKPATPTVNNEHTVNEENPEVSSWESFCQSKLSPLSAQAVLRVTTSIAREGLVS

SEQ ID NO: 8433 - protein, 217 aa, Glycine max
  peptide (1)..(217): Ceres Seq. ID no. 15177024
  misc_feature (1)..(217): NCBI GI NO: 15241493 NR Description: expressed protein [Arabidopsis thaliana]
  misc_feature (1)..(217): NCBI GI NO: 18395821 NR Description: expressed protein [Arabidopsis thaliana]
  misc_feature (1)..(217): NCBI GI NO: 21537265 NR Description: unknown [Arabidopsis thaliana]
  misc_feature (1)..(116): NCBI GI NO: 15229670 NR Description: expressed protein [Arabidopsis thaliana]
  misc_feature (144)..(217): NCBI GI NO: 15229670 NR Description: expressed protein [Arabidopsis thaliana]
  misc_feature (1)..(151): NCBI GI NO: 9294314 NR Description: gb|AAF24615
  misc_feature (1)..(209): NCBI GI NO: 18414533 NR Description: expressed protein [Arabidopsis thaliana]
  misc_feature (1)..(209): NCBI GI NO: 21593517 NR Description: unknown [Arabidopsis thaliana]
  misc_feature (8)..(209): NCBI GI NO: 7485173 NR Description: hypothetical protein - Arabidopsis thaliana
  misc_feature (1)..(177): NCBI GI NO: 21064295 NR Description: LP02990p [Drosophila melanogaster]
MLDMLGDVITSIAKSLKSPRSAVCKTAIMTSADIFSAYNDLIIDSLDPLLVQLLLKSSQDKRFVCEAAEKALISMTIWISPISLLPKLQPYLKNKNPRIRAKASMCFSRSVPQLGAEGIKTYGIDKLIQVAASQLSDQLPESREAARTLLLELQNVYEKSHDLIKPATPTVNNEHTVNEENPEVSSWESFCQSKLSPLSAQAVLRVTTSIAREGLVS

SEQ ID NO: 8434 - protein, 214 aa, Glycine max
  peptide (1)..(214): Ceres Seq. ID no. 15177025
  misc_feature (1)..(214): NCBI GI NO: 15241493 NR Description: expressed protein [Arabidopsis thaliana]
  misc_feature (1)..(214): NCBI GI NO: 18395821 NR Description: expressed protein [Arabidopsis thaliana]
  misc_feature (1)..(214): NCBI GI NO: 21537265 NR Description: unknown [Arabidopsis thaliana]
  misc_feature (1)..(113): NCBI GI NO: 15229670 NR Description: expressed protein [Arabidopsis thaliana]
  misc_feature (141)..(214): NCBI GI NO: 15229670 NR Description: expressed protein [Arabidopsis thaliana]
  misc_feature (1)..(148): NCBI GI NO: 9294314 NR Description: gb|AAF24615
  misc_feature (1)..(206): NCBI GI NO: 18414533 NR Description: expressed protein [Arabidopsis thaliana]
  misc_feature (1)..(206): NCBI GI NO: 21593517 NR Description: unknown [Arabidopsis thaliana]
  misc_feature (5)..(206): NCBI GI NO: 7485173 NR Description: hypothetical protein - Arabidopsis thaliana
  misc_feature (1)..(174): NCBI GI NO: 21064295 NR Description: LP02990p [Drosophila melanogaster]
MLGDVITSIAKSLKSPRSAVCKTAIMTSADIFSAYNDLIIDSLDPLLVQLLLKSSQDKRFVCEAAEKALISMTIWISPISLLPKLQPYLKNKNPRIRAKASMCFSRSVPQLGAEGIKTYGIDKLIQVAASQLSDQLPESREAARTLLLELQNVYEKSHDLIKPATPTVNNEHTVNEENPEVSSWESFCQSKLSPLSAQAVLRVTTSIAREGLVS

SEQ ID NO: 8435 - DNA, 1540 bp, Glycine max
  misc_feature (1)..(1540): Ceres Seq. ID no. 13582534
aaaattttgcacaacaggttatgaaaatccacgagaagcaaccggtcgctgcctgtggatattgaggttccacaagtggtacttcctaatccggatcagcaactttcggatgatggcagcaccttggtttctaacggcggaacctttgagttgggtttcttcaatcccgggagttccaataaccgctatgtcggaatctggtacaaaaaaatctctattaaaacagtagtttgggttgccaaccgtgacaacccaatagtcagacacaactcaagcaagctggtcataaggcaagagggaaacctcgtactcctcagcaacaacaaccagtctcttctttggactacaaatgtaacaaaaaaggcttcgagttcgagtccaattgtgcaactcttggacactggaaacttggtaattaaagatggtatcaacgaagagagtgtttttctgtggcaaagctttgaccatccttgtgacacgctattgtcgggaatgaagcttgggtgggacttaagaactgggcttaaccggcgtcttacttcttggaaaagctgggatgatccgtcttcgggagacattgtttgggaggtagtgataggaaacaatcctgaattggtcatgtggaagagtaaagttgactactttaggactgggccttatactgggaatatgttcagtggagtatatgcgccgaggaataacccactttataattggaaatttgtgagtaacaaagatgaagtgtatttccaatacaccttgagtaatagttttgtggtttctataattgttttgaaccaaacccttaatcttcgtcaacgcctcacttggattcccgataccaagacttggacggtttaccaatccttgccactagatagttgtgatgtttataacacttgtgggccaaatggaaattgcatcattgctgggtcgccaatttgccagtgcttagacgggttcaagccgaaatcgccccaacagtggaacgcaatggattggaggcaagggtgtgtgcgcagtgaagagtggagttgtggggtaaaaaataaggatggttttcaaagacttgctagtatgaaactgccaaacactacattttcttgggttaacgaaagtataacacttgaggagtgtagggccaaatgtttggaaaactgttcgtgcacagcttattcgaacttggacacaaggggaggaggtagtgggtgctccatttgggttggtgaacttgttgacatgagagatgtaaaaagcggacaagatttatatgttcgaatagccacttcggatccagatggtaaacatgagcgtcaaaaaaaggtaatcttggtggttgcgatcactgtttcgctggtccttgtgatgttattagcattctgtgtttacatgatcaagaaaaaatataaaggtgagtttcttacctagaaatcttttttatttcacatacattttaaaatttaagagaacacctacaatgtcataaatagaatatttacgcacttgtgaatctcataaattcattcttcatgtttttctc

SEQ ID NO: 8436 - protein, 311 aa, Glycine max
  peptide (1)..(311): Ceres Seq. ID no. 13582535
  misc_feature (182)..(290): Pfam Name: Pfam Description:  PAN domain
  misc_feature (1)..(303): NCBI GI NO: 5821294 NR Description: SRK13 [Brassica oleracea]
  misc_feature (1)..(303): NCBI GI NO: 5821298 NR Description: SRK13-b [Brassica oleracea]
  misc_feature (1)..(267): NCBI GI NO: 1272349 NR Description: secreted glycoprotein 3
  misc_feature (1)..(304): NCBI GI NO: 3986092 NR Description: SRK45 [Brassica rapa]
  misc_feature (1)..(311): NCBI GI NO: 3868810 NR Description: SRK23Bol [Brassica oleracea]
  misc_feature (1)..(310): NCBI GI NO: 913141 NR Description: ARK3 product/receptor-like serine/threonine proteinkinase ARK3
  misc_feature (1)..(310): NCBI GI NO: 15234427 NR Description: receptor-related serine/threonine protein kinaseARK3
  misc_feature (1)..(304): NCBI GI NO: 7434414 NR Description: S-receptor kinase (EC 2.7.1.-) - wild cabbage
  misc_feature (1)..(304): NCBI GI NO: 2148043 NR Description: S-receptor kinase (EC 2
  misc_feature (1)..(267): NCBI GI NO: 5821271 NR Description: SLG13-b [Brassica oleracea]
MKLGWDLRTGLNRRLTSWKSWDDPSSGDIVWEVVIGNNPELVMWKSKVDYFRTGPYTGNMFSGVYAPRNNPLYNWKFVSNKDEVYFQYTLSNSFVVSIIVLNQTLNLRQRLTWIPDTKTWTVYQSLPLDSCDVYNTCGPNGNCIIAGSPICQCLDGFKPKSPQQWNAMDWRQGCVRSEEWSCGVKNKDGFQRLASMKLPNTTFSWVNESITLEECRAKCLENCSCTAYSNLDTRGGGSGCSIWVGELVDMRDVKSGQDLYVRIATSDPDGKHERQKKVILVVAITVSLVLVMLLAFCVYMIKKKYKGEFLT

SEQ ID NO: 8437 - protein, 269 aa, Glycine max
  peptide (1)..(269): Ceres Seq. ID no. 13582536
  misc_feature (140)..(248): Pfam Name: Pfam Description:  PAN domain
  misc_feature (1)..(261): NCBI GI NO: 5821294 NR Description: SRK13 [Brassica oleracea]
  misc_feature (1)..(261): NCBI GI NO: 5821298 NR Description: SRK13-b [Brassica oleracea]
  misc_feature (1)..(225): NCBI GI NO: 1272349 NR Description: secreted glycoprotein 3
  misc_feature (1)..(262): NCBI GI NO: 3986092 NR Description: SRK45 [Brassica rapa]
  misc_feature (1)..(269): NCBI GI NO: 3868810 NR Description: SRK23Bol [Brassica oleracea]
  misc_feature (1)..(268): NCBI GI NO: 913141 NR Description: ARK3 product/receptor-like serine/threonine proteinkinase ARK3
  misc_feature (1)..(268): NCBI GI NO: 15234427 NR Description: receptor-related serine/threonine protein kinaseARK3
  misc_feature (1)..(262): NCBI GI NO: 7434414 NR Description: S-receptor kinase (EC 2.7.1.-) - wild cabbage
  misc_feature (1)..(262): NCBI GI NO: 2148043 NR Description: S-receptor kinase (EC 2
  misc_feature (1)..(225): NCBI GI NO: 5821271 NR Description: SLG13-b [Brassica oleracea]
MWKSKVDYFRTGPYTGNMFSGVYAPRNNPLYNWKFVSNKDEVYFQYTLSNSFVVSIIVLNQTLNLRQRLTWIPDTKTWTVYQSLPLDSCDVYNTCGPNGNCIIAGSPICQCLDGFKPKSPQQWNAMDWRQGCVRSEEWSCGVKNKDGFQRLASMKLPNTTFSWVNESITLEECRAKCLENCSCTAYSNLDTRGGGSGCSIWVGELVDMRDVKSGQDLYVRIATSDPDGKHERQKKVILVVAITVSLVLVMLLAFCVYMIKKKYKGEFLT

SEQ ID NO: 8438 - protein, 252 aa, Glycine max
  peptide (1)..(252): Ceres Seq. ID no. 13582537
  misc_feature (123)..(231): Pfam Name: Pfam Description:  PAN domain
  misc_feature (1)..(244): NCBI GI NO: 5821294 NR Description: SRK13 [Brassica oleracea]
  misc_feature (1)..(244): NCBI GI NO: 5821298 NR Description: SRK13-b [Brassica oleracea]
  misc_feature (1)..(208): NCBI GI NO: 1272349 NR Description: secreted glycoprotein 3
  misc_feature (1)..(245): NCBI GI NO: 3986092 NR Description: SRK45 [Brassica rapa]
  misc_feature (1)..(252): NCBI GI NO: 3868810 NR Description: SRK23Bol [Brassica oleracea]
  misc_feature (1)..(251): NCBI GI NO: 913141 NR Description: ARK3 product/receptor-like serine/threonine proteinkinase ARK3
  misc_feature (1)..(251): NCBI GI NO: 15234427 NR Description: receptor-related serine/threonine protein kinaseARK3
  misc_feature (1)..(245): NCBI GI NO: 7434414 NR Description: S-receptor kinase (EC 2.7.1.-) - wild cabbage
  misc_feature (1)..(245): NCBI GI NO: 2148043 NR Description: S-receptor kinase (EC 2
  misc_feature (1)..(208): NCBI GI NO: 5821271 NR Description: SLG13-b [Brassica oleracea]
MFSGVYAPRNNPLYNWKFVSNKDEVYFQYTLSNSFVVSIIVLNQTLNLRQRLTWIPDTKTWTVYQSLPLDSCDVYNTCGPNGNCIIAGSPICQCLDGFKPKSPQQWNAMDWRQGCVRSEEWSCGVKNKDGFQRLASMKLPNTTFSWVNESITLEECRAKCLENCSCTAYSNLDTRGGGSGCSIWVGELVDMRDVKSGQDLYVRIATSDPDGKHERQKKVILVVAITVSLVLVMLLAFCVYMIKKKYKGEFLT

SEQ ID NO: 8439 - DNA, 915 bp, Glycine max
  misc_feature (1)..(915): Ceres Seq. ID no. 15173851
gtaagggagtgtttggttacttctgagattcttctgttcctaagagagagagagagcgatgacggtagcagcaggaatcggttacgctctggtagcactaggaccctctctctccctcttcgtttccgtcatttccaaaaaacccttcctcattctcacagttctctccagtacgttgttgtggcttattagtttgattgtgctgtctggaatatggaggggggttttgcctctcagcacaacagcttcgtggccttttggaatactcattttctcatctgttgcttttcaagaagccctcagacttttcttctggaaaatatataagaggttagaagacatgttagatgcctttgctgacagagtatcaaaaccacatcttcacctgacagataagatgctgattgctctggctggtgggttgggtcatggtgttgcccatgctgtgttcttctgcatcagcctattaactcctgcatttggtccagcaacgtatttcgttgaccgctgttcaagagttccatttttccttctttctgcaattattgctcttgcatttgtcataatccacactttctcaatggtcatcgcatttaacgggtatacagaggggaacaaagtggatcaatattttgttcccatcgttcacgttgttgctggaatggtgactctggtgaatttggcgcctggcggttgtgctgttggcattcctcttctttatttggttgcaatcttgaccttgattcattgtgggaggatggtttggagaaaattgacagaaaacccaatcaggccagttcactcatagtaactgataatctttgtaaaaaatctcatctatagtttcttggtgcttgccattcctgttggaatacataaagataccgaaagttataatgcacaaaagtttttcct

SEQ ID NO: 8440 - protein, 249 aa, Glycine max
  peptide (1)..(249): Ceres Seq. ID no. 15173852
  misc_feature (1)..(242): NCBI GI NO: 21594204 NR Description: unknown [Arabidopsis thaliana]
  misc_feature (1)..(242): NCBI GI NO: 18402667 NR Description: expressed protein [Arabidopsis thaliana]
  misc_feature (1)..(227): NCBI GI NO: 20129183 NR Description: presenilin stabilization factor CG2855-PA
  misc_feature (1)..(227): NCBI GI NO: 31233667 NR Description: ENSANGP00000015809 [Anopheles gambiae]
  misc_feature (1)..(226): NCBI GI NO: 29243936 NR Description: hypothetical protein 4632417K02 [Mus musculus]
  misc_feature (1)..(226): NCBI GI NO: 18088649 NR Description: hypothetical protein DKFZp564D0372 [Homo sapiens]
  misc_feature (1)..(226): NCBI GI NO: 13775224 NR Description: presenilin stabilization factor-like
  misc_feature (1)..(180): NCBI GI NO: 22203751 NR Description: anterior pharynx defective 1A homolog
  misc_feature (1)..(180): NCBI GI NO: 7705787 NR Description: CGI-78 protein [Homo sapiens]
  misc_feature (1)..(180): NCBI GI NO: 12654775 NR Description: Similar to CGI-78 protein [Homo sapiens]
MTVAAGIGYALVALGPSLSLFVSVISKKPFLILTVLSSTLLWLISLIVLSGIWRGVLPLSTTASWPFGILIFSSVAFQEALRLFFWKIYKRLEDMLDAFADRVSKPHLHLTDKMLIALAGGLGHGVAHAVFFCISLLTPAFGPATYFVDRCSRVPFFLLSAIIALAFVIIHTFSMVIAFNGYTEGNKVDQYFVPIVHVVAGMVTLVNLAPGGCAVGIPLLYLVAILTLIHCGRMVWRKLTENPIRPVHS

SEQ ID NO: 8441 - protein, 155 aa, Glycine max
  peptide (1)..(155): Ceres Seq. ID no. 15173853
  misc_feature (1)..(148): NCBI GI NO: 21594204 NR Description: unknown [Arabidopsis thaliana]
  misc_feature (1)..(148): NCBI GI NO: 18402667 NR Description: expressed protein [Arabidopsis thaliana]
  misc_feature (1)..(133): NCBI GI NO: 20129183 NR Description: presenilin stabilization factor CG2855-PA
  misc_feature (1)..(133): NCBI GI NO: 31233667 NR Description: ENSANGP00000015809 [Anopheles gambiae]
  misc_feature (1)..(132): NCBI GI NO: 29243936 NR Description: hypothetical protein 4632417K02 [Mus musculus]
  misc_feature (1)..(132): NCBI GI NO: 18088649 NR Description: hypothetical protein DKFZp564D0372 [Homo sapiens]
  misc_feature (1)..(132): NCBI GI NO: 13775224 NR Description: presenilin stabilization factor-like
  misc_feature (1)..(86): NCBI GI NO: 22203751 NR Description: anterior pharynx defective 1A homolog
  misc_feature (1)..(86): NCBI GI NO: 7705787 NR Description: CGI-78 protein [Homo sapiens]
  misc_feature (1)..(86): NCBI GI NO: 12654775 NR Description: Similar to CGI-78 protein [Homo sapiens]
MLDAFADRVSKPHLHLTDKMLIALAGGLGHGVAHAVFFCISLLTPAFGPATYFVDRCSRVPFFLLSAIIALAFVIIHTFSMVIAFNGYTEGNKVDQYFVPIVHVVAGMVTLVNLAPGGCAVGIPLLYLVAILTLIHCGRMVWRKLTENPIRPVHS

SEQ ID NO: 8442 - protein, 136 aa, Glycine max
  peptide (1)..(136): Ceres Seq. ID no. 15173854
  misc_feature (1)..(129): NCBI GI NO: 21594204 NR Description: unknown [Arabidopsis thaliana]
  misc_feature (1)..(129): NCBI GI NO: 18402667 NR Description: expressed protein [Arabidopsis thaliana]
  misc_feature (1)..(114): NCBI GI NO: 20129183 NR Description: presenilin stabilization factor CG2855-PA
  misc_feature (1)..(114): NCBI GI NO: 31233667 NR Description: ENSANGP00000015809 [Anopheles gambiae]
  misc_feature (1)..(113): NCBI GI NO: 29243936 NR Description: hypothetical protein 4632417K02 [Mus musculus]
  misc_feature (1)..(113): NCBI GI NO: 18088649 NR Description: hypothetical protein DKFZp564D0372 [Homo sapiens]
  misc_feature (1)..(113): NCBI GI NO: 13775224 NR Description: presenilin stabilization factor-like
  misc_feature (1)..(67): NCBI GI NO: 22203751 NR Description: anterior pharynx defective 1A homolog
  misc_feature (1)..(67): NCBI GI NO: 7705787 NR Description: CGI-78 protein [Homo sapiens]
  misc_feature (1)..(67): NCBI GI NO: 34858248 NR Description: similar to Aph1a-pending protein
MLIALAGGLGHGVAHAVFFCISLLTPAFGPATYFVDRCSRVPFFLLSAIIALAFVIIHTFSMVIAFNGYTEGNKVDQYFVPIVHVVAGMVTLVNLAPGGCAVGIPLLYLVAILTLIHCGRMVWRKLTENPIRPVHS

SEQ ID NO: 8443 - DNA, 1324 bp, Glycine max
  misc_feature (1)..(1324): Ceres Seq. ID no. 15171777
gaactgggatctaactctcattctctttctctctctcagttgtcagtacttaaaaatcattgtccttgagtctctgcacactgcacacagcacacagcacacatcgtcgtcgtaatcatcatcatctccctttctgaaacttttgtcatcatgagagtgcgagccaaaccctgttatcagccttaaagcgaaacagtgagagagatagagacaccactttgcatgagaacgatatcactatcacatctcatcatcttattctaccatggccttcctaccttctcacggtttcacgtttaacactactcatgaagaagatcactgccacttccctccaacctctctcgacgccttcccctctttgccaccccagcactttcaagggggtgcacctttcatgttgaagcggtccatgtcgttatcaggcatagagaacaagtgcaatgaagtacatggagatgatgagttatccgatgatggggtcttccagagtggggagaagaagaagaggttgaatttggaacaggtgaaggcccttgagaagagttttgatcaggggaacaaacttgagccagaaaggaaagtgcagttagctaaggctttggggttgcagccaagacaagttgccatatggtttcagaatagaagggctagatggaaaaccaagcaattggagaaagaatatgaagtcctcaagaagcagtttgaagcagtcaaggctgataatgatgttcttaaggttcggaaccagaaactacaggcagagttacaagctgtaaaaagtagggattgttgtgaagctggaataatcagccttaagaaagaaactgagggttcatggagcaatggaagtgataacaactcagatctaaatttagatccctcaagagcactaggtttgaacagtcctatatcttctcataacattaaaaacctactaccaaattcgttaaagccaaacagcataacccaactccttcaagatgatggcttgtgcaacatgtttcacaacattgatgcaccacagaacttttggcccaggcctgatcagcaccaccagcgtttccattgaccctatataagtgatttttggatattaattaatgatatgatatgaggacaaattatacaatacaatcttttttattcagttttttttttccgatttatttatgtgcagtagattggtgtataaagtttgagcaaattaaatctgctattagagtcatgaggagtcggtggactttgagcagtgtaatttctttcctatatgtatacattattgtattacagaataatataaaataatatttaagttaggccg

SEQ ID NO: 8444 - protein, 268 aa, Glycine max
  peptide (1)..(268): Ceres Seq. ID no. 15171778
  misc_feature (79)..(133): Pfam Name: Pfam Description:  Homeobox domain
  misc_feature (1)..(268): NCBI GI NO: 15232066 NR Description: Homeobox-leucine zipper protein/HD-Ziptranscription factor
  misc_feature (1)..(268): NCBI GI NO: 21593221 NR Description: putative homeobox-leucine zipper protein, HAT7
  misc_feature (1)..(268): NCBI GI NO: 7446247 NR Description: homeotic protein - common sunflower
  misc_feature (1)..(209): NCBI GI NO: 15222452 NR Description: homeobox-leucine zipper protein ATHB-13
  misc_feature (1)..(209): NCBI GI NO: 21555784 NR Description: homeobox gene 13 protein [Arabidopsis thaliana]
  misc_feature (1)..(265): NCBI GI NO: 30685207 NR Description: Homeobox-leucine zipper protein HAT7
  misc_feature (19)..(208): NCBI GI NO: 19071644 NR Description: putative DNA-binding protein
  misc_feature (1)..(262): NCBI GI NO: 18396130 NR Description: homeobox-leucine zipper protein. putative
  misc_feature (45)..(265): NCBI GI NO: 21431775 NR Description: Homeobox-leucine zipper protein HAT7
  misc_feature (45)..(265): NCBI GI NO: 25453564 NR Description: homeobox protein HAT7
MAFLPSHGFTFNTTHEEDHCHFPPTSLDAFPSLPPQHFQGGAPFMLKRSMSLSGIENKCNEVHGDDELSDDGVFQSGEKKKRLNLEQVKALEKSFDQGNKLEPERKVQLAKALGLQPRQVAIWFQNRRARWKTKQLEKEYEVLKKQFEAVKADNDVLKVRNQKLQAELQAVKSRDCCEAGIISLKKETEGSWSNGSDNNSDLNLDPSRALGLNSPISSHNIKNLLPNSLKPNSITQLLQDDGLCNMFHNIDAPQNFWPRPDQHHQRFH

SEQ ID NO: 8445 - protein, 224 aa, Glycine max
  peptide (1)..(224): Ceres Seq. ID no. 15171779
  misc_feature (35)..(89): Pfam Name: Pfam Description:  Homeobox domain
  misc_feature (1)..(224): NCBI GI NO: 15232066 NR Description: Homeobox-leucine zipper protein/HD-Ziptranscription factor
  misc_feature (1)..(224): NCBI GI NO: 21593221 NR Description: putative homeobox-leucine zipper protein, HAT7
  misc_feature (1)..(224): NCBI GI NO: 7446247 NR Description: homeotic protein - common sunflower
  misc_feature (1)..(165): NCBI GI NO: 15222452 NR Description: homeobox-leucine zipper protein ATHB-13
  misc_feature (1)..(165): NCBI GI NO: 21555784 NR Description: homeobox gene 13 protein [Arabidopsis thaliana]
  misc_feature (1)..(221): NCBI GI NO: 30685207 NR Description: Homeobox-leucine zipper protein HAT7
  misc_feature (1)..(164): NCBI GI NO: 19071644 NR Description: putative DNA-binding protein
  misc_feature (1)..(218): NCBI GI NO: 18396130 NR Description: homeobox-leucine zipper protein. putative
  misc_feature (1)..(221): NCBI GI NO: 21431775 NR Description: Homeobox-leucine zipper protein HAT7
  misc_feature (1)..(221): NCBI GI NO: 25453564 NR Description: homeobox protein HAT7
MLKRSMSLSGIENKCNEVHGDDELSDDGVFQSGEKKKRLNLEQVKALEKSFDQGNKLEPERKVQLAKALGLQPRQVAIWFQNRRARWKTKQLEKEYEVLKKQFEAVKADNDVLKVRNQKLQAELQAVKSRDCCEAGIISLKKETEGSWSNGSDNNSDLNLDPSRALGLNSPISSHNIKNLLPNSLKPNSITQLLQDDGLCNMFHNIDAPQNFWPRPDQHHQRFH

SEQ ID NO: 8446 - protein, 219 aa, Glycine max
  peptide (1)..(219): Ceres Seq. ID no. 15171780
  misc_feature (30)..(84): Pfam Name: Pfam Description:  Homeobox domain
  misc_feature (1)..(219): NCBI GI NO: 15232066 NR Description: Homeobox-leucine zipper protein/HD-Ziptranscription factor
  misc_feature (1)..(219): NCBI GI NO: 21593221 NR Description: putative homeobox-leucine zipper protein, HAT7
  misc_feature (1)..(219): NCBI GI NO: 7446247 NR Description: homeotic protein - common sunflower
  misc_feature (1)..(160): NCBI GI NO: 15222452 NR Description: homeobox-leucine zipper protein ATHB-13
  misc_feature (1)..(160): NCBI GI NO: 21555784 NR Description: homeobox gene 13 protein [Arabidopsis thaliana]
  misc_feature (1)..(216): NCBI GI NO: 30685207 NR Description: Homeobox-leucine zipper protein HAT7
  misc_feature (1)..(159): NCBI GI NO: 19071644 NR Description: putative DNA-binding protein
  misc_feature (1)..(213): NCBI GI NO: 18396130 NR Description: homeobox-leucine zipper protein. putative
  misc_feature (1)..(216): NCBI GI NO: 21431775 NR Description: Homeobox-leucine zipper protein HAT7
  misc_feature (1)..(216): NCBI GI NO: 25453564 NR Description: homeobox protein HAT7
MSLSGIENKCNEVHGDDELSDDGVFQSGEKKKRLNLEQVKALEKSFDQGNKLEPERKVQLAKALGLQPRQVAIWFQNRRARWKTKQLEKEYEVLKKQFEAVKADNDVLKVRNQKLQAELQAVKSRDCCEAGIISLKKETEGSWSNGSDNNSDLNLDPSRALGLNSPISSHNIKNLLPNSLKPNSITQLLQDDGLCNMFHNIDAPQNFWPRPDQHHQRFH

SEQ ID NO: 8447 - DNA, 2018 bp, Glycine max
  misc_feature (1)..(2018): Ceres Seq. ID no. 14314404
acatttctcactctcgtctcgaagatcgagatatctatttagatctcagaaaaacagtgtttcatttcaattcattcagtcttattattattagggtttggcgattcagagagaaagagaaatgggagaacgaaaaggaatcccaattgctctggggctcttggcgatgctcctcttcttcattgcttcttcctcttcctctcacctcgttcgtgcttccgatgacgccgacgacgcgatcttctacgagtcattcgacgaggattttgacggacggtggattgtgtccgacaacgaggattacaacggtgtctggaagcatgctaagagtgatgggcatgatgattatggacttcttattagtgaacaagcccggaaatatgctatagtcaaaaaacttgacgagcctgtcagtcttaaggatggaacagttgttcttcagtttgagactcgccttcagaatggcctcgaatgtggtggcgcatatattaaatatcttcgaccccaggagagcggatggaaaccaaaggaatttgataacgaatctccatattctatcatgtttggtcctgataagtgtggtgctacaaacaaggtgcacttcattttcaagcataagaatccaaagagtggggagtatgttgaacaccatctcaagtatcctccttctgtcccatctgacaaactaactcatgtatacactgcaattctgaagcccgataatgaattgcaaattttgattgatggtgaggagaagaaaaaggcaaatttcttgtcttctgaggactttgagcctcctcttatcccttccaagacaatccctgatcctgatgataagaaacctgaggactgggacgaaagagccaaaatcccggacccaagtgctgtgaagccagatgactgggatgaggatgcacccatggaaattttagatgaagaagcagagaaacctgaaggatggttggatgacgagccagaggaaattgatgacccagaggcgacaaaacccgaagactgggatgatgaggaggatggtgaatgggaagccccaaagattgaaaacccgaagtgtgaggcagcccctggttgtggtgaatggaagaggccaatgaagaggaatccagcttataagggaaagtggagtgctccttacatcgataaccccaattacaagggcatatggaagcctcgcgagattccaaaccctgaatactttgaactcgagaaacctgattttgagcccattgctgctcttggcattgagatttggacaatgcaggatggcatcctatttgacaatattctgatagctaacgatgataaagttgcagaatcctatcgggagaccacatggaagcccaagtttaccattgagaaagaaaaacagaaggctgaagatgaggctgcaactggttcagatggtattgcaggcttccagaagaaggtatttgacctcttgtacaagattgcagacattcccttcctgagcgaccacaaatctaagatatacgatctcattgagaaagctgagaaacagccaaatctcactattggaattcttgtagcggttgtggttgtcttcgtgtcaattttcttcaggctcatatttggtggcaagaaacctgcaaaggtggagaagaaaccagaacgcacagaagcttccaataaccaaggtggtgcagagaatgaagaaaacaaagagaaagaggaagcatctaatgctccgcgtcggaggccaaggcgagaagattgaaatggttgaatcttttaaatggcgccctgtcaactatcatcaccacagctacagataaattttgggctttagtttcattttaggtgcactctgttttcattcgtttccttttttccctttttttttaagaaaaagaaaagattatttgcttcaggggtgtagatcttctcctgtttttggagacttgagtgtttgagctagtagttgaagttgtacaattattttttgtctttatttttctattaatggatcctgtttttaacac

SEQ ID NO: 8448 - protein, 543 aa, Glycine max
  peptide (1)..(543): Ceres Seq. ID no. 14314405
  misc_feature (39)..(396): Pfam Name: Pfam Description:  Calreticulin family
  misc_feature (1)..(542): NCBI GI NO: 3334138 NR Description: CALNEXIN HOMOLOG PRECURSOR
  misc_feature (1)..(543): NCBI GI NO: 11131469 NR Description: Calnexin homolog precursor
  misc_feature (36)..(542): NCBI GI NO: 21740628 NR Description: OSJNBb0012E08.10
  misc_feature (13)..(543): NCBI GI NO: 15240353 NR Description: calnexin 1 (CNX1) [Arabidopsis thaliana]
  misc_feature (37)..(543): NCBI GI NO: 31321896 NR Description: putative papillar cell-specific calnexin
  misc_feature (37)..(542): NCBI GI NO: 15240773 NR Description: calnexin, putative [Arabidopsis thaliana]
  misc_feature (37)..(542): NCBI GI NO: 473878 NR Description: calnexin homolog
  misc_feature (36)..(542): NCBI GI NO: 11131766 NR Description: Calnexin homolog precursor
  misc_feature (122)..(498): NCBI GI NO: 7441503 NR Description: calnexin - maize (fragment)
  misc_feature (38)..(540): NCBI GI NO: 18564808 NR Description: calnexin [Aspergillus niger]
MGERKGIPIALGLLAMLLFFIASSSSSHLVRASDDADDAIFYESFDEDFDGRWIVSDNEDYNGVWKHAKSDGHDDYGLLISEQARKYAIVKKLDEPVSLKDGTVVLQFETRLQNGLECGGAYIKYLRPQESGWKPKEFDNESPYSIMFGPDKCGATNKVHFIFKHKNPKSGEYVEHHLKYPPSVPSDKLTHVYTAILKPDNELQILIDGEEKKKANFLSSEDFEPPLIPSKTIPDPDDKKPEDWDERAKIPDPSAVKPDDWDEDAPMEILDEEAEKPEGWLDDEPEEIDDPEATKPEDWDDEEDGEWEAPKIENPKCEAAPGCGEWKRPMKRNPAYKGKWSAPYIDNPNYKGIWKPREIPNPEYFELEKPDFEPIAALGIEIWTMQDGILFDNILIANDDKVAESYRETTWKPKFTIEKEKQKAEDEAATGSDGIAGFQKKVFDLLYKIADIPFLSDHKSKIYDLIEKAEKQPNLTIGILVAVVVVFVSIFFRLIFGGKKPAKVEKKPERTEASNNQGGAENEENKEKEEASNAPRRRPRRED

SEQ ID NO: 8449 - protein, 528 aa, Glycine max
  peptide (1)..(528): Ceres Seq. ID no. 14314406
  misc_feature (24)..(381): Pfam Name: Pfam Description:  Calreticulin family
  misc_feature (1)..(527): NCBI GI NO: 3334138 NR Description: CALNEXIN HOMOLOG PRECURSOR
  misc_feature (1)..(528): NCBI GI NO: 11131469 NR Description: Calnexin homolog precursor
  misc_feature (21)..(527): NCBI GI NO: 21740628 NR Description: OSJNBb0012E08.10
  misc_feature (1)..(528): NCBI GI NO: 15240353 NR Description: calnexin 1 (CNX1) [Arabidopsis thaliana]
  misc_feature (22)..(528): NCBI GI NO: 31321896 NR Description: putative papillar cell-specific calnexin
  misc_feature (22)..(527): NCBI GI NO: 15240773 NR Description: calnexin, putative [Arabidopsis thaliana]
  misc_feature (22)..(527): NCBI GI NO: 473878 NR Description: calnexin homolog
  misc_feature (21)..(527): NCBI GI NO: 11131766 NR Description: Calnexin homolog precursor
  misc_feature (107)..(483): NCBI GI NO: 7441503 NR Description: calnexin - maize (fragment)
  misc_feature (23)..(525): NCBI GI NO: 18564808 NR Description: calnexin [Aspergillus niger]
MLLFFIASSSSSHLVRASDDADDAIFYESFDEDFDGRWIVSDNEDYNGVWKHAKSDGHDDYGLLISEQARKYAIVKKLDEPVSLKDGTVVLQFETRLQNGLECGGAYIKYLRPQESGWKPKEFDNESPYSIMFGPDKCGATNKVHFIFKHKNPKSGEYVEHHLKYPPSVPSDKLTHVYTAILKPDNELQILIDGEEKKKANFLSSEDFEPPLIPSKTIPDPDDKKPEDWDERAKIPDPSAVKPDDWDEDAPMEILDEEAEKPEGWLDDEPEEIDDPEATKPEDWDDEEDGEWEAPKIENPKCEAAPGCGEWKRPMKRNPAYKGKWSAPYIDNPNYKGIWKPREIPNPEYFELEKPDFEPIAALGIEIWTMQDGILFDNILIANDDKVAESYRETTWKPKFTIEKEKQKAEDEAATGSDGIAGFQKKVFDLLYKIADIPFLSDHKSKIYDLIEKAEKQPNLTIGILVAVVVVFVSIFFRLIFGGKKPAKVEKKPERTEASNNQGGAENEENKEKEEASNAPRRRPRRED

SEQ ID NO: 8450 - protein, 397 aa, Glycine max
  peptide (1)..(397): Ceres Seq. ID no. 14314407
  misc_feature (1)..(250): Pfam Name: Pfam Description:  Calreticulin family
  misc_feature (1)..(396): NCBI GI NO: 3334138 NR Description: CALNEXIN HOMOLOG PRECURSOR
  misc_feature (1)..(397): NCBI GI NO: 11131469 NR Description: Calnexin homolog precursor
  misc_feature (1)..(396): NCBI GI NO: 21740628 NR Description: OSJNBb0012E08.10
  misc_feature (1)..(397): NCBI GI NO: 15240353 NR Description: calnexin 1 (CNX1) [Arabidopsis thaliana]
  misc_feature (1)..(397): NCBI GI NO: 31321896 NR Description: putative papillar cell-specific calnexin
  misc_feature (1)..(396): NCBI GI NO: 15240773 NR Description: calnexin, putative [Arabidopsis thaliana]
  misc_feature (1)..(396): NCBI GI NO: 473878 NR Description: calnexin homolog
  misc_feature (1)..(396): NCBI GI NO: 11131766 NR Description: Calnexin homolog precursor
  misc_feature (1)..(352): NCBI GI NO: 7441503 NR Description: calnexin - maize (fragment)
  misc_feature (1)..(394): NCBI GI NO: 18564808 NR Description: calnexin [Aspergillus niger]
MFGPDKCGATNKVHFIFKHKNPKSGEYVEHHLKYPPSVPSDKLTHVYTAILKPDNELQILIDGEEKKKANFLSSEDFEPPLIPSKTIPDPDDKKPEDWDERAKIPDPSAVKPDDWDEDAPMEILDEEAEKPEGWLDDEPEEIDDPEATKPEDWDDEEDGEWEAPKIENPKCEAAPGCGEWKRPMKRNPAYKGKWSAPYIDNPNYKGIWKPREIPNPEYFELEKPDFEPIAALGIEIWTMQDGILFDNILIANDDKVAESYRETTWKPKFTIEKEKQKAEDEAATGSDGIAGFQKKVFDLLYKIADIPFLSDHKSKIYDLIEKAEKQPNLTIGILVAVVVVFVSIFFRLIFGGKKPAKVEKKPERTEASNNQGGAENEENKEKEEASNAPRRRPRRED

SEQ ID NO: 8451 - DNA, 1780 bp, Glycine max
  misc_feature (1)..(1780): Ceres Seq. ID no. 15177043
ctctctgaactctgaacaccgaaaatccgccatggattttcgcatctatggcgtcacgatccttctcttcctcttcccaaccctcacattctcaatctcacagggtcagataaactcaaactcaatccttgtcgctctgttggactcccattacaccgaactcgctgagcttgtggaaaaagccatgcttttgcagactctggagaacactgtcatgaacaacagcaacaacatcacaatcttcgctcccagaaacgaagccctcgaacgcgatctcgaccccgatttcaagcgtttcctcctcgaaccccgcaatctccattccctccaaaccctcctgttgtcccacatcgtccccaaaagaatcaccaaacccgaattcaaaaccgggtcgacccgacacagaactttagcgtctcaccaccacctcactctccaagccctgaatttgactcactggaatgttgagtcttcccgggttattaacccgaattcggtaacccgacccgacggagtgatccacggcatcgacactctcctcatccctcgctcagtccaagacgaattcaaccgtcgccggaatctgatctccatcgccgcggtaaaacccgaaccatccccggaggtcgacccgcgaacccaccggttaaagaaaccggcgccggcatcgccggcgggggccccgccggcgctcccgatctacgacgcgatggcgccggggccatcgcttgcaccggcgccagcgccgggtccgggtgggtctcacaagcacttcaatggggaaaagcaagtaaaagatttcatcgagacgttactccactacggcggctacaacgagatggcggatattctggtaaacctaacgtccctggcgacggagatgggaaggttggtttcggagggttacgttttgacggtgttagctcctaacgacgaggccatggcgaagttagcgacggagcaattaagtgaaccgggttcgcccgaacagattatgtactatcacttgatacccgagtatcagaccgaggagagcatgtacaatgccgtcagaaggttcgggaaggtccgttacgacacgttacggttgccgcacaaggtcacggcgcaggaggctgacggctccgttaagttcggccacggggacacgtctgcttacttgttcgaccccgatatttacacggatggacggatctccgttcagggaattgacggcgttctgtttccgcctcaggaggaagaagccgccgggcccgttacccgagcccagcccgctaaggtcgtcgtcaagcaaagaagaggaaaattgttggaaacagcatgttggatgcttggaagctttggacagaactctagattcatctcttgtcaatgaagagctcttatctggatgctagcaagactagttaagaacgaaaaccctgcacaggaaattccaaagatgtaaaaagtcaacggaatatgaaggccaggttacttgaaatgggttaatagcagcagctgctatggatttggttttcccacgtttttgtgatggtctttttttctttctccttctcgatttttcttcttgtggatttgggtcttggacttgagaacaaaagtttctcaagtctagtgaaaacaatatatagtgcaatttagattcagttaggaggttgtgttggtgggatgagaaggttttatgtaataagatggcagtgaaatctgtgcccgattcagtaagtaattttacaaaaatggaaatacagtaataatcaataaaatgattcttttctgt

SEQ ID NO: 8452 - protein, 457 aa, Glycine max
  peptide (1)..(457): Ceres Seq. ID no. 15177044
  misc_feature (38)..(182): Pfam Name: Pfam Description:  Fasciclin domain
  misc_feature (16)..(457): NCBI GI NO: 30686588 NR Description: expressed protein [Arabidopsis thaliana]
  misc_feature (20)..(457): NCBI GI NO: 15231197 NR Description: predicted GPI-anchored protein
  misc_feature (16)..(435): NCBI GI NO: 25370583 NR Description: hypothetical protein At2g35860
  misc_feature (35)..(456): NCBI GI NO: 18399319 NR Description: expressed protein [Arabidopsis thaliana]
  misc_feature (35)..(434): NCBI GI NO: 6041822 NR Description: unknown protein [Arabidopsis thaliana]
  misc_feature (33)..(457): NCBI GI NO: 33146739 NR Description: GPI-anchored protein -like
  misc_feature (11)..(437): NCBI GI NO: 15240029 NR Description: expressed protein [Arabidopsis thaliana]
  misc_feature (33)..(417): NCBI GI NO: 34899886 NR Description: OJ1714_H10.26
  misc_feature (35)..(425): NCBI GI NO: 27819499 NR Description: putative arabinogalactan-protein
  misc_feature (116)..(434): NCBI GI NO: 7486009 NR Description: hypothetical protein F22O6
SLNSEHRKSAMDFRIYGVTILLFLFPTLTFSISQGQINSNSILVALLDSHYTELAELVEKAMLLQTLENTVMNNSNNITIFAPRNEALERDLDPDFKRFLLEPRNLHSLQTLLLSHIVPKRITKPEFKTGSTRHRTLASHHHLTLQALNLTHWNVESSRVINPNSVTRPDGVIHGIDTLLIPRSVQDEFNRRRNLISIAAVKPEPSPEVDPRTHRLKKPAPASPAGAPPALPIYDAMAPGPSLAPAPAPGPGGSHKHFNGEKQVKDFIETLLHYGGYNEMADILVNLTSLATEMGRLVSEGYVLTVLAPNDEAMAKLATEQLSEPGSPEQIMYYHLIPEYQTEESMYNAVRRFGKVRYDTLRLPHKVTAQEADGSVKFGHGDTSAYLFDPDIYTDGRISVQGIDGVLFPPQEEEAAGPVTRAQPAKVVVKQRRGKLLETACWMLGSFGQNSRFISCQ

SEQ ID NO: 8453 - protein, 447 aa, Glycine max
  peptide (1)..(447): Ceres Seq. ID no. 15177045
  misc_feature (28)..(172): Pfam Name: Pfam Description:  Fasciclin domain
  misc_feature (6)..(447): NCBI GI NO: 30686588 NR Description: expressed protein [Arabidopsis thaliana]
  misc_feature (10)..(447): NCBI GI NO: 15231197 NR Description: predicted GPI-anchored protein
  misc_feature (6)..(425): NCBI GI NO: 25370583 NR Description: hypothetical protein At2g35860
  misc_feature (25)..(446): NCBI GI NO: 18399319 NR Description: expressed protein [Arabidopsis thaliana]
  misc_feature (25)..(424): NCBI GI NO: 6041822 NR Description: unknown protein [Arabidopsis thaliana]
  misc_feature (23)..(447): NCBI GI NO: 33146739 NR Description: GPI-anchored protein -like
  misc_feature (1)..(427): NCBI GI NO: 15240029 NR Description: expressed protein [Arabidopsis thaliana]
  misc_feature (23)..(407): NCBI GI NO: 34899886 NR Description: OJ1714_H10.26
  misc_feature (25)..(415): NCBI GI NO: 27819499 NR Description: putative arabinogalactan-protein
  misc_feature (106)..(424): NCBI GI NO: 7486009 NR Description: hypothetical protein F22O6
MDFRIYGVTILLFLFPTLTFSISQGQINSNSILVALLDSHYTELAELVEKAMLLQTLENTVMNNSNNITIFAPRNEALERDLDPDFKRFLLEPRNLHSLQTLLLSHIVPKRITKPEFKTGSTRHRTLASHHHLTLQALNLTHWNVESSRVINPNSVTRPDGVIHGIDTLLIPRSVQDEFNRRRNLISIAAVKPEPSPEVDPRTHRLKKPAPASPAGAPPALPIYDAMAPGPSLAPAPAPGPGGSHKHFNGEKQVKDFIETLLHYGGYNEMADILVNLTSLATEMGRLVSEGYVLTVLAPNDEAMAKLATEQLSEPGSPEQIMYYHLIPEYQTEESMYNAVRRFGKVRYDTLRLPHKVTAQEADGSVKFGHGDTSAYLFDPDIYTDGRISVQGIDGVLFPPQEEEAAGPVTRAQPAKVVVKQRRGKLLETACWMLGSFGQNSRFISCQ

SEQ ID NO: 8454 - protein, 396 aa, Glycine max
  peptide (1)..(396): Ceres Seq. ID no. 15177046
  misc_feature (1)..(121): Pfam Name: Pfam Description:  Fasciclin domain
  misc_feature (1)..(396): NCBI GI NO: 30686588 NR Description: expressed protein [Arabidopsis thaliana]
  misc_feature (1)..(396): NCBI GI NO: 15231197 NR Description: predicted GPI-anchored protein
  misc_feature (1)..(374): NCBI GI NO: 25370583 NR Description: hypothetical protein At2g35860
  misc_feature (1)..(395): NCBI GI NO: 18399319 NR Description: expressed protein [Arabidopsis thaliana]
  misc_feature (1)..(373): NCBI GI NO: 6041822 NR Description: unknown protein [Arabidopsis thaliana]
  misc_feature (1)..(396): NCBI GI NO: 33146739 NR Description: GPI-anchored protein -like
  misc_feature (1)..(376): NCBI GI NO: 15240029 NR Description: expressed protein [Arabidopsis thaliana]
  misc_feature (1)..(356): NCBI GI NO: 34899886 NR Description: OJ1714_H10.26
  misc_feature (1)..(364): NCBI GI NO: 27819499 NR Description: putative arabinogalactan-protein
  misc_feature (55)..(373): NCBI GI NO: 7486009 NR Description: hypothetical protein F22O6
MLLQTLENTVMNNSNNITIFAPRNEALERDLDPDFKRFLLEPRNLHSLQTLLLSHIVPKRITKPEFKTGSTRHRTLASHHHLTLQALNLTHWNVESSRVINPNSVTRPDGVIHGIDTLLIPRSVQDEFNRRRNLISIAAVKPEPSPEVDPRTHRLKKPAPASPAGAPPALPIYDAMAPGPSLAPAPAPGPGGSHKHFNGEKQVKDFIETLLHYGGYNEMADILVNLTSLATEMGRLVSEGYVLTVLAPNDEAMAKLATEQLSEPGSPEQIMYYHLIPEYQTEESMYNAVRRFGKVRYDTLRLPHKVTAQEADGSVKFGHGDTSAYLFDPDIYTDGRISVQGIDGVLFPPQEEEAAGPVTRAQPAKVVVKQRRGKLLETACWMLGSFGQNSRFISCQ

SEQ ID NO: 8455 - DNA, 1614 bp, Glycine max
  misc_feature (1)..(1614): Ceres Seq. ID no. 14314280
aaacactagtagtctagtacattacatcacaaaaatatcatccctctttgttcctaaacacggggcactggtttcgaaccctcgttgtggttaggtcttcttcacctttcgaattttggaatccatgggtcagggaactccgggcggcatgaaccggcagggcgaccggaagccggacggcggcgacaagaaggagaagaagttcgagccgtcggctccgccggcgcgcgtggggcggaaacagcggaagcagaaaggtccggaggcggcggcgcggttgccgacagtgactccggtgacgaagtgcaaactgcggcttctgaagctggagcggatcaaggactaccttctgatggaggaggagttcgtggcgaatcaggagcgactcaagccgcaggaggagaaggccgaggaagacagatccaaggtcgatgatctccgaggctctcccatgagcgtcggaaacctcgaagagctcatcgacgagaatcacgctattgtctcctcctccgttgggcctgagtactatgtcggaatcctgtctttcgttgataaggatcagttggagcctggttgtgctattttgatgcataataaggttctttctgttgttgggcttcttcaagatgaagttgatccaatggtctctgtcatgaaggttgagaaggctcctctggaatcttatgctgacattggtggtttagatgcccaaatacaggaaattaaagaagcagttgagctacccctgacgcatcctgaactatatgaagacattggtatcaagcctcctaagggggtcattttatatggagaacctggaactgggaagacattgcttgcgaaggctgtggcaaactcaacatcagcaacattcttgcgtgttgttggtagtgaactgatacaaaagtacttgggagatggcccaaaacttgtaagagaacttttcagagttgctgatgatctttctccttctattgtattcattgatgaaattgatgcagttggtacaaaaaggtatgatgctcactcaggaggagaacgtgaaattcaaaggaccatgctagagttgctgaaccagttagatggttttgattcaagaggagatgtgaaagtgattctggcaaccaacagaattgaaagtcttgatccagctttgctacgacctggtcgaattgacaggaagatagaatttcctcttcctgatatcaaaacaaggagacgcatcttccagatacacacgtcaaggatgacattagctgatgatgtcaacttggaagaatttgttatgactaaagacgaattctccggagctgatataaaggcaatatgtactgaagctggtttacttgctctacgagaacgtcgaatgaaggtgactcatgccgactttaagaaggccaaggataaagtgatgtttaagaagaaagaaggggtgcctgaagggctgtatatgtgaaaaactatcctctattatctctggccctcttgtctttcttttaacgttctagttatgcgaacaaatgccaattcatttgtattctgcgaacaaatgtcagttgtattttaggggctttgaatctcaacaacgattttaattcaatatagttttctttc

SEQ ID NO: 8456 - protein, 443 aa, Glycine max
  peptide (1)..(443): Ceres Seq. ID no. 14314281
  misc_feature (224)..(411): Pfam Name: AAA Pfam Description: ATPase family associated with various cellular activities
  misc_feature (1)..(443): NCBI GI NO: 15235544 NR Description: 26S proteasome AAA-ATPase subunit RPT2a
  misc_feature (1)..(443): NCBI GI NO: 15225307 NR Description: 26S proteasome subunit 4 [Arabidopsis thaliana]
  misc_feature (1)..(443): NCBI GI NO: 6652880 NR Description: 26S proteasome AAA-ATPase subunit RPT2a
  misc_feature (1)..(443): NCBI GI NO: 13937244 NR Description: At2g20140/T2G17.6 [Arabidopsis thaliana]
  misc_feature (1)..(443): NCBI GI NO: 21593177 NR Description: 26S proteasome subunit 4 [Arabidopsis thaliana]
  misc_feature (1)..(443): NCBI GI NO: 11045086 NR Description: 26S proteasome subunit 4-like protein
  misc_feature (1)..(443): NCBI GI NO: 1172635 NR Description: 26S PROTEASE REGULATORY SUBUNIT 4 HOMOLOG
  misc_feature (1)..(443): NCBI GI NO: 17297987 NR Description: 26S proteasome regulatory particle triple-A ATPase subunit2b
  misc_feature (1)..(443): NCBI GI NO: 18479040 NR Description: 26S proteasome regulatory subunit IV
  misc_feature (1)..(443): NCBI GI NO: 31207505 NR Description: ENSANGP00000017098 [Anopheles gambiae]
MGQGTPGGMNRQGDRKPDGGDKKEKKFEPSAPPARVGRKQRKQKGPEAAARLPTVTPVTKCKLRLLKLERIKDYLLMEEEFVANQERLKPQEEKAEEDRSKVDDLRGSPMSVGNLEELIDENHAIVSSSVGPEYYVGILSFVDKDQLEPGCAILMHNKVLSVVGLLQDEVDPMVSVMKVEKAPLESYADIGGLDAQIQEIKEAVELPLTHPELYEDIGIKPPKGVILYGEPGTGKTLLAKAVANSTSATFLRVVGSELIQKYLGDGPKLVRELFRVADDLSPSIVFIDEIDAVGTKRYDAHSGGEREIQRTMLELLNQLDGFDSRGDVKVILATNRIESLDPALLRPGRIDRKIEFPLPDIKTRRRIFQIHTSRMTLADDVNLEEFVMTKDEFSGADIKAICTEAGLLALRERRMKVTHADFKKAKDKVMFKKKEGVPEGLYM

SEQ ID NO: 8457 - protein, 435 aa, Glycine max
  peptide (1)..(435): Ceres Seq. ID no. 14314282
  misc_feature (216)..(403): Pfam Name: AAA Pfam Description: ATPase family associated with various cellular activities
  misc_feature (1)..(435): NCBI GI NO: 15235544 NR Description: 26S proteasome AAA-ATPase subunit RPT2a
  misc_feature (1)..(435): NCBI GI NO: 15225307 NR Description: 26S proteasome subunit 4 [Arabidopsis thaliana]
  misc_feature (1)..(435): NCBI GI NO: 6652880 NR Description: 26S proteasome AAA-ATPase subunit RPT2a
  misc_feature (1)..(435): NCBI GI NO: 13937244 NR Description: At2g20140/T2G17.6 [Arabidopsis thaliana]
  misc_feature (1)..(435): NCBI GI NO: 21593177 NR Description: 26S proteasome subunit 4 [Arabidopsis thaliana]
  misc_feature (1)..(435): NCBI GI NO: 11045086 NR Description: 26S proteasome subunit 4-like protein
  misc_feature (1)..(435): NCBI GI NO: 1172635 NR Description: 26S PROTEASE REGULATORY SUBUNIT 4 HOMOLOG
  misc_feature (1)..(435): NCBI GI NO: 17297987 NR Description: 26S proteasome regulatory particle triple-A ATPase subunit2b
  misc_feature (1)..(435): NCBI GI NO: 18479040 NR Description: 26S proteasome regulatory subunit IV
  misc_feature (1)..(435): NCBI GI NO: 31207505 NR Description: ENSANGP00000017098 [Anopheles gambiae]
MNRQGDRKPDGGDKKEKKFEPSAPPARVGRKQRKQKGPEAAARLPTVTPVTKCKLRLLKLERIKDYLLMEEEFVANQERLKPQEEKAEEDRSKVDDLRGSPMSVGNLEELIDENHAIVSSSVGPEYYVGILSFVDKDQLEPGCAILMHNKVLSVVGLLQDEVDPMVSVMKVEKAPLESYADIGGLDAQIQEIKEAVELPLTHPELYEDIGIKPPKGVILYGEPGTGKTLLAKAVANSTSATFLRVVGSELIQKYLGDGPKLVRELFRVADDLSPSIVFIDEIDAVGTKRYDAHSGGEREIQRTMLELLNQLDGFDSRGDVKVILATNRIESLDPALLRPGRIDRKIEFPLPDIKTRRRIFQIHTSRMTLADDVNLEEFVMTKDEFSGADIKAICTEAGLLALRERRMKVTHADFKKAKDKVMFKKKEGVPEGLYM

SEQ ID NO: 8458 - protein, 367 aa, Glycine max
  peptide (1)..(367): Ceres Seq. ID no. 14314283
  misc_feature (148)..(335): Pfam Name: AAA Pfam Description: ATPase family associated with various cellular activities
  misc_feature (1)..(367): NCBI GI NO: 15235544 NR Description: 26S proteasome AAA-ATPase subunit RPT2a
  misc_feature (1)..(367): NCBI GI NO: 15225307 NR Description: 26S proteasome subunit 4 [Arabidopsis thaliana]
  misc_feature (1)..(367): NCBI GI NO: 6652880 NR Description: 26S proteasome AAA-ATPase subunit RPT2a
  misc_feature (1)..(367): NCBI GI NO: 13937244 NR Description: At2g20140/T2G17.6 [Arabidopsis thaliana]
  misc_feature (1)..(367): NCBI GI NO: 21593177 NR Description: 26S proteasome subunit 4 [Arabidopsis thaliana]
  misc_feature (1)..(367): NCBI GI NO: 11045086 NR Description: 26S proteasome subunit 4-like protein
  misc_feature (1)..(367): NCBI GI NO: 1172635 NR Description: 26S PROTEASE REGULATORY SUBUNIT 4 HOMOLOG
  misc_feature (1)..(367): NCBI GI NO: 17297987 NR Description: 26S proteasome regulatory particle triple-A ATPase subunit2b
  misc_feature (1)..(367): NCBI GI NO: 18479040 NR Description: 26S proteasome regulatory subunit IV
  misc_feature (1)..(367): NCBI GI NO: 31207505 NR Description: ENSANGP00000017098 [Anopheles gambiae]
MEEEFVANQERLKPQEEKAEEDRSKVDDLRGSPMSVGNLEELIDENHAIVSSSVGPEYYVGILSFVDKDQLEPGCAILMHNKVLSVVGLLQDEVDPMVSVMKVEKAPLESYADIGGLDAQIQEIKEAVELPLTHPELYEDIGIKPPKGVILYGEPGTGKTLLAKAVANSTSATFLRVVGSELIQKYLGDGPKLVRELFRVADDLSPSIVFIDEIDAVGTKRYDAHSGGEREIQRTMLELLNQLDGFDSRGDVKVILATNRIESLDPALLRPGRIDRKIEFPLPDIKTRRRIFQIHTSRMTLADDVNLEEFVMTKDEFSGADIKAICTEAGLLALRERRMKVTHADFKKAKDKVMFKKKEGVPEGLYM

SEQ ID NO: 8459 - DNA, 1739 bp, Glycine max
  misc_feature (1)..(1739): Ceres Seq. ID no. 15171805
ctattcttacacggcatggatctcgtggccactctgttttagtttaatcagaagcaaaatccacaaaactaacagtgtattaaaatttctgaacctgaaaaattgttattattttgatagggtttataggaaaagcagcatacccgagttcacaaacactgaacgccgctgctccgtagtttcgatcgacgcattcttcacttcaagatatcacaatgtctataacgcacagcctcactactccactctcttcttcttcctctgctttcttagctccttcttccttcaattgcaggggacaggtttcgttgcctgtgaagagcgtgagcatttgcaaatgcgttgccacacccgaagctgagactgcctacaagacaggggtcaatcgcaatccaaatatggggaaacttcaagctggctatctctttcccgagattgctagaagaaggtctgcgcacttgctgaagtaccctgatgctaaagtaataagccttggaattggtgatacaactgaacctattcctgaagtcataactgatgcaatgtcaaagagatcacatgcattgtcgactatagaaggatacagtgggtatggagctgaacaaggtgaaaagccattaagaagggcacttgcttcaacattttacagcgatcttggcatagaagaggatgatatatttgtctcagatggagcaaagtgtgatatatctcgtctccagattgtctttgggtcaaatgtaaaaatggctgtgcaagacccttcatatccggcctatgtagactctagtgtaattatgggccagactggcctcttccagaagaatgttgagaagtttgcaaacattgaatacatgaggtgtaatccggaaaatggtttcttccctgatttgtcttcaatttctcgaccagatataatatttttctgttctccaaacaatcctactggtgctgtggcaacaagggaacaactgacccaactagttcagtttgctaaggacaatggttctatagtaatccacgattcagcttatgcaatgtatatttctggtgacaaccctcgctcaatatttgaaattcctggagccaaagaggttgccattgagacttcatcatttagcaagtatgctgggttcactggagtccgattgggttggactgtggttccgaagcagttgctgttttctgatggatttcctgttgccaaggacttcaaccgtattgtatgcacttgtttcaatggtgcttcaaatatttcccaggcaggcggtctggcttgcctttcaccagaaggtcttaaggctatgcgtgatgttattggattctacaaggaaaatactaacataataatggagacatttgattctcttgggtttaaagtctatggagggaaagatgcaccatatgtgtgggtccattttcccggccgaagctcatgggatgtattcgctgagattcttgagaagactcatgtggttacaacccctggtagtggttttggacctggtggtgaaggttttatcagggttagtgcctttggtcacagggaaaatgtcttggaggcatgcagaaggttcaagcagctatacaagtgaagttagaatatctcatttggtttcaagagttgttctcttggactgaagctagggctgtcttatttaaataatgcaattgattttccgtggagtttagattataagatgtaaagacagggtttatcaattgaggaagtatatttttct

SEQ ID NO: 8460 - protein, 458 aa, Glycine max
  peptide (1)..(458): Ceres Seq. ID no. 15171806
  misc_feature (147)..(457): Pfam Name: Pfam Description:  Aminotransferase class I and II
  misc_feature (1)..(458): NCBI GI NO: 18418270 NR Description: aminotransferase family [Arabidopsis thaliana]
  misc_feature (35)..(458): NCBI GI NO: 7447845 NR Description: probable transaminase (EC 2.6.1.-) T16L1.170
  misc_feature (12)..(458): NCBI GI NO: 37703720 NR Description: putative aminotransferase AGD2
  misc_feature (53)..(454): NCBI GI NO: 37703722 NR Description: putative aminotransferase ALD1
  misc_feature (53)..(454): NCBI GI NO: 24414269 NR Description: Putative transaminase
  misc_feature (48)..(457): NCBI GI NO: 25315768 NR Description: probable aspartate aminotransferase
  misc_feature (54)..(457): NCBI GI NO: 18397344 NR Description: aminotransferase family [Arabidopsis thaliana]
  misc_feature (57)..(456): NCBI GI NO: 24213476 NR Description: aminotransferase
  misc_feature (59)..(456): NCBI GI NO: 23022290 NR Description: hypothetical protein
  misc_feature (59)..(458): NCBI GI NO: 17232595 NR Description: aminotransferase [Nostoc sp. PCC 7120]
MSITHSLTTPLSSSSSAFLAPSSFNCRGQVSLPVKSVSICKCVATPEAETAYKTGVNRNPNMGKLQAGYLFPEIARRRSAHLLKYPDAKVISLGIGDTTEPIPEVITDAMSKRSHALSTIEGYSGYGAEQGEKPLRRALASTFYSDLGIEEDDIFVSDGAKCDISRLQIVFGSNVKMAVQDPSYPAYVDSSVIMGQTGLFQKNVEKFANIEYMRCNPENGFFPDLSSISRPDIIFFCSPNNPTGAVATREQLTQLVQFAKDNGSIVIHDSAYAMYISGDNPRSIFEIPGAKEVAIETSSFSKYAGFTGVRLGWTVVPKQLLFSDGFPVAKDFNRIVCTCFNGASNISQAGGLACLSPEGLKAMRDVIGFYKENTNIIMETFDSLGFKVYGGKDAPYVWVHFPGRSSWDVFAEILEKTHVVTTPGSGFGPGGEGFIRVSAFGHRENVLEACRRFKQLYK

SEQ ID NO: 8461 - protein, 397 aa, Glycine max
  peptide (1)..(397): Ceres Seq. ID no. 15171807
  misc_feature (86)..(396): Pfam Name: Pfam Description:  Aminotransferase class I and II
  misc_feature (1)..(397): NCBI GI NO: 18418270 NR Description: aminotransferase family [Arabidopsis thaliana]
  misc_feature (1)..(397): NCBI GI NO: 7447845 NR Description: probable transaminase (EC 2.6.1.-) T16L1.170
  misc_feature (1)..(397): NCBI GI NO: 37703720 NR Description: putative aminotransferase AGD2
  misc_feature (1)..(393): NCBI GI NO: 37703722 NR Description: putative aminotransferase ALD1
  misc_feature (1)..(393): NCBI GI NO: 24414269 NR Description: Putative transaminase
  misc_feature (1)..(396): NCBI GI NO: 25315768 NR Description: probable aspartate aminotransferase
  misc_feature (1)..(396): NCBI GI NO: 18397344 NR Description: aminotransferase family [Arabidopsis thaliana]
  misc_feature (1)..(395): NCBI GI NO: 24213476 NR Description: aminotransferase
  misc_feature (1)..(395): NCBI GI NO: 23022290 NR Description: hypothetical protein
  misc_feature (1)..(397): NCBI GI NO: 17232595 NR Description: aminotransferase [Nostoc sp. PCC 7120]
MGKLQAGYLFPEIARRRSAHLLKYPDAKVISLGIGDTTEPIPEVITDAMSKRSHALSTIEGYSGYGAEQGEKPLRRALASTFYSDLGIEEDDIFVSDGAKCDISRLQIVFGSNVKMAVQDPSYPAYVDSSVIMGQTGLFQKNVEKFANIEYMRCNPENGFFPDLSSISRPDIIFFCSPNNPTGAVATREQLTQLVQFAKDNGSIVIHDSAYAMYISGDNPRSIFEIPGAKEVAIETSSFSKYAGFTGVRLGWTVVPKQLLFSDGFPVAKDFNRIVCTCFNGASNISQAGGLACLSPEGLKAMRDVIGFYKENTNIIMETFDSLGFKVYGGKDAPYVWVHFPGRSSWDVFAEILEKTHVVTTPGSGFGPGGEGFIRVSAFGHRENVLEACRRFKQLYK

SEQ ID NO: 8462 - protein, 349 aa, Glycine max
  peptide (1)..(349): Ceres Seq. ID no. 15171808
  misc_feature (38)..(348): Pfam Name: Pfam Description:  Aminotransferase class I and II
  misc_feature (1)..(349): NCBI GI NO: 18418270 NR Description: aminotransferase family [Arabidopsis thaliana]
  misc_feature (1)..(349): NCBI GI NO: 7447845 NR Description: probable transaminase (EC 2.6.1.-) T16L1.170
  misc_feature (1)..(349): NCBI GI NO: 37703720 NR Description: putative aminotransferase AGD2
  misc_feature (1)..(345): NCBI GI NO: 37703722 NR Description: putative aminotransferase ALD1
  misc_feature (1)..(345): NCBI GI NO: 24414269 NR Description: Putative transaminase
  misc_feature (1)..(348): NCBI GI NO: 25315768 NR Description: probable aspartate aminotransferase
  misc_feature (1)..(348): NCBI GI NO: 18397344 NR Description: aminotransferase family [Arabidopsis thaliana]
  misc_feature (1)..(347): NCBI GI NO: 24213476 NR Description: aminotransferase
  misc_feature (1)..(347): NCBI GI NO: 23022290 NR Description: hypothetical protein
  misc_feature (1)..(349): NCBI GI NO: 17232595 NR Description: aminotransferase [Nostoc sp. PCC 7120]
MSKRSHALSTIEGYSGYGAEQGEKPLRRALASTFYSDLGIEEDDIFVSDGAKCDISRLQIVFGSNVKMAVQDPSYPAYVDSSVIMGQTGLFQKNVEKFANIEYMRCNPENGFFPDLSSISRPDIIFFCSPNNPTGAVATREQLTQLVQFAKDNGSIVIHDSAYAMYISGDNPRSIFEIPGAKEVAIETSSFSKYAGFTGVRLGWTVVPKQLLFSDGFPVAKDFNRIVCTCFNGASNISQAGGLACLSPEGLKAMRDVIGFYKENTNIIMETFDSLGFKVYGGKDAPYVWVHFPGRSSWDVFAEILEKTHVVTTPGSGFGPGGEGFIRVSAFGHRENVLEACRRFKQLYK

SEQ ID NO: 8463 - DNA, 1756 bp, Glycine max
  misc_feature (1)..(1756): Ceres Seq. ID no. 15179924
acactcacacatactcctttttccgttattaccctaaaacatcctccatctacaacacacactcttactcttactaatccaacctcctttgcccctcatgcactaccattaacattaccctctcttttttttctccctcacgaaccttcatttcttctcccgccatggatccttgccctttcgtgaggctcacagtcggcaacctcgccctcaaaattcccgttgcttctaaacccgcgctctccgttgttcatccttcttcttctccttgtttctgcaaaatcaagctcaagaattttcctcttcaatccgccgtcgttcctttcattcctccggaaagccacttccccgactcgcaggtgcatcctattgccgccacgttccacctcagcaagtccgatatcgacaagctcgccggaaaatccatcttcgccgggaagctctgcctcaaaatctcgatctacaccggccggagaggcaccacctgcggcgtcagctccgggagactcctcggccgagtttccgtgcccttggatctcaccggaacggtagccaagaccacagtgttccacaatggttggattaggataggaaaagatgccaaaggctcctccgcgcagtttcatttgaatgtaaaagccgaacccgatcctagatttgtcttccagttcgacggcgaacctgaatgcagtcctcaagttttccagatccaaggcaacatttcacaacctgtttttacctgcaagttcagtttcagaaacaatggcgaccggaatcaccgttccagatcgttacaatcggaaccaggaggttctagaagctggttgagttcgttcggaagcgagcgcgagaggccggggaaggagcgcaaaggatggtccataacggttcacgatctttccggttcaccggtggccgcagcttccatggtcacgcctttcgtcgcttcgcccggttcggaccgggtgagctgctccaaccccggctcgtggctcattcttcgtcctagcgacggcacgtggaagccctgggggaggctcgaggcgtggcgcgaacgcggcggctccgacggcctcggctaccgtttcgaactcattccggacaccaacggcggtatgagcgccgccggcatagtgcttgcggaatccacgctgagcaataacaaaggtggaaagttcgtcatcgatttgagttgtcgtaacggtaacgttagcggaaacggtggatctaatggccgtgcgacgccggggagcgcgacgtcgccggcgtgcagcccgaggagtagtggagattatggatacggcctctggccttattgtatgtatagaggttttgtaatgtcggcgagcgtggagggtgaggggaggtgcagcaagcctacagtggaggtgagcgtgccgcacgtgaattgcacggaggatgcggcggcgtttgtggctttagcggctgccgttgatctgagcgtggatgcgtgcaggcttttctcgcaacggctgaggaaggaactgtgccagcagctggatttgattggctgattccgccgtttttctttgtcgttttttctaatatttttgtttaatggggttgttcattttgagtgagaagcattttactactaacaaacaatttacaggctgtacaggggaaggagagagtattgcagtgcgcgctgtctattcacgtgtggcttttcattgattttctctcttcttttttcatcagttgtggggaatcaagaaaaagcttttttgttttg

SEQ ID NO: 8464 - protein, 456 aa, Glycine max
  peptide (1)..(456): Ceres Seq. ID no. 15179925
  misc_feature (255)..(451): Pfam Name: DUF1005 Pfam Description: Protein of unknown function
  misc_feature (1)..(451): NCBI GI NO: 15218372 NR Description: expressed protein [Arabidopsis thaliana]
  misc_feature (29)..(455): NCBI GI NO: 32352156 NR Description: hypothetical protein
  misc_feature (1)..(361): NCBI GI NO: 15233530 NR Description: expressed protein [Arabidopsis thaliana]
  misc_feature (388)..(449): NCBI GI NO: 15233530 NR Description: expressed protein [Arabidopsis thaliana]
  misc_feature (66)..(454): NCBI GI NO: 15230917 NR Description: expressed protein [Arabidopsis thaliana]
  misc_feature (1)..(109): NCBI GI NO: 15230917 NR Description: expressed protein [Arabidopsis thaliana]
  misc_feature (1)..(455): NCBI GI NO: 15222861 NR Description: expressed protein [Arabidopsis thaliana]
  misc_feature (66)..(454): NCBI GI NO: 18176372 NR Description: unknown protein [Arabidopsis thaliana]
  misc_feature (1)..(363): NCBI GI NO: 36104436 NR Description: unknown protein
  misc_feature (69)..(363): NCBI GI NO: 34896878 NR Description: unknown protein
MDPCPFVRLTVGNLALKIPVASKPALSVVHPSSSPCFCKIKLKNFPLQSAVVPFIPPESHFPDSQVHPIAATFHLSKSDIDKLAGKSIFAGKLCLKISIYTGRRGTTCGVSSGRLLGRVSVPLDLTGTVAKTTVFHNGWIRIGKDAKGSSAQFHLNVKAEPDPRFVFQFDGEPECSPQVFQIQGNISQPVFTCKFSFRNNGDRNHRSRSLQSEPGGSRSWLSSFGSERERPGKERKGWSITVHDLSGSPVAAASMVTPFVASPGSDRVSCSNPGSWLILRPSDGTWKPWGRLEAWRERGGSDGLGYRFELIPDTNGGMSAAGIVLAESTLSNNKGGKFVIDLSCRNGNVSGNGGSNGRATPGSATSPACSPRSSGDYGYGLWPYCMYRGFVMSASVEGEGRCSKPTVEVSVPHVNCTEDAAAFVALAAAVDLSVDACRLFSQRLRKELCQQLDLIG

SEQ ID NO: 8465 - DNA, 744 bp, Glycine max
  misc_feature (1)..(744): Ceres Seq. ID no. 12608140
aatatctaccattcactactttgattccctgagatttctgcaatctacaaaaattcactatgggagtcacaacctttacacaggaatactcctcctctgttgccccatcacgcatgttcaaggccttgattgtagactccagaaatttgcttccaaagctcttacctcagtttgtaaaagatgtgaatgtgatccaaggtgatggtgaagctggaagcattgaacaagttaacttcaatgaagctagccccttcaaatatctgaaacacaggattgatgtgcttgacaaggacaacttggtttgcaaatacactatgattgaaggggatccattgggcgacaagcttgattctataggttatgaggtgaagtttgaggctactagtgatggaggttgcctatgcaaaatgacaagcaattacaataccattggagagattgatgttaaagaggaagaggtaaaggaaggaagggaaagcggtattgcagtttacagagttgtggagtcatacctgctcgagaacccacaagtgtatgcttaatcacttgcttatttattgtgtcatgtatcatacgatataaaaacatattcaattttttaataacggtgtgcaaccaaatatagggttgtttagaatggttgcaaagacttgaattccttaataagtccttattgtatgaacagccaaaaatggctagtggtttgccaaaaatatttgtactttggtagtaaaaaagagtgaa

SEQ ID NO: 8466 - protein, 160 aa, Glycine max
  peptide (1)..(160): Ceres Seq. ID no. 12608141
  misc_feature (1)..(155): Pfam Name: Pfam Description:  Pathogenesis-related protein Bet v I family
  misc_feature (1)..(160): NCBI GI NO: 131026 NR Description: Pathogenesis-related protein STH-2
  misc_feature (1)..(160): NCBI GI NO: 131025 NR Description: Pathogenesis-related protein STH-21
  misc_feature (1)..(159): NCBI GI NO: 14423842 NR Description: Major allergen Pru ar 1
  misc_feature (1)..(159): NCBI GI NO: 7106538 NR Description: similar to PR-10 [Vigna unguiculata]
  misc_feature (1)..(159): NCBI GI NO: 27922941 NR Description: major allergen Mal d 1 [Malus x domestica]
  misc_feature (1)..(159): NCBI GI NO: 11182126 NR Description: pathogenesis-related protein 10 [Vitis vinifera]
  misc_feature (1)..(159): NCBI GI NO: 7388028 NR Description: Major allergen Pru av 1 (Pru a 1)
  misc_feature (1)..(159): NCBI GI NO: 15418738 NR Description: ribonuclease-like PR-10b [Malus x domestica]
  misc_feature (3)..(159): NCBI GI NO: 13787043 NR Description: Chain A
  misc_feature (1)..(138): NCBI GI NO: 7442187 NR Description: TSI-1 protein - tomato
MGVTTFTQEYSSSVAPSRMFKALIVDSRNLLPKLLPQFVKDVNVIQGDGEAGSIEQVNFNEASPFKYLKHRIDVLDKDNLVCKYTMIEGDPLGDKLDSIGYEVKFEATSDGGCLCKMTSNYNTIGEIDVKEEEVKEGRESGIAVYRVVESYLLENPQVYA

SEQ ID NO: 8467 - protein, 142 aa, Glycine max
  peptide (1)..(142): Ceres Seq. ID no. 12608142
  misc_feature (1)..(137): Pfam Name: Pfam Description:  Pathogenesis-related protein Bet v I family
  misc_feature (1)..(142): NCBI GI NO: 131026 NR Description: Pathogenesis-related protein STH-2
  misc_feature (1)..(142): NCBI GI NO: 131025 NR Description: Pathogenesis-related protein STH-21
  misc_feature (1)..(141): NCBI GI NO: 14423842 NR Description: Major allergen Pru ar 1
  misc_feature (1)..(141): NCBI GI NO: 7106538 NR Description: similar to PR-10 [Vigna unguiculata]
  misc_feature (1)..(141): NCBI GI NO: 27922941 NR Description: major allergen Mal d 1 [Malus x domestica]
  misc_feature (1)..(141): NCBI GI NO: 11182126 NR Description: pathogenesis-related protein 10 [Vitis vinifera]
  misc_feature (1)..(141): NCBI GI NO: 7388028 NR Description: Major allergen Pru av 1 (Pru a 1)
  misc_feature (1)..(141): NCBI GI NO: 15418738 NR Description: ribonuclease-like PR-10b [Malus x domestica]
  misc_feature (1)..(141): NCBI GI NO: 13787043 NR Description: Chain A
  misc_feature (1)..(120): NCBI GI NO: 7442187 NR Description: TSI-1 protein - tomato
MFKALIVDSRNLLPKLLPQFVKDVNVIQGDGEAGSIEQVNFNEASPFKYLKHRIDVLDKDNLVCKYTMIEGDPLGDKLDSIGYEVKFEATSDGGCLCKMTSNYNTIGEIDVKEEEVKEGRESGIAVYRVVESYLLENPQVYA

SEQ ID NO: 8468 - DNA, 1365 bp, Glycine max
  misc_feature (1)..(1365): Ceres Seq. ID no. 14314415
ctctcacgcacacatggtgctgccactgtcactcttctcttctcctttctgcttcgccgattctctatttttgcgcgcaatcgagtaacttgattgcatgtggtcctaaacttgcaggatggattgtatgctttgggccagtcgttaatgataacttgaggtctggatgatgctttctgattggttgtttacatattgtaattcagaatgtggaactttgcatcgaattgcattgctggaactgtgggactgaaaaatgattcaaagcctactcattctgcttcggaatgttctgatgatgaaaactctgttataggcagagaggaagggctggaatgcccaatatgctgggaatctttcaatattgttgaaaatgtgccctatgttttatggtgtggccacaccctttgtaaaaattgtatcctcggactgcagtgggctgttgtgaaatttccaacactgcctgttcaacttcccctttttatctcctgtccatggtgcaaccttctgtctttccgtttagtttaccggggaaaccttaaattccctcgcaaaaactactttcttctttggatggttgagagcatgaatggtgatagagggaaatcgcattcacctttctgtggtgataatcagcaacactcaattaaagataatttaaccatgggaagccaagtaagccatggaaaccttcggagggggctagttcgccatccagagacatcgagttccaaccaatatcatggtaatactggtaatcacctcaatacagaaagatttcatgtttatcttcggaagtcactgatcttctttgtccagttgacggctaagttcccattggtcattatattccttttaattgtcttatatgcaataccagcaagtgcagccattttggccctgtatgtacttgttacaattctgtttgccctcccatcatttctcattttgtacttctcatatcctagtttggattggcttgtgagggaaattatcacttaagattgtgaactagtgtaggctccaactttgcaaacattaagacaacagcttatatcttctactttgtaattatccgacttctcctttagaagctgtcatttatcttcccatatagggtcgttatcaatatatgtatacttgagtcttgattgtagctcaggtcgaacttggctagttggtggatgaaatgtcagtttttggcattagcttcgatgtcaatcagggcagtgggatagggtaatgataaatgcttgtgccctttcctggtggcaagaatttgtttgattaatgccatgttttatttcaattctgattatacttatatttgtaaattgtatataataattgagttgtttgtttgac

SEQ ID NO: 8469 - protein, 264 aa, Glycine max
  peptide (1)..(264): Ceres Seq. ID no. 14314416
  misc_feature (44)..(98): Pfam Name: RING finger Pfam Description: Zinc finger, C3HC4 type
  misc_feature (1)..(264): NCBI GI NO: 15228658 NR Description: expressed protein [Arabidopsis thaliana]
  misc_feature (1)..(264): NCBI GI NO: 11994767 NR Description: RING zinc finger protein-like
  misc_feature (1)..(262): NCBI GI NO: 21594048 NR Description: unknown [Arabidopsis thaliana]
  misc_feature (1)..(262): NCBI GI NO: 18409246 NR Description: zinc finger
  misc_feature (1)..(264): NCBI GI NO: 15221223 NR Description: zinc finger
  misc_feature (1)..(264): NCBI GI NO: 21592563 NR Description: putative RING zinc finger protein
MWNFASNCIAGTVGLKNDSKPTHSASECSDDENSVIGREEGLECPICWESFNIVENVPYVLWCGHTLCKNCILGLQWAVVKFPTLPVQLPLFISCPWCNLLSFRLVYRGNLKFPRKNYFLLWMVESMNGDRGKSHSPFCGDNQQHSIKDNLTMGSQVSHGNLRRGLVRHPETSSSNQYHGNTGNHLNTERFHVYLRKSLIFFVQLTAKFPLVIIFLLIVLYAIPASAAILALYVLVTILFALPSFLILYFSYPSLDWLVREIIT

SEQ ID NO: 8470 - protein, 142 aa, Glycine max
  peptide (1)..(142): Ceres Seq. ID no. 14314417
  misc_feature (1)..(142): NCBI GI NO: 15228658 NR Description: expressed protein [Arabidopsis thaliana]
  misc_feature (1)..(142): NCBI GI NO: 11994767 NR Description: RING zinc finger protein-like
  misc_feature (1)..(140): NCBI GI NO: 21594048 NR Description: unknown [Arabidopsis thaliana]
  misc_feature (1)..(140): NCBI GI NO: 18409246 NR Description: zinc finger
  misc_feature (1)..(142): NCBI GI NO: 15221223 NR Description: zinc finger
  misc_feature (1)..(142): NCBI GI NO: 21592563 NR Description: putative RING zinc finger protein
MVESMNGDRGKSHSPFCGDNQQHSIKDNLTMGSQVSHGNLRRGLVRHPETSSSNQYHGNTGNHLNTERFHVYLRKSLIFFVQLTAKFPLVIIFLLIVLYAIPASAAILALYVLVTILFALPSFLILYFSYPSLDWLVREIIT

SEQ ID NO: 8471 - protein, 138 aa, Glycine max
  peptide (1)..(138): Ceres Seq. ID no. 14314418
  misc_feature (1)..(138): NCBI GI NO: 15228658 NR Description: expressed protein [Arabidopsis thaliana]
  misc_feature (1)..(138): NCBI GI NO: 11994767 NR Description: RING zinc finger protein-like
  misc_feature (1)..(136): NCBI GI NO: 21594048 NR Description: unknown [Arabidopsis thaliana]
  misc_feature (1)..(136): NCBI GI NO: 18409246 NR Description: zinc finger
  misc_feature (1)..(138): NCBI GI NO: 15221223 NR Description: zinc finger
  misc_feature (1)..(138): NCBI GI NO: 21592563 NR Description: putative RING zinc finger protein
MNGDRGKSHSPFCGDNQQHSIKDNLTMGSQVSHGNLRRGLVRHPETSSSNQYHGNTGNHLNTERFHVYLRKSLIFFVQLTAKFPLVIIFLLIVLYAIPASAAILALYVLVTILFALPSFLILYFSYPSLDWLVREIIT

SEQ ID NO: 8472 - DNA, 1258 bp, Glycine max
  misc_feature (1)..(1258): Ceres Seq. ID no. 14314367
atgggtggctaactcaagcgttaggcttgaggatcttcacggtctcccaagtgaaatcaggatcgtcacgtccaaaatgcccataagcagcagttttctggtacctgaagttgcctcctctcatgagatcaagatggattgctatcattcctggcctgaaatcaaatttctccttaattagagccaatatgtccttgtctggaatcttccccgtttggtatgtgtctacaaacacagaaagtggctctggaactccaattgcataagaaacctgcacaatgcaacgtcgtgcaagccctgaagctaccacgctcttggctgcttgcctaacaatgtatgcaccactcctatcaaccttggttgggtccttgccggagaaggcaccaccaccatgagcaccccaaccaccataggtgtcgataatgatcttccttccagtgagtcctgcatctccatggggtccaccaatcacaaacctaccagaggggttgaggtggaagatggtcttatcatcaaggtatttagctgggatgacaggtttgatcacatgctctttcaattctttagagatttgttcatttgtgacagtttcatcatgctgagttgagatgagaactgtgtgaacccgaataggaatcatggctccaccatcgttcttgtactcaactgtcacttgggttttaccatctggcctcagccaggggcatgttttgttctttctcacctcagtgagcctggcaccaagtttagtagcaagcacatgagtgagtggcattaactcaggtgtttcgtctgtagcataaccaaacatgtggccttggtcaccagcaccaatttcctcaggtttcttggtcatatgaccgtgaactccttgagcaatatcagggctctgttgctcaatgttgaccagaactttgcagttgtcagcatcaagaccaacatctggtgacacaaacccaatgcctttgcaagtgtctcgaactattttctcgtagttcacgctggccttggttgtaatctcaccaaagaccataaccatgttagtttttgtacaggtctcgcaagcaaccttgctttctgggtcttgctccaagcatgcatctaggatggcatctgaaacctggtcacacagcttgtcgggatggccttcgtttacagattctgaggtgaagaggaaagtttccatctctagtgttaagaaaacaaaaaggggttaaattgtattctagagagaaattatgaaagcaattaacttgac

SEQ ID NO: 8473 - protein, 71 aa, Glycine max
  peptide (1)..(71): Ceres Seq. ID no. 14314368
  misc_feature (1)..(71): NCBI GI NO: 23485282 NR Description: hypothetical protein [Plasmodium yoelii yoelii]
MSTPTTIGVDNDLPSSESCISMGSTNHKPTRGVEVEDGLIIKVFSWDDRFDHMLFQFFRDLFICDSFIMLS

SEQ ID NO: 8474 - protein, 59 aa, Glycine max
  peptide (1)..(59): Ceres Seq. ID no. 14314369
MIFLPVSPASPWGPPITNLPEGLRWKMVLSSRYLAGMTGLITCSFNSLEICSFVTVSSC

SEQ ID NO: 8475 - protein, 59 aa, Glycine max
  peptide (1)..(59): Ceres Seq. ID no. 14314370
WVANSSVRLEDLHGLPSEIRIVTSKMPISSSFLVPEVASSHEIKMDCYHSWPEIKFLLN

SEQ ID NO: 8476 - DNA, 1416 bp, Glycine max
  misc_feature (1)..(1416): Ceres Seq. ID no. 15177055
gaaaaatcatcaccaacaaacaaacaaacattcattccattctctctctaaatcgcactcacatcatctcttctatctcctcagtactccggcgatcggagcctctaatccgccacgttctccctatctcctctttctcaactccagaatctcgtcctcgtgagagaaaataaaagttagttagggttacgcacagttgattaattaattaataatagaaaaaatgagctttcaggacatcgaggccggccgttccttcgcttcccggcgaaatctaatcaacggcaaacaagaccccacgcaggcggtggcttccggcatctttcagatcaacaccgccgtctccacgttccagagactcgtcaacaccctcggaacccccaaggacacccccgaactccgcgataagctgcacaagacgagactgcacattggacaattggtgaaggatacttcggctaagcttaagcaagctagtgagattgatcacaacgttgaagttaatgcaagtaagaagatagcagatgcgaagcttgcaaaagattttcaggcggtgttgaaagaatttcagaaggcacagcgtctttcagcggagagggaaactgcttacactccttttgttccgcaagcacttcttccatccagctatacagccagtgaagtagacattggttctgataagactccagaacagcgtgcacttcttgtggaatccagaagacaggaggtattattcttagataatgagatttccttcaatgaggctatcattgaggaaagagagcaaggcattcaagaaatccagtcgcagattggtgaagtaaatgagattttcaaagatcttgctgtgcttgtccatgagcaaggagcaatgattgatgatatcgggtccaatattgagcattcccatgaagcaactgcgcaagcaaaatctcaacttgccaaagcttcaaagacgcaaagatcaaattcatctttgacatgcttgcttctggtgatattcgggatcgtgcttctaatcgtcatcattgttcttgctgcttagtcatagactctggattctattacaaatcaaatgctcttacatactgagttgcagatacgatctcccttgctgatgactacactgaatggtgatttaccagatctcacgaatgaccggaatttgtctcatcaggtttcagtacatgatgtgggaatattcacaacattagtgtatcgttattttggtgggtatatgttctggtttctttgttggtgtttggggctttaaggatgtgtcacaacctgcctgctgtgtatgttatctttttggtttcttaataaacgatatattaattcgttctttacctgtatacgcaacttgaaaattagcatgactgactcttctttagtaataccttgatccattcaccc

SEQ ID NO: 8477 - protein, 273 aa, Glycine max
  peptide (1)..(273): Ceres Seq. ID no. 15177056
  misc_feature (14)..(116): Pfam Name: Pfam Description:  Syntaxin
  misc_feature (1)..(273): NCBI GI NO: 22597174 NR Description: syntaxin [Glycine max]
  misc_feature (1)..(273): NCBI GI NO: 18422725 NR Description: syntaxin of plants SYP22 (VAM3p)
  misc_feature (1)..(272): NCBI GI NO: 7488213 NR Description: probable syntaxin - Arabidopsis thaliana
  misc_feature (1)..(273): NCBI GI NO: 34902878 NR Description: unnamed protein product
  misc_feature (1)..(241): NCBI GI NO: 18414953 NR Description: syntaxin of plants SYP23 [Arabidopsis thaliana]
  misc_feature (1)..(271): NCBI GI NO: 15237418 NR Description: syntaxin of plants SYP21 (PEP12)
  misc_feature (1)..(271): NCBI GI NO: 21595750 NR Description: syntaxin homologue [Arabidopsis thaliana]
  misc_feature (64)..(260): NCBI GI NO: 15222626 NR Description: syntaxin of plants, putative
  misc_feature (27)..(269): NCBI GI NO: 12833165 NR Description: unnamed protein product [Mus musculus]
  misc_feature (55)..(260): NCBI GI NO: 25511677 NR Description: F5D14.3 protein - Arabidopsis thaliana
MSFQDIEAGRSFASRRNLINGKQDPTQAVASGIFQINTAVSTFQRLVNTLGTPKDTPELRDKLHKTRLHIGQLVKDTSAKLKQASEIDHNVEVNASKKIADAKLAKDFQAVLKEFQKAQRLSAERETAYTPFVPQALLPSSYTASEVDIGSDKTPEQRALLVESRRQEVLFLDNEISFNEAIIEEREQGIQEIQSQIGEVNEIFKDLAVLVHEQGAMIDDIGSNIEHSHEATAQAKSQLAKASKTQRSNSSLTCLLLVIFGIVLLIVIIVLAA

SEQ ID NO: 8478 - DNA, 669 bp, Glycine max
  misc_feature (1)..(669): Ceres Seq. ID no. 15168438
aatcccaagctcacacacactaaaccaaagtaagaggtatagtgttctaagagtgagcaacttgtgagaaatggcttccaaggctgcacttctcttgtgtctcaatgttctctttttcactgtggttagttccacatatgtgccatgtaatccaccccccaaaactcccaaacacccacctgtcccaaagccaccatccccaaagcaagcaagctgccccaaagacactattaagttcggtgtgtgtgctgatgtgttaggtttgattaatgtgcaacttgggaagccaccaaagaccccatgctgcaacctaattcagggtcttggaaaccttaaaattgcagaaaattgtacacaaatgtttttgcattgtggtggtttcagagaccatgatatttttgacgatgcgggtgcaattgcacttttgtatctccatttcaaaccttgttccttccttcaatggctctacaattgaaagtgaaacgtggtttaaagaataaaactctttcaaagttggaaattttctttactcacatgtcgcttttttattgggggtatgaaatgaagacagtgatttggtacatgtagacagcatgctcttttctcagttcattctgtctatggcaagtgtttagtggcagtggtgtaatggtggttttaagagttttc

SEQ ID NO: 8479 - protein, 134 aa, Glycine max
  peptide (1)..(134): Ceres Seq. ID no. 15168439
  misc_feature (12)..(97): NCBI GI NO: 2129871 NR Description: proline-rich protein, 14K - kidney bean
  misc_feature (1)..(97): NCBI GI NO: 18406723 NR Description: protease inhibitor/seed storage/lipid transfer
  misc_feature (1)..(97): NCBI GI NO: 15221201 NR Description: protease inhibitor/seed storage/lipid transfer
  misc_feature (1)..(97): NCBI GI NO: 13561927 NR Description: extensin-like protein [Brassica napus]
  misc_feature (2)..(91): NCBI GI NO: 112697 NR Description: 14 KD PROLINE-RICH PROTEIN DC2.15 PRECURSOR
  misc_feature (1)..(91): NCBI GI NO: 481236 NR Description: hypothetical protein - Madagascar periwinkle
  misc_feature (1)..(91): NCBI GI NO: 4454097 NR Description: hybrid proline-rich protein [Catharanthus roseus]
  misc_feature (3)..(91): NCBI GI NO: 10798752 NR Description: P-rich protein EIG-I30 [Nicotiana tabacum]
  misc_feature (1)..(91): NCBI GI NO: 4240033 NR Description: ZmGR1a [Zea mays]
  misc_feature (2)..(91): NCBI GI NO: 21360370 NR Description: extensin-like protein [Citrus junos]
MASKAALLLCLNVLFFTVVSSTYVPCNPPPKTPKHPPVPKPPSPKQASCPKDTIKFGVCADVLGLINVQLGKPPKTPCCNLIQGLGNLKIAENCTQMFLHCGGFRDHDIFDDAGAIALLYLHFKPCSFLQWLYN

SEQ ID NO: 8480 - DNA, 1308 bp, Glycine max
  misc_feature (1)..(1308): Ceres Seq. ID no. 14315515
acttctcatacaatacaagaggtcacatatacagaccttctctccctctctctctttctctctcaacattctaccttcttttcttttcctcttttcacaaccatttgtgagattcctccaatgttcttctctcttccattggattgtacagattcccagctacactacacacatcaatcccttcaattctagttgctgtgggattgtttgtttatgtgaaaaaattttaaggactgtaaaagacaaaacttttctgggtttattggtttctgctttatatttattttttcttctgcaaactatcattctgggtttgctcataaaacaaagcctttcaagataactgttgtatttttcagaaaaaaaatccatttttcttagcttatttgtcaaaagaataattttttttctttttcttcctcatttttctgcaaattttcttcatattcctttttattaatttgcggaaaagattgagacatgggcaagcaaggaccttgctatcactgtggagttacaagcacgccactctggcgcaatggaccacccgagaagccagtactatgcaatgcatgtgggtctcgatggagaacaaagggaactcttgcaaattatacccctttacatgctcgagcagaaactgatgattatgatgatcaaagggtttccaggataaagagcatatcgataaataagaagaaagaagtggcattgctcaaacgaaaacagaaccatgataatgtaatgtctggagggtttgcacctgattacaaccagggataccaaaaggttgtagatgaagatattagcaaccggtcgagttcaggatcagctatctctaactcagagagctgtgcacaatttggttatgatggcatggatgctagtgatctgacaggttgaattaagatctttcttcacaactgattacagcagcatttatcattttgaaacaagtattgattttattgcctgtccaggtttatattagcacaatccagaagaggataatggaacgaaggaaaatgaaaaagaaatatattagtttcgtagtcattggttttcctaaaagaaaaacaaatgaactttgttttaactatgtacggttgtgctcttcattgacaaaaagaattgaagaagtggttttaatattttaccaccatgaagctctaattatacttgccaacatttgtaatggcaagtccaataattagacatggtggattatttgttttttgtttagtgtgtaacaatatgtagtacttttccctcccaataatagaatgtcaagtcttgcatatatttttc

SEQ ID NO: 8481 - protein, 140 aa, Glycine max
  peptide (1)..(140): Ceres Seq. ID no. 14315516
  misc_feature (1)..(132): NCBI GI NO: 30684095 NR Description: GATA zinc finger protein [Arabidopsis thaliana]
  misc_feature (1)..(127): NCBI GI NO: 22327632 NR Description: GATA zinc finger protein [Arabidopsis thaliana]
  misc_feature (1)..(139): NCBI GI NO: 38345953 NR Description: OSJNBb0038F03.10
  misc_feature (13)..(127): NCBI GI NO: 8978081 NR Description: gene_id:K14A3
  misc_feature (40)..(140): NCBI GI NO: 7485111 NR Description: hypothetical protein - Arabidopsis thaliana
MGKQGPCYHCGVTSTPLWRNGPPEKPVLCNACGSRWRTKGTLANYTPLHARAETDDYDDQRVSRIKSISINKKKEVALLKRKQNHDNVMSGGFAPDYNQGYQKVVDEDISNRSSSGSAISNSESCAQFGYDGMDASDLTG

SEQ ID NO: 8482 - protein, 113 aa, Glycine max
  peptide (1)..(113): Ceres Seq. ID no. 14315517
LLIQYKRSHIQTFSPSLSFSLNILPSFLFLFSQPFVRFLQCSSLFHWIVQIPSYTTHINPFNSSCCGIVCLCEKILRTVKDKTFLGLLVSALYLFFLLQTIILGLLIKQSLSR

SEQ ID NO: 8483 - DNA, 1310 bp, Glycine max
  misc_feature (1)..(1310): Ceres Seq. ID no. 14314186
tcgtctttctcttcttcctaagatcccttctcacttctatagttctattctcttctctttctccacctcttcacctcttctctcccctgtcttcttcttaattagcctctctcattgcgtgcaccaccccaaaaaaaatatacatatacatatatacataaaaaaaacaaccccccccctctacgtggccacactcgctcacaacacaacacaccctcttaattaaatctctatataaaaccccttcagggtctctccactatgacgggcagggaaatttttcataagatgaaggaaaaagttttgggctcatctgatcctgattctggtaaaggaaagagcaagatgaagaagaacataactcatggctttcacttggtaaaggggagatcaggtcatgccatggaagactatcttgttgctcaattcaagcaagttgacgacaatgaattgggtttatttgcaatatttgatggccactcaggtcacagtgtacctgattacttgaagtctcatttgtttgataatatcttgaaagagcctaacttctggacagaacctgctgaggctgttaagagagcatatggtataactgattctactattttagacaaatcaggtgaattgggtagagggggttcaactgcggttactgcaatattgatcaactgtcaggagctgctagtggccaatattggggattcccgggctgtcttatgcaagaatggcgtggccaaacaactatcagtggatcatgaaccaagcatagaaagtgaagatataagaaacagaggtggttttgtgtcaaacttcccaggggatgttccacgtgtcgatggtcagttggcggtgtcaagggcatttggtgacaaaagcctgaagatacatttgagctcagaaccatatgtaactttggagatgatagaagatgatgcagagtttcttatactagccagtgatgggttatggaaggtaatgtcaaatcaagaagcagttagtgctatcaaagatgttaaggatgccaggtccgcagctaaggtgcttaccgaagaagcaaagatcaggaaaagttctgatgatatctcttgcgttgttgtgaaatttcagtgatcactgaactcacatagtagatttttatcttcgaacttgaaaatgtaacatatactttagtgtatatggattaatgttgattccctttaggtgttattatgttgtggcattctgtttgtgatattttatctgctttcgtacaaatcaactgtctgagaacgtgttgtttgatgtaacagtgtaaaaaaggatttagtttc

SEQ ID NO: 8484 - protein, 282 aa, Glycine max
  peptide (1)..(282): Ceres Seq. ID no. 14314187
  misc_feature (15)..(274): Pfam Name: Pfam Description:  Protein phosphatase 2C
  misc_feature (1)..(282): NCBI GI NO: 4336436 NR Description: protein phosphatase type 2C [Lotus japonicus]
  misc_feature (1)..(282): NCBI GI NO: 15232538 NR Description: protein phosphatase 2C (PP2C), putative
  misc_feature (1)..(282): NCBI GI NO: 21539551 NR Description: putative protein phosphatase type 2C
  misc_feature (1)..(281): NCBI GI NO: 23307574 NR Description: putative protein phosphatase 2C homolog
  misc_feature (1)..(281): NCBI GI NO: 18417190 NR Description: protein phosphatase 2C (PP2C), putative
  misc_feature (1)..(282): NCBI GI NO: 18399423 NR Description: protein phosphatase 2C (PP2C), putative
  misc_feature (1)..(282): NCBI GI NO: 25411985 NR Description: probable protein phosphatase 2C
  misc_feature (29)..(281): NCBI GI NO: 7488280 NR Description: protein phosphatase 2C homolog F20O9
  misc_feature (15)..(282): NCBI GI NO: 32488822 NR Description: OSJNBa0085I10.2
  misc_feature (7)..(282): NCBI GI NO: 18395099 NR Description: protein phosphatase 2C (PP2C), putative
MTGREIFHKMKEKVLGSSDPDSGKGKSKMKKNITHGFHLVKGRSGHAMEDYLVAQFKQVDDNELGLFAIFDGHSGHSVPDYLKSHLFDNILKEPNFWTEPAEAVKRAYGITDSTILDKSGELGRGGSTAVTAILINCQELLVANIGDSRAVLCKNGVAKQLSVDHEPSIESEDIRNRGGFVSNFPGDVPRVDGQLAVSRAFGDKSLKIHLSSEPYVTLEMIEDDAEFLILASDGLWKVMSNQEAVSAIKDVKDARSAAKVLTEEAKIRKSSDDISCVVVKFQ

SEQ ID NO: 8485 - protein, 273 aa, Glycine max
  peptide (1)..(273): Ceres Seq. ID no. 14314188
  misc_feature (6)..(265): Pfam Name: Pfam Description:  Protein phosphatase 2C
  misc_feature (1)..(273): NCBI GI NO: 4336436 NR Description: protein phosphatase type 2C [Lotus japonicus]
  misc_feature (1)..(273): NCBI GI NO: 15232538 NR Description: protein phosphatase 2C (PP2C), putative
  misc_feature (1)..(273): NCBI GI NO: 21539551 NR Description: putative protein phosphatase type 2C
  misc_feature (1)..(272): NCBI GI NO: 23307574 NR Description: putative protein phosphatase 2C homolog
  misc_feature (1)..(272): NCBI GI NO: 18417190 NR Description: protein phosphatase 2C (PP2C), putative
  misc_feature (1)..(273): NCBI GI NO: 18399423 NR Description: protein phosphatase 2C (PP2C), putative
  misc_feature (1)..(273): NCBI GI NO: 25411985 NR Description: probable protein phosphatase 2C
  misc_feature (20)..(272): NCBI GI NO: 7488280 NR Description: protein phosphatase 2C homolog F20O9
  misc_feature (6)..(273): NCBI GI NO: 32488822 NR Description: OSJNBa0085I10.2
  misc_feature (1)..(273): NCBI GI NO: 18395099 NR Description: protein phosphatase 2C (PP2C), putative
MKEKVLGSSDPDSGKGKSKMKKNITHGFHLVKGRSGHAMEDYLVAQFKQVDDNELGLFAIFDGHSGHSVPDYLKSHLFDNILKEPNFWTEPAEAVKRAYGITDSTILDKSGELGRGGSTAVTAILINCQELLVANIGDSRAVLCKNGVAKQLSVDHEPSIESEDIRNRGGFVSNFPGDVPRVDGQLAVSRAFGDKSLKIHLSSEPYVTLEMIEDDAEFLILASDGLWKVMSNQEAVSAIKDVKDARSAAKVLTEEAKIRKSSDDISCVVVKFQ

SEQ ID NO: 8486 - protein, 254 aa, Glycine max
  peptide (1)..(254): Ceres Seq. ID no. 14314189
  misc_feature (1)..(246): Pfam Name: Pfam Description:  Protein phosphatase 2C
  misc_feature (1)..(254): NCBI GI NO: 4336436 NR Description: protein phosphatase type 2C [Lotus japonicus]
  misc_feature (1)..(254): NCBI GI NO: 15232538 NR Description: protein phosphatase 2C (PP2C), putative
  misc_feature (1)..(254): NCBI GI NO: 21539551 NR Description: putative protein phosphatase type 2C
  misc_feature (1)..(253): NCBI GI NO: 23307574 NR Description: putative protein phosphatase 2C homolog
  misc_feature (1)..(253): NCBI GI NO: 18417190 NR Description: protein phosphatase 2C (PP2C), putative
  misc_feature (1)..(254): NCBI GI NO: 18399423 NR Description: protein phosphatase 2C (PP2C), putative
  misc_feature (1)..(254): NCBI GI NO: 25411985 NR Description: probable protein phosphatase 2C
  misc_feature (1)..(253): NCBI GI NO: 7488280 NR Description: protein phosphatase 2C homolog F20O9
  misc_feature (1)..(254): NCBI GI NO: 32488822 NR Description: OSJNBa0085I10.2
  misc_feature (1)..(254): NCBI GI NO: 18395099 NR Description: protein phosphatase 2C (PP2C), putative
MKKNITHGFHLVKGRSGHAMEDYLVAQFKQVDDNELGLFAIFDGHSGHSVPDYLKSHLFDNILKEPNFWTEPAEAVKRAYGITDSTILDKSGELGRGGSTAVTAILINCQELLVANIGDSRAVLCKNGVAKQLSVDHEPSIESEDIRNRGGFVSNFPGDVPRVDGQLAVSRAFGDKSLKIHLSSEPYVTLEMIEDDAEFLILASDGLWKVMSNQEAVSAIKDVKDARSAAKVLTEEAKIRKSSDDISCVVVKFQ

SEQ ID NO: 8487 - DNA, 1339 bp, Glycine max
  misc_feature (1)..(1339): Ceres Seq. ID no. 14314272
aattcttctttgtattctccatccaccctcattgcactttttagtttttaccctttttcggtgtcttctcatattcctcacacgcacaccctcttcgatctcaacgcctctttggcttatattctcaccgacccacattgccattctcaccattctttgcagatcacgcacccctttaggaagagaggaaggaaagtctagtttttggttcgtgggggttggtttgcgaaatggcctctttctcggtcccatgccccaagtgtcctacaacttcttcttctccccctttggggttgaaatctctaaatgtttcatttcaaagggtgttgagcttgaagccttctctttcattcggatctttgtctgctgaatctgctgcatcaaggattcagtgccttaacaggaagcaattttctgttctgaaggctactaaagttgaaaattccaattctgcccctgtaatggtcaatggacctaatgttgcttcatcgaaagaaaaagaagtgcataatggaaaactctctggtggtactatcccagatgatgcttcaattattgcattcatgtctcaagtttcagaccttgtaaaactcgtggattcgagagatattgtggaacttcaacttaagcaatcagactgtgagctcatgataagaaaaaaagaagcattgcagcctccaccagttatagccccaacatccccaccaatgcactatgccacagttccttctccgccaccaccaccagcagctgctcctgctagctctgcacctccaaaagcagttcctgccttgccttcccctgcaaaagcaggcacatcttctcacccaacgctgaaatgtccgatggcaggaaccttctacaggagtccagcacctggtgaacctgcatttgtcaaggtgggagataaagtgcagaaaggccaggttatttgcattatcgaggctatgaaactgatgaatgaaattgaggctgatcagtcaggaacaatagctgaggtattagctgaggatgggaaaccagtcagtgtggacacgcctctttttgtaatagttccatgagtaccagaagggaccttacttcgaacttgatgtgaaatctcccttgttggagcagcatggtattcgatgacttagactctgtgttcagaaatttgttgagtggtaatgtttgtctcattttaagaaatccttgtcgtctttagcccccacccctcctcttaatttattgagatattttggacataaaagccccagcatatcagaatgagaatatttgacatttcagttctataagcagttttgacatttttagtagtatttatgttctatttttgttt

SEQ ID NO: 8488 - protein, 276 aa, Glycine max
  peptide (1)..(276): Ceres Seq. ID no. 14314273
  misc_feature (200)..(274): Pfam Name: Pfam Description:  Biotin-requiring enzyme
  misc_feature (1)..(276): NCBI GI NO: 12006165 NR Description: biotin carboxyl carrier protein subunit precursor
  misc_feature (1)..(276): NCBI GI NO: 12006187 NR Description: biotin carboxyl carrier protein subunit
  misc_feature (2)..(276): NCBI GI NO: 1066348 NR Description: acetyl-CoA carboxylase biotin-containing subunit
  misc_feature (2)..(276): NCBI GI NO: 15237339 NR Description: biotin carboxyl carrier protein 1 (BCCP1)
  misc_feature (2)..(276): NCBI GI NO: 1588550 NR Description: Ac-CoA carboxylase
  misc_feature (1)..(276): NCBI GI NO: 29169309 NR Description: biotin carboxylase carrier protein
  misc_feature (57)..(276): NCBI GI NO: 18417704 NR Description: biotin carboxyl carrier protein 2 (BCCP2)
  misc_feature (1)..(275): NCBI GI NO: 11357199 NR Description: biotin carboxyl carrier protein homolog T20K14.140
  misc_feature (64)..(276): NCBI GI NO: 2129787 NR Description: biotin carboxyl carrier protein
  misc_feature (15)..(276): NCBI GI NO: 3334130 NR Description: Biotin carboxyl carrier protein of acetyl-CoAcarboxylase
MASFSVPCPKCPTTSSSPPLGLKSLNVSFQRVLSLKPSLSFGSLSAESAASRIQCLNRKQFSVLKATKVENSNSAPVMVNGPNVASSKEKEVHNGKLSGGTIPDDASIIAFMSQVSDLVKLVDSRDIVELQLKQSDCELMIRKKEALQPPPVIAPTSPPMHYATVPSPPPPPAAAPASSAPPKAVPALPSPAKAGTSSHPTLKCPMAGTFYRSPAPGEPAFVKVGDKVQKGQVICIIEAMKLMNEIEADQSGTIAEVLAEDGKPVSVDTPLFVIVP

SEQ ID NO: 8489 - protein, 199 aa, Glycine max
  peptide (1)..(199): Ceres Seq. ID no. 14314274
  misc_feature (123)..(197): Pfam Name: Pfam Description:  Biotin-requiring enzyme
  misc_feature (1)..(199): NCBI GI NO: 12006165 NR Description: biotin carboxyl carrier protein subunit precursor
  misc_feature (1)..(199): NCBI GI NO: 12006187 NR Description: biotin carboxyl carrier protein subunit
  misc_feature (1)..(199): NCBI GI NO: 1066348 NR Description: acetyl-CoA carboxylase biotin-containing subunit
  misc_feature (1)..(199): NCBI GI NO: 15237339 NR Description: biotin carboxyl carrier protein 1 (BCCP1)
  misc_feature (1)..(199): NCBI GI NO: 1588550 NR Description: Ac-CoA carboxylase
  misc_feature (1)..(199): NCBI GI NO: 29169309 NR Description: biotin carboxylase carrier protein
  misc_feature (1)..(199): NCBI GI NO: 18417704 NR Description: biotin carboxyl carrier protein 2 (BCCP2)
  misc_feature (1)..(198): NCBI GI NO: 11357199 NR Description: biotin carboxyl carrier protein homolog T20K14.140
  misc_feature (1)..(199): NCBI GI NO: 2129787 NR Description: biotin carboxyl carrier protein
  misc_feature (1)..(199): NCBI GI NO: 3334130 NR Description: Biotin carboxyl carrier protein of acetyl-CoAcarboxylase
MVNGPNVASSKEKEVHNGKLSGGTIPDDASIIAFMSQVSDLVKLVDSRDIVELQLKQSDCELMIRKKEALQPPPVIAPTSPPMHYATVPSPPPPPAAAPASSAPPKAVPALPSPAKAGTSSHPTLKCPMAGTFYRSPAPGEPAFVKVGDKVQKGQVICIIEAMKLMNEIEADQSGTIAEVLAEDGKPVSVDTPLFVIVP

SEQ ID NO: 8490 - protein, 165 aa, Glycine max
  peptide (1)..(165): Ceres Seq. ID no. 14314275
  misc_feature (89)..(163): Pfam Name: Pfam Description:  Biotin-requiring enzyme
  misc_feature (1)..(165): NCBI GI NO: 12006165 NR Description: biotin carboxyl carrier protein subunit precursor
  misc_feature (1)..(165): NCBI GI NO: 12006187 NR Description: biotin carboxyl carrier protein subunit
  misc_feature (1)..(165): NCBI GI NO: 1066348 NR Description: acetyl-CoA carboxylase biotin-containing subunit
  misc_feature (1)..(165): NCBI GI NO: 15237339 NR Description: biotin carboxyl carrier protein 1 (BCCP1)
  misc_feature (1)..(165): NCBI GI NO: 1588550 NR Description: Ac-CoA carboxylase
  misc_feature (1)..(165): NCBI GI NO: 29169309 NR Description: biotin carboxylase carrier protein
  misc_feature (1)..(165): NCBI GI NO: 18417704 NR Description: biotin carboxyl carrier protein 2 (BCCP2)
  misc_feature (1)..(164): NCBI GI NO: 11357199 NR Description: biotin carboxyl carrier protein homolog T20K14.140
  misc_feature (1)..(165): NCBI GI NO: 2129787 NR Description: biotin carboxyl carrier protein
  misc_feature (1)..(165): NCBI GI NO: 3334130 NR Description: Biotin carboxyl carrier protein of acetyl-CoAcarboxylase
MSQVSDLVKLVDSRDIVELQLKQSDCELMIRKKEALQPPPVIAPTSPPMHYATVPSPPPPPAAAPASSAPPKAVPALPSPAKAGTSSHPTLKCPMAGTFYRSPAPGEPAFVKVGDKVQKGQVICIIEAMKLMNEIEADQSGTIAEVLAEDGKPVSVDTPLFVIVP

SEQ ID NO: 8491 - DNA, 989 bp, Glycine max
  misc_feature (1)..(989): Ceres Seq. ID no. 14316297
attattggtgttgaagatagaaaagaaagagaaagagcgatgccaggatcattgaggcctcggtttgttatctttggttcttccatcgttcaatttggtttttatgatgaaggttgggtggctattctttctcatttgtatgcccgcaaggttgatattgatttgcgaggatatgctggttggaattcaaggcgtgctgtgcaggttctggataaagtttttcccaaggatgcccctatacaaccttcattggttattgtctactttggtggtaatgattcttctgctcccctctcatctggcctaggtcctcatgtgcctctccaagaatacattgaaaatttgaggaagatcgttgaccatctcaagagcctctcagagaacactcgcattctacttctcagtactcctcccctcaatgatgcagcaattacgccaaacagtgatgggaagccaacaaagacaaatgaagcttgtcaaatatattcagaagcatgtttggatgtgtgccgcaagatgaatatcaaggccattgatttgtggtctgctattcagaaaagagataactggcaagatgtttgcttcattgatggaattcacctctcatctgagggaagcaagatagtgttgaaagagatactgaatgtcctcaaaggtgcagaatgggaacctagtctatattggaaatcaatgccaagtgagtttgatgaagattcaccatatgatccagttacaactgatggaaagtcaactattaatctttccagctgggtcttccctgacaatgacaaatgggactagactttatatgtgcattaacggcgagtcactgaatcgcatcgaacgaaaatgcctatttttatcttttttttttgtgttgcatgtttgggttcctttctttatcgtgtttatttctgtattacttgcaaaaaatgacgtctattactatgattaactttgaggttcacgagtcattttcaatcttctcc

SEQ ID NO: 8492 - protein, 266 aa, Glycine max
  peptide (1)..(266): Ceres Seq. ID no. 14316298
  misc_feature (23)..(213): Pfam Name: Pfam Description:  GDSL-like Lipase/Acylhydrolase
  misc_feature (15)..(266): NCBI GI NO: 32352168 NR Description: hypothetical protein
  misc_feature (14)..(266): NCBI GI NO: 21554235 NR Description: CPRD49 [Arabidopsis thaliana]
  misc_feature (14)..(266): NCBI GI NO: 18399151 NR Description: GDSL-motif lipase/hydrolase protein
  misc_feature (14)..(266): NCBI GI NO: 13161403 NR Description: CPRD49 [Vigna unguiculata]
  misc_feature (14)..(240): NCBI GI NO: 16974631 NR Description: At2g38180/F16M14.11 [Arabidopsis thaliana]
  misc_feature (14)..(240): NCBI GI NO: 18404664 NR Description: GDSL-motif lipase/hydrolase protein
  misc_feature (18)..(242): NCBI GI NO: 37535366 NR Description: putative esterase
  misc_feature (18)..(218): NCBI GI NO: 15242539 NR Description: GDSL-motif lipase/hydrolase protein
  misc_feature (18)..(218): NCBI GI NO: 38454102 NR Description: At5g45920 [Arabidopsis thaliana]
  misc_feature (18)..(244): NCBI GI NO: 34903948 NR Description: OSJNBa0038J17.19
IIGVEDRKERERAMPGSLRPRFVIFGSSIVQFGFYDEGWVAILSHLYARKVDIDLRGYAGWNSRRAVQVLDKVFPKDAPIQPSLVIVYFGGNDSSAPLSSGLGPHVPLQEYIENLRKIVDHLKSLSENTRILLLSTPPLNDAAITPNSDGKPTKTNEACQIYSEACLDVCRKMNIKAIDLWSAIQKRDNWQDVCFIDGIHLSSEGSKIVLKEILNVLKGAEWEPSLYWKSMPSEFDEDSPYDPVTTDGKSTINLSSWVFPDNDKWD

SEQ ID NO: 8493 - protein, 253 aa, Glycine max
  peptide (1)..(253): Ceres Seq. ID no. 14316299
  misc_feature (10)..(200): Pfam Name: Pfam Description:  GDSL-like Lipase/Acylhydrolase
  misc_feature (2)..(253): NCBI GI NO: 32352168 NR Description: hypothetical protein
  misc_feature (1)..(253): NCBI GI NO: 21554235 NR Description: CPRD49 [Arabidopsis thaliana]
  misc_feature (1)..(253): NCBI GI NO: 18399151 NR Description: GDSL-motif lipase/hydrolase protein
  misc_feature (1)..(253): NCBI GI NO: 13161403 NR Description: CPRD49 [Vigna unguiculata]
  misc_feature (1)..(227): NCBI GI NO: 16974631 NR Description: At2g38180/F16M14.11 [Arabidopsis thaliana]
  misc_feature (1)..(227): NCBI GI NO: 18404664 NR Description: GDSL-motif lipase/hydrolase protein
  misc_feature (5)..(229): NCBI GI NO: 37535366 NR Description: putative esterase
  misc_feature (5)..(205): NCBI GI NO: 15242539 NR Description: GDSL-motif lipase/hydrolase protein
  misc_feature (5)..(205): NCBI GI NO: 38454102 NR Description: At5g45920 [Arabidopsis thaliana]
  misc_feature (5)..(231): NCBI GI NO: 34903948 NR Description: OSJNBa0038J17.19
MPGSLRPRFVIFGSSIVQFGFYDEGWVAILSHLYARKVDIDLRGYAGWNSRRAVQVLDKVFPKDAPIQPSLVIVYFGGNDSSAPLSSGLGPHVPLQEYIENLRKIVDHLKSLSENTRILLLSTPPLNDAAITPNSDGKPTKTNEACQIYSEACLDVCRKMNIKAIDLWSAIQKRDNWQDVCFIDGIHLSSEGSKIVLKEILNVLKGAEWEPSLYWKSMPSEFDEDSPYDPVTTDGKSTINLSSWVFPDNDKWD

SEQ ID NO: 8494 - DNA, 1004 bp, Glycine max
  misc_feature (1)..(1004): Ceres Seq. ID no. 14315395
acaatggattggaaactttgagctcaatcgtacggttaggaaaatttgcagtttcttagcatagattggaggaagaagattgttggcaactgttcccagggagaacaaccttcatcttcttctgaaggtgctcggtgaaagggtgtttgaccaagagaagaaatccagttccagagattttttattcaaggatgggtgaaaggaaggacactattgctaccttgtgtacttggtggatgtagctcggcattgtggaaatttacaaaaggaggatggcacttatccttgcagcaaatatgtgctccattacaaattccaaaacggttgaagtgataaaaagaatcgatattgaagataaaatgcaatccagatctaatattgcactgcctccttcggaagcttcatcaagtcgcaggcatctcttaatcggtgttggtccttcattgcttaccttgacgtgtggtttatcaccaccaacggtatgggccgaagagaagtctggcgacaaagaggaagaagataaaggggttattggggccatcaaatcactatttgatcctaatgagaaaacaaagtctggaaaggtgttgccaaaggcttacttaaggtcagcaagggaagtagtgaaaacactgcgtgaatctttaaacgaaggcaccgatgataatgccaaatttagacggactgcggactcagcaaaggagtcaattcgggagtatttgggcagttggaggggaaatcagattgttgctcaagaagaatcatatgttattttggaaaaagtaatcagatctttggcaaactattactcaaaagcagggccatcagctccactgtcacatgaagtaaagtctgaaatattagattatctaaatacagctgaagaatttttgtagaacatcctccaatgtgttatagaaacaacaccatttctaactccctggatgtcgtcaatggctgtgataaaagtaaatttattcttcaatcaatttaaattttgtagc

SEQ ID NO: 8495 - protein, 207 aa, Glycine max
  peptide (1)..(207): Ceres Seq. ID no. 14315396
  misc_feature (26)..(207): NCBI GI NO: 18390518 NR Description: expressed protein [Arabidopsis thaliana]
  misc_feature (26)..(207): NCBI GI NO: 26451618 NR Description: unknown protein [Arabidopsis thaliana]
  misc_feature (5)..(207): NCBI GI NO: 14626275 NR Description: unknown protein
MALILAANMCSITNSKTVEVIKRIDIEDKMQSRSNIALPPSEASSSRRHLLIGVGPSLLTLTCGLSPPTVWAEEKSGDKEEEDKGVIGAIKSLFDPNEKTKSGKVLPKAYLRSAREVVKTLRESLNEGTDDNAKFRRTADSAKESIREYLGSWRGNQIVAQEESYVILEKVIRSLANYYSKAGPSAPLSHEVKSEILDYLNTAEEFL

SEQ ID NO: 8496 - protein, 199 aa, Glycine max
  peptide (1)..(199): Ceres Seq. ID no. 14315397
  misc_feature (18)..(199): NCBI GI NO: 18390518 NR Description: expressed protein [Arabidopsis thaliana]
  misc_feature (18)..(199): NCBI GI NO: 26451618 NR Description: unknown protein [Arabidopsis thaliana]
  misc_feature (1)..(199): NCBI GI NO: 14626275 NR Description: unknown protein
MCSITNSKTVEVIKRIDIEDKMQSRSNIALPPSEASSSRRHLLIGVGPSLLTLTCGLSPPTVWAEEKSGDKEEEDKGVIGAIKSLFDPNEKTKSGKVLPKAYLRSAREVVKTLRESLNEGTDDNAKFRRTADSAKESIREYLGSWRGNQIVAQEESYVILEKVIRSLANYYSKAGPSAPLSHEVKSEILDYLNTAEEFL

SEQ ID NO: 8497 - protein, 178 aa, Glycine max
  peptide (1)..(178): Ceres Seq. ID no. 14315398
  misc_feature (1)..(178): NCBI GI NO: 18390518 NR Description: expressed protein [Arabidopsis thaliana]
  misc_feature (1)..(178): NCBI GI NO: 26451618 NR Description: unknown protein [Arabidopsis thaliana]
  misc_feature (1)..(178): NCBI GI NO: 14626275 NR Description: unknown protein
MQSRSNIALPPSEASSSRRHLLIGVGPSLLTLTCGLSPPTVWAEEKSGDKEEEDKGVIGAIKSLFDPNEKTKSGKVLPKAYLRSAREVVKTLRESLNEGTDDNAKFRRTADSAKESIREYLGSWRGNQIVAQEESYVILEKVIRSLANYYSKAGPSAPLSHEVKSEILDYLNTAEEFL

SEQ ID NO: 8498 - DNA, 1320 bp, Glycine max
  misc_feature (1)..(1320): Ceres Seq. ID no. 14314198
attcacaactccaatccctcttcgctttagcaaattccaattcccaatccaaaaccctaatttcgttcaaagaaccaattgtgatggcaccaaaggcagagaagaagccagcggagaagaagcccgcggaggagaagaagtcgacggtgggagacaaggctccggcggagaagaagccgaaggccggaaagaagcttcctaaggagggaggagccggcggagaaggggggaagaagaagaagaggaacaagaagagcgtggagacatacaagatatacatattcaaggtgctgaagcaggtccaccctgacattggtatctcaagcaaggccatgggaatcatgaacagcttcatcaacgacatcttcgagaagcttgctcaggaatcttccagacttgcccgctacaacaagaagcccaccatcacttcaagggaaatccagaccgcgcaaccctcccactcatccttcctacgaggagatgattaaagacgcaattacctcgctgaaggagaaaaccggttcgagccaacacgcgattgcgaagttcatcgaggagaagcacaagcagcttccaccgaacttcaggaagcttcttctctaccatttgaagaaacttgtagccgctggaaaactcgtcaaagtcaaaggctccttcaagctcccacctacccgaccttctgcatcttcttcttcttcgccggcgaagaagaagaagcccgcacctgctaagccccaacccaagcccaagcctaagcctaagcccaagcccgctgctaaagccaaggacactaaggcaactaagtcaaaggcaccagctaatcccaaggcagctgctaagcctaaagccaaagctccagccaagcccaagcccgcccctaaaccaaaggctgctgctgctgctgcttccaagcccaagcctgctgccgccaagcccaaagggactaagccagctgccaagcccaagcccaagcccgctgctaaaacaaaggctgctgctgccaagcccgcggcaaagcccaaagcgaagcccgccaaggcttcaaggacgtcgacacggacttcaccagggaagaaagcagctcctgctgcgaagccggcagcgaagaaagtagcgcctgctaagaaagcgccagtgaagagtgtgaaaccaaagagtgtaaagtctccagcgaaaaaggctacggctaagagagggggtaggaagtgagaatgtggtgggtagagtggttttagggttagttttgtgaagttctttgtcctcttggtggtgtagttggggttacagatgatcctataatatatgaaatctgattttatc

SEQ ID NO: 8499 - protein, 242 aa, Glycine max
  peptide (1)..(242): Ceres Seq. ID no. 14314199
  misc_feature (1)..(62): Pfam Name: Pfam Description:  linker histone H1 and H5 family
  misc_feature (1)..(239): NCBI GI NO: 13540405 NR Description: histone H1 [Lens culinaris]
  misc_feature (1)..(239): NCBI GI NO: 13540403 NR Description: histone H1 [Lens culinaris]
  misc_feature (1)..(239): NCBI GI NO: 13540395 NR Description: histone H1 [Pisum sativum]
  misc_feature (1)..(239): NCBI GI NO: 30420974 NR Description: histone H1 [Lens nigricans]
  misc_feature (1)..(239): NCBI GI NO: 21465093 NR Description: histone H1 [Lathyrus aphaca]
  misc_feature (1)..(239): NCBI GI NO: 21465095 NR Description: histone H1 [Pisum sativum subsp. abyssinicum]
  misc_feature (1)..(239): NCBI GI NO: 13540397 NR Description: histone H1 [Lathyrus sativus]
  misc_feature (1)..(239): NCBI GI NO: 13540399 NR Description: histone H1 [Lathyrus sativus]
  misc_feature (1)..(239): NCBI GI NO: 4106696 NR Description: ribosome-sedimenting protein [Pisum sativum]
  misc_feature (1)..(239): NCBI GI NO: 4996567 NR Description: ribosome-sedimenting protein [Pisum sativum]
MIKDAITSLKEKTGSSQHAIAKFIEEKHKQLPPNFRKLLLYHLKKLVAAGKLVKVKGSFKLPPTRPSASSSSSPAKKKKPAPAKPQPKPKPKPKPKPAAKAKDTKATKSKAPANPKAAAKPKAKAPAKPKPAPKPKAAAAAASKPKPAAAKPKGTKPAAKPKPKPAAKTKAAAAKPAAKPKAKPAKASRTSTRTSPGKKAAPAAKPAAKKVAPAKKAPVKSVKPKSVKSPAKKATAKRGGRK

SEQ ID NO: 8500 - protein, 161 aa, Glycine max
  peptide (1)..(161): Ceres Seq. ID no. 14314200
  misc_feature (32)..(149): Pfam Name: Pfam Description:  Core histone H2A/H2B/H3/H4
  misc_feature (28)..(149): NCBI GI NO: 7387726 NR Description: Histone H2B
  misc_feature (53)..(149): NCBI GI NO: 15030224 NR Description: Similar to H2B histone family, member D
  misc_feature (17)..(149): NCBI GI NO: 15223150 NR Description: histone H2B family [Arabidopsis thaliana]
  misc_feature (8)..(87): NCBI GI NO: 462702 NR Description: NEUROFILAMENT TRIPLET H PROTEIN
  misc_feature (8)..(68): NCBI GI NO: 29789026 NR Description: neurofilament, heavy polypeptide
  misc_feature (8)..(87): NCBI GI NO: 205686 NR Description: heavy neurofilament subunit
  misc_feature (12)..(74): NCBI GI NO: 29789026 NR Description: neurofilament, heavy polypeptide
  misc_feature (8)..(90): NCBI GI NO: 205686 NR Description: heavy neurofilament subunit
  misc_feature (8)..(90): NCBI GI NO: 462702 NR Description: NEUROFILAMENT TRIPLET H PROTEIN
  misc_feature (8)..(90): NCBI GI NO: 29789026 NR Description: neurofilament, heavy polypeptide
SQLQSLFALANSNSQSKTLISFKEPIVMAPKAEKKPAEKKPAEEKKSTVGDKAPAEKKPKAGKKLPKEGGAGGEGGKKKKRNKKSVETYKIYIFKVLKQVHPDIGISSKAMGIMNSFINDIFEKLAQESSRLARYNKKPTITSREIQTAQPSHSSFLRGDD

SEQ ID NO: 8501 - protein, 134 aa, Glycine max
  peptide (1)..(134): Ceres Seq. ID no. 14314201
  misc_feature (5)..(122): Pfam Name: Pfam Description:  Core histone H2A/H2B/H3/H4
  misc_feature (1)..(122): NCBI GI NO: 7387726 NR Description: Histone H2B
  misc_feature (26)..(122): NCBI GI NO: 15030224 NR Description: Similar to H2B histone family, member D
  misc_feature (1)..(122): NCBI GI NO: 15223150 NR Description: histone H2B family [Arabidopsis thaliana]
  misc_feature (1)..(60): NCBI GI NO: 462702 NR Description: NEUROFILAMENT TRIPLET H PROTEIN
  misc_feature (1)..(41): NCBI GI NO: 29789026 NR Description: neurofilament, heavy polypeptide
  misc_feature (1)..(60): NCBI GI NO: 205686 NR Description: heavy neurofilament subunit
  misc_feature (1)..(47): NCBI GI NO: 29789026 NR Description: neurofilament, heavy polypeptide
  misc_feature (1)..(63): NCBI GI NO: 205686 NR Description: heavy neurofilament subunit
  misc_feature (1)..(63): NCBI GI NO: 462702 NR Description: NEUROFILAMENT TRIPLET H PROTEIN
  misc_feature (1)..(63): NCBI GI NO: 29789026 NR Description: neurofilament, heavy polypeptide
MAPKAEKKPAEKKPAEEKKSTVGDKAPAEKKPKAGKKLPKEGGAGGEGGKKKKRNKKSVETYKIYIFKVLKQVHPDIGISSKAMGIMNSFINDIFEKLAQESSRLARYNKKPTITSREIQTAQPSHSSFLRGDD

SEQ ID NO: 8502 - DNA, 1228 bp, Glycine max
  misc_feature (1)..(1228): Ceres Seq. ID no. 15171175
atgtgggagtaacagcagaagcaaaacaaaacatcatagacagacacaacattatctttcaactgttgctctgcctctgcacagagaatggtgtgggaggggaaacagacatgatctatctgtgttcacagcaccactgtttccctgcctcacacccttatctagaagaacaagaatcagcacatacacccgccacaacgccatagtcatcatcacttagaagaacttcacaatttttattttggttgtgtcgagtgtttttagctgacacaacctgaaagcttttgtctttattccgaaatttgtggcaatctttgcggtttagcttctggggtgttggggtggaagtaaagtttgtcactttgagatctaggtggggctgatatgcagaaacaacggcaatgagcaaattggcttggatatggcgagtcttgctcttgaaaccgaggatgtaatctcagatatatacctttcactgggacttaaggaatcagacaaaggagtaggagttcctcgagttttatctcttctctcttcacttcttgagagatcagttcagagaaacgaaacgctattggaggcaaagcacgtaaaagatgtagttacagtatttcacggtttaagagctcctactctgagcgttcgaaagtacattgatcgtatcttcaagtactcaggttgcagcccatcatgctttgtcgtggcacacatatatgtggacagattcattcaacacacagaaatcaaattgacttcacttaatgtgcaccggcttctgataacaagcatcatgctagcagcaaagtttatagatgacgcattctacaacaatgcttactatgcaaaagttggaggagtgagcacgtctgaattaaacaggttggagatgagctttctatttggcatagattttaggcttcagtttagtgtagacacgtttggaagatattgtaggcaattggagaaagaagctgcagaagtagtccaaattgaaaggccaatgcaggcttgtcgaattaaagaaagttggtcaaacaaagatgatcctacctgtgcttccacaattgcaagataaaaatgtggcaacaccattgtagcaatatattgctgtcccacaattaaccgagacaaaatgaatttgaagtatttcaaagtaaaaaaaaaaaaagagagagagagagaatagattgttctatacttgccactggaaattcaaccattttttacg

SEQ ID NO: 8503 - protein, 217 aa, Glycine max
  peptide (1)..(217): Ceres Seq. ID no. 15171176
  misc_feature (35)..(166): Pfam Name: Pfam Description:  Cyclin, N-terminal domain
  misc_feature (1)..(217): NCBI GI NO: 21593009 NR Description: unknown [Arabidopsis thaliana]
  misc_feature (1)..(217): NCBI GI NO: 15229382 NR Description: cyclin family [Arabidopsis thaliana]
  misc_feature (31)..(183): NCBI GI NO: 25493992 NR Description: PREG-like protein
  misc_feature (32)..(183): NCBI GI NO: 15224950 NR Description: cyclin family [Arabidopsis thaliana]
  misc_feature (23)..(183): NCBI GI NO: 15233185 NR Description: cyclin family [Arabidopsis thaliana]
  misc_feature (21)..(211): NCBI GI NO: 37536902 NR Description: hypothetical protein
  misc_feature (30)..(183): NCBI GI NO: 15240794 NR Description: cyclin family [Arabidopsis thaliana]
  misc_feature (30)..(191): NCBI GI NO: 15240306 NR Description: cyclin family [Arabidopsis thaliana]
  misc_feature (1)..(209): NCBI GI NO: 15225402 NR Description: cyclin family [Arabidopsis thaliana]
  misc_feature (59)..(183): NCBI GI NO: 6729043 NR Description: hypothetical protein [Arabidopsis thaliana]
MASLALETEDVISDIYLSLGLKESDKGVGVPRVLSLLSSLLERSVQRNETLLEAKHVKDVVTVFHGLRAPTLSVRKYIDRIFKYSGCSPSCFVVAHIYVDRFIQHTEIKLTSLNVHRLLITSIMLAAKFIDDAFYNNAYYAKVGGVSTSELNRLEMSFLFGIDFRLQFSVDTFGRYCRQLEKEAAEVVQIERPMQACRIKESWSNKDDPTCASTIAR

SEQ ID NO: 8504 - DNA, 1225 bp, Glycine max
  misc_feature (1)..(1225): Ceres Seq. ID no. 15172528
ttcatctttgattgagataaggtaaggttctttacctgcttccactttctactttttcatcactttcattttcgttctctcttttgctatctaattttctgttcaagattcctaacttcccttctttaaaggaacgaactttgcattcaatttgttatgggtcgattcaatttctgttcgttgttactacgttgttttcatcataaaaatcgtgctcaatcatattaaagctgtctttttttaattttttttcaaatttaggaataaaacaattcatgtgaagtagtaattaatatgtttgatgtcgtcaggagttagttacaagtacaatggagttaagatcattgattttgcaaccaaacttgacacacttgtttccaacattcacatgctgtgtcaaactcaaaccttctttccagcatttacagaataatagtaataataaggaattatcactaaaaatccgtagtagaagggtaggggttttggctgccataacttccttgattttgggtggaaatggaatttttaggactcaaagtgcaaatgcatttgagtttaaatttgtggcccctgatatgacagttgaagaggcattgagtggagtgaggggtcatgcacaagatttgttacatgttagagatttgttagagttagagtcatggagagcagcacaaaagacattgagacagagctcagcaattctgaagaaggatatttatatcataatccaaagcaagcctggaattgagagggcacaattaaggaagctctattctactctcttcaacaatgtaactagactagattatgcagcaagggataaagatggaccccaagtctggcagtgttacaagaacattgttgtggctgtcaacgacattctatccagaatataatgatcccttgtcttttgataatgggagattgaactgttcttgataagtttatgcgaacagctgactaacttgcttgttgcaagaagtggagttgtgaaggatatgcactcaaaagtaggctgcacaaaggaaaaaccctgttatataaaattatagactaagagtttgatcattaagagttagataatattgaaggtttaatcatatttgacagaaaaatgatgcccagattctgtgtcatcattgatcaggagcttaaaaagagaacgattgtaagcatatcaattttgataaagagaaatctaagcttaattttttatctgctc

SEQ ID NO: 8505 - protein, 189 aa, Glycine max
  peptide (1)..(189): Ceres Seq. ID no. 15172529
  misc_feature (72)..(189): Pfam Name: PsbQ Pfam Description: Oxygen evolving enhancer protein 3
  misc_feature (69)..(189): NCBI GI NO: 32489844 NR Description: OSJNBb0065J09.4
  misc_feature (72)..(189): NCBI GI NO: 15233587 NR Description: oxygen-evolving complex protein 16
  misc_feature (74)..(189): NCBI GI NO: 15234637 NR Description: oxygen-evolving complex protein 16
  misc_feature (78)..(189): NCBI GI NO: 11134066 NR Description: Oxygen-evolving enhancer protein 3-2
  misc_feature (78)..(185): NCBI GI NO: 8131595 NR Description: oxygen evolving enhancer protein 3
  misc_feature (62)..(189): NCBI GI NO: 11134057 NR Description: Oxygen-evolving enhancer protein 3-1
  misc_feature (78)..(189): NCBI GI NO: 34810268 NR Description: Chain A
  misc_feature (78)..(189): NCBI GI NO: 131397 NR Description: Oxygen-evolving enhancer protein 3
  misc_feature (79)..(189): NCBI GI NO: 31096349 NR Description: oxygen-evolving enhancer protein 3 precursor
MELRSLILQPNLTHLFPTFTCCVKLKPSFQHLQNNSNNKELSLKIRSRRVGVLAAITSLILGGNGIFRTQSANAFEFKFVAPDMTVEEALSGVRGHAQDLLHVRDLLELESWRAAQKTLRQSSAILKKDIYIIIQSKPGIERAQLRKLYSTLFNNVTRLDYAARDKDGPQVWQCYKNIVVAVNDILSRI

SEQ ID NO: 8506 - protein, 106 aa, Glycine max
  peptide (1)..(106): Ceres Seq. ID no. 15172530
  misc_feature (1)..(106): Pfam Name: PsbQ Pfam Description: Oxygen evolving enhancer protein 3
  misc_feature (1)..(106): NCBI GI NO: 32489844 NR Description: OSJNBb0065J09.4
  misc_feature (1)..(106): NCBI GI NO: 15233587 NR Description: oxygen-evolving complex protein 16
  misc_feature (1)..(106): NCBI GI NO: 15234637 NR Description: oxygen-evolving complex protein 16
  misc_feature (1)..(106): NCBI GI NO: 11134066 NR Description: Oxygen-evolving enhancer protein 3-2
  misc_feature (1)..(102): NCBI GI NO: 8131595 NR Description: oxygen evolving enhancer protein 3
  misc_feature (1)..(106): NCBI GI NO: 11134057 NR Description: Oxygen-evolving enhancer protein 3-1
  misc_feature (1)..(106): NCBI GI NO: 34810268 NR Description: Chain A
  misc_feature (1)..(106): NCBI GI NO: 131397 NR Description: Oxygen-evolving enhancer protein 3
  misc_feature (1)..(106): NCBI GI NO: 31096349 NR Description: oxygen-evolving enhancer protein 3 precursor
MTVEEALSGVRGHAQDLLHVRDLLELESWRAAQKTLRQSSAILKKDIYIIIQSKPGIERAQLRKLYSTLFNNVTRLDYAARDKDGPQVWQCYKNIVVAVNDILSRI

SEQ ID NO: 8507 - DNA, 1571 bp, Glycine max
  misc_feature (1)..(1571): Ceres Seq. ID no. 15178157
atcatatttaatgccttaagtatctctctatctctctcacacacactcatcattttctagcaaactctctagcctcttcaaatgggctaggaaggttgaatacaaagaaaacaaaccctagcttaattaattaacttgcttgtgttgttaattaatttgttcaacatggaaggaggagtgcctgaagctgatatctctgcctttagagaatgtttgtctctatcatggaaaaatccttatgttcttcgccttgctttctccgctggaattggaggctttctctttggctatgacacaggagtcatatctggagcacttttgtacatcagagatgatttcaaagaggtggatagaaagacgtggctgcaggaagctatagtgagtatggcacttgctggagcaatcataggagcttcagttggtggatggatcaacgatcgatttgggagaaagaaagcaatccttttggcagataccctcttttttatagggtctattgtgatggctgctgctataaacccagctattctgattgttggtcgagttttcgttggccttggggttggaatggcctcaatggcctcacctttgtacatctcagaagcatcaccaacaagagttcgaggtgcccttgttagtctcaatggattcctcatcactggaggacagttcctttcctatgtcatcaacttggccttcacaagcgcaccaggaacatggaggtggatgttaggagtagcagcagtaccagcattgacacaaatcatattgatggttttgctcccagaatcacctcgttggttgttcagaaagggtaaacaagaagaagccaaagaaattttgaggaggatttaccctccccaggatgttgaagatgaaatcaatgctttgaaggaatcaattgaaacggaactcaatgaagaagcttcagcttcaaacaaagtcagcataatgaagctgctgaaaaccaaaactgtgagaagaggtttatatgctggaatgggccttcaaatcttccaacaatttgtggggattaacactgttatgtactacagccccacaattgtgcaattagctggttttgcatcaaatagggttgcactacttctatcacttgtcactgcagggcttaatgcatttggttccattttaagcatatatttcattgacaagactgggaggaggaagcttttgttgtttagtttgtgtggtgttgtggtctcacttgttgttttgaccgtggcttttcatgagactaccactcactcccctatggtcagcacaatcgaaacctctcacttcaacaacacatgccctgattacagcactgctttcaaccctggtgaatgggattgcatgaaatgcctcaaggcctctccagaatgtggcttttgtgcctctagagctaataaggtaaatgtttcataatctcctttagattaagtacatcataaggttttctgattcaaacttggatcctctcgtgtaagatatgaccaagttggagataaaaaagacacaaatgtgacataattagtattattttagtaaaaatgcgtctttctatcttg

SEQ ID NO: 8508 - protein, 420 aa, Glycine max
  peptide (1)..(420): Ceres Seq. ID no. 15178158
  misc_feature (29)..(416): Pfam Name: and other Pfam Description: Sugar
  misc_feature (1)..(416): NCBI GI NO: 15220697 NR Description: sugar transporter family [Arabidopsis thaliana]
  misc_feature (1)..(412): NCBI GI NO: 33146705 NR Description: putative proton myo-inositol transporter
  misc_feature (1)..(417): NCBI GI NO: 9652186 NR Description: putative Na+/myo-inositol symporter
  misc_feature (1)..(417): NCBI GI NO: 32488451 NR Description: OSJNBa0004N05.8
  misc_feature (1)..(412): NCBI GI NO: 15235767 NR Description: sugar transporter family [Arabidopsis thaliana]
  misc_feature (1)..(416): NCBI GI NO: 9652184 NR Description: putative Na+/myo-inositol symporter
  misc_feature (15)..(416): NCBI GI NO: 15227479 NR Description: sugar transporter family [Arabidopsis thaliana]
  misc_feature (21)..(361): NCBI GI NO: 38347452 NR Description: OSJNBa0076N16.21
  misc_feature (23)..(418): NCBI GI NO: 30689342 NR Description: sugar transporter family [Arabidopsis thaliana]
  misc_feature (23)..(418): NCBI GI NO: 25308955 NR Description: probable membrane transporter
MEGGVPEADISAFRECLSLSWKNPYVLRLAFSAGIGGFLFGYDTGVISGALLYIRDDFKEVDRKTWLQEAIVSMALAGAIIGASVGGWINDRFGRKKAILLADTLFFIGSIVMAAAINPAILIVGRVFVGLGVGMASMASPLYISEASPTRVRGALVSLNGFLITGGQFLSYVINLAFTSAPGTWRWMLGVAAVPALTQIILMVLLPESPRWLFRKGKQEEAKEILRRIYPPQDVEDEINALKESIETELNEEASASNKVSIMKLLKTKTVRRGLYAGMGLQIFQQFVGINTVMYYSPTIVQLAGFASNRVALLLSLVTAGLNAFGSILSIYFIDKTGRRKLLLFSLCGVVVSLVVLTVAFHETTTHSPMVSTIETSHFNNTCPDYSTAFNPGEWDCMKCLKASPECGFCASRANKVNVS

SEQ ID NO: 8509 - protein, 347 aa, Glycine max
  peptide (1)..(347): Ceres Seq. ID no. 15178159
  misc_feature (1)..(343): Pfam Name: and other Pfam Description: Sugar
  misc_feature (1)..(343): NCBI GI NO: 15220697 NR Description: sugar transporter family [Arabidopsis thaliana]
  misc_feature (1)..(339): NCBI GI NO: 33146705 NR Description: putative proton myo-inositol transporter
  misc_feature (1)..(344): NCBI GI NO: 9652186 NR Description: putative Na+/myo-inositol symporter
  misc_feature (1)..(344): NCBI GI NO: 32488451 NR Description: OSJNBa0004N05.8
  misc_feature (1)..(339): NCBI GI NO: 15235767 NR Description: sugar transporter family [Arabidopsis thaliana]
  misc_feature (1)..(343): NCBI GI NO: 9652184 NR Description: putative Na+/myo-inositol symporter
  misc_feature (1)..(343): NCBI GI NO: 15227479 NR Description: sugar transporter family [Arabidopsis thaliana]
  misc_feature (1)..(288): NCBI GI NO: 38347452 NR Description: OSJNBa0076N16.21
  misc_feature (1)..(345): NCBI GI NO: 30689342 NR Description: sugar transporter family [Arabidopsis thaliana]
  misc_feature (1)..(345): NCBI GI NO: 25308955 NR Description: probable membrane transporter
MALAGAIIGASVGGWINDRFGRKKAILLADTLFFIGSIVMAAAINPAILIVGRVFVGLGVGMASMASPLYISEASPTRVRGALVSLNGFLITGGQFLSYVINLAFTSAPGTWRWMLGVAAVPALTQIILMVLLPESPRWLFRKGKQEEAKEILRRIYPPQDVEDEINALKESIETELNEEASASNKVSIMKLLKTKTVRRGLYAGMGLQIFQQFVGINTVMYYSPTIVQLAGFASNRVALLLSLVTAGLNAFGSILSIYFIDKTGRRKLLLFSLCGVVVSLVVLTVAFHETTTHSPMVSTIETSHFNNTCPDYSTAFNPGEWDCMKCLKASPECGFCASRANKVNVS

SEQ ID NO: 8510 - protein, 308 aa, Glycine max
  peptide (1)..(308): Ceres Seq. ID no. 15178160
  misc_feature (1)..(304): Pfam Name: and other Pfam Description: Sugar
  misc_feature (1)..(304): NCBI GI NO: 15220697 NR Description: sugar transporter family [Arabidopsis thaliana]
  misc_feature (1)..(300): NCBI GI NO: 33146705 NR Description: putative proton myo-inositol transporter
  misc_feature (1)..(305): NCBI GI NO: 9652186 NR Description: putative Na+/myo-inositol symporter
  misc_feature (1)..(305): NCBI GI NO: 32488451 NR Description: OSJNBa0004N05.8
  misc_feature (1)..(300): NCBI GI NO: 15235767 NR Description: sugar transporter family [Arabidopsis thaliana]
  misc_feature (1)..(304): NCBI GI NO: 9652184 NR Description: putative Na+/myo-inositol symporter
  misc_feature (1)..(304): NCBI GI NO: 15227479 NR Description: sugar transporter family [Arabidopsis thaliana]
  misc_feature (1)..(249): NCBI GI NO: 38347452 NR Description: OSJNBa0076N16.21
  misc_feature (1)..(306): NCBI GI NO: 30689342 NR Description: sugar transporter family [Arabidopsis thaliana]
  misc_feature (1)..(306): NCBI GI NO: 25308955 NR Description: probable membrane transporter
MAAAINPAILIVGRVFVGLGVGMASMASPLYISEASPTRVRGALVSLNGFLITGGQFLSYVINLAFTSAPGTWRWMLGVAAVPALTQIILMVLLPESPRWLFRKGKQEEAKEILRRIYPPQDVEDEINALKESIETELNEEASASNKVSIMKLLKTKTVRRGLYAGMGLQIFQQFVGINTVMYYSPTIVQLAGFASNRVALLLSLVTAGLNAFGSILSIYFIDKTGRRKLLLFSLCGVVVSLVVLTVAFHETTTHSPMVSTIETSHFNNTCPDYSTAFNPGEWDCMKCLKASPECGFCASRANKVNVS

SEQ ID NO: 8511 - DNA, 1145 bp, Glycine max
  misc_feature (1)..(1145): Ceres Seq. ID no. 15170602
gtgttactgttctcagttcccttcatttcatccaaaaacaaaactctctcgttgtgttttgagacatggcatcctcgttggcacctgctaccaaagccgccactaatttgcgcctcacacactctctccgcttctctcctaaacccaacaacctacgctttgccaccaagcctggtaatacgctgttatgcgcaagggttaaggcccaattagatgaggttgcccttgatagttcctcaaatgctactcctcctatcaaagccaaatcaaaggaggaaccacccgcaaaacctttagctgaaccatcttcttcagtcttggcaactcaagaatcggtctctcagtttattactcaagttgcaagtcttgtcaagcttgttgattcgagagacattgtggagttgaagctgaagcagcatgatgttgaagtaacaattaggaaaaaggaggctatgcctcaaccaccacctcctcctcaacctgcggtggtgtattcatcccctccaccagtgttgccaccgccatccgtaccagcatctactccagcacctactctagctcgtgcaaccccttcaccaacttcagcccctgctgtgaagtcagctaaatcatcacttccgcctcttaaaagccccatggcagggacattctaccgaagtcctgcacccggtgaacctccctttgtgaaggttggagacaaagtaaagaaggggcaagttgtatgcatcattgaggcaatgaaattgatgaatgaaatagaagctgatcagtcaggaactatagttgaaattgttgcggaagatgccaaatctgtaagcgttgacactcccctatttgtgattcaaccatagagctcaaagtattcgaatggatggatgaagatctaagtcggtagttgaagtgtgaggctcatcaacccccccccccccccccccccccaccttcaaggtagagaggaagtgtaggaagattttgttctaaattgggatgacacggttgagaagaattattgcttacaatggatttattccttatttttcgcttttatatgattgcactatgttctagtgaaccttttttttgtttaggcaagttaaattgtatgatatttaatctcatgtagtttgtttttactttttgttttg

SEQ ID NO: 8512 - protein, 261 aa, Glycine max
  peptide (1)..(261): Ceres Seq. ID no. 15170603
  misc_feature (185)..(259): Pfam Name: Pfam Description:  Biotin-requiring enzyme
  misc_feature (1)..(261): NCBI GI NO: 3334130 NR Description: Biotin carboxyl carrier protein of acetyl-CoAcarboxylase
  misc_feature (17)..(261): NCBI GI NO: 29169309 NR Description: biotin carboxylase carrier protein
  misc_feature (20)..(261): NCBI GI NO: 1066348 NR Description: acetyl-CoA carboxylase biotin-containing subunit
  misc_feature (20)..(261): NCBI GI NO: 15237339 NR Description: biotin carboxyl carrier protein 1 (BCCP1)
  misc_feature (20)..(261): NCBI GI NO: 1588550 NR Description: Ac-CoA carboxylase
  misc_feature (20)..(256): NCBI GI NO: 1916613 NR Description: acetyl-CoA carboxylase
  misc_feature (1)..(261): NCBI GI NO: 18417704 NR Description: biotin carboxyl carrier protein 2 (BCCP2)
  misc_feature (20)..(261): NCBI GI NO: 12006165 NR Description: biotin carboxyl carrier protein subunit precursor
  misc_feature (66)..(261): NCBI GI NO: 2129784 NR Description: biotin carboxyl carrier protein
  misc_feature (20)..(261): NCBI GI NO: 12006187 NR Description: biotin carboxyl carrier protein subunit
MASSLAPATKAATNLRLTHSLRFSPKPNNLRFATKPGNTLLCARVKAQLDEVALDSSSNATPPIKAKSKEEPPAKPLAEPSSSVLATQESVSQFITQVASLVKLVDSRDIVELKLKQHDVEVTIRKKEAMPQPPPPPQPAVVYSSPPPVLPPPSVPASTPAPTLARATPSPTSAPAVKSAKSSLPPLKSPMAGTFYRSPAPGEPPFVKVGDKVKKGQVVCIIEAMKLMNEIEADQSGTIVEIVAEDAKSVSVDTPLFVIQP

SEQ ID NO: 8513 - protein, 132 aa, Glycine max
  peptide (1)..(132): Ceres Seq. ID no. 15170604
  misc_feature (56)..(130): Pfam Name: Pfam Description:  Biotin-requiring enzyme
  misc_feature (1)..(132): NCBI GI NO: 3334130 NR Description: Biotin carboxyl carrier protein of acetyl-CoAcarboxylase
  misc_feature (1)..(132): NCBI GI NO: 29169309 NR Description: biotin carboxylase carrier protein
  misc_feature (1)..(132): NCBI GI NO: 1066348 NR Description: acetyl-CoA carboxylase biotin-containing subunit
  misc_feature (1)..(132): NCBI GI NO: 15237339 NR Description: biotin carboxyl carrier protein 1 (BCCP1)
  misc_feature (1)..(132): NCBI GI NO: 1588550 NR Description: Ac-CoA carboxylase
  misc_feature (1)..(127): NCBI GI NO: 1916613 NR Description: acetyl-CoA carboxylase
  misc_feature (1)..(132): NCBI GI NO: 18417704 NR Description: biotin carboxyl carrier protein 2 (BCCP2)
  misc_feature (1)..(132): NCBI GI NO: 12006165 NR Description: biotin carboxyl carrier protein subunit precursor
  misc_feature (1)..(132): NCBI GI NO: 2129784 NR Description: biotin carboxyl carrier protein
  misc_feature (1)..(132): NCBI GI NO: 12006187 NR Description: biotin carboxyl carrier protein subunit
MPQPPPPPQPAVVYSSPPPVLPPPSVPASTPAPTLARATPSPTSAPAVKSAKSSLPPLKSPMAGTFYRSPAPGEPPFVKVGDKVKKGQVVCIIEAMKLMNEIEADQSGTIVEIVAEDAKSVSVDTPLFVIQP

SEQ ID NO: 8514 - DNA, 1586 bp, Glycine max
  misc_feature (1)..(1586): Ceres Seq. ID no. 13639645
agaacatcctaatcgaaaaaggaagtaacacaagccttcttcaagtgtttaattctcctctttaatttctctttagaatactcaacctttctcaagattctaatcaaaaggagagaaaaataaaatggccaccgaaaagcttagaggttgtgcaaatgtttttgcaagctctaaaccctacttggccatgatctctttacaatttggctatgcaggcatgaacattatcactaaggtttctctcaaccaaggcatgagccactatgtccttgtggtctatcgccacgcttttgccaccgctgtcatagctccttttgccattatttttgaaaggaaaggtcaaccgaagataacattcccagttttcatgcaaatttttattcttgctcttcttgggcctgtgattgatcaaaatttctactatgctgggttgaagctcacatccccaaccttctcatgtgcaatgagcaacatgcttccagccatgacttttgtgatggcagtgttttgccggatggagaagatagaaataaagaaggtgagatgcatggcaaagatagtgggaacattagtcacagtggcaggggctatgctgatgaccttatatagaggtcctatagtggagatggtatgggccaaacatccacacaataaaaccaatgcaacaaccacgacagaatcatttgacaaagattggttcttaggatgcacctttcttatcattgccaccctagcttgggcatccctatttgttttacaagccaaagctattcagacgtacaagaatcatcagttaagtctaacttcacttgtgtgctttattggcactcttcaagctattgctgttacttttgttgttgaacacaatccttctgtatggagaattggctgggatgtgagcttacttgctgctgcatatgctgggattgtgacatcaagcatatcatactatgtacaaggactggtaattaagatgaaaggacctgtctttgcaactgcctttagccctttaatgatgatcattgtggccatcatgggatccttcatccttgcggaacaaatttatcttggaggtgtaattggtgccatcttaatcgttatagggttatactcagttctgtggggaaagcacaaagaacaaatagagagcaaagtggcagatgaaattcccttgcctgtaaaagatgctcaaattgctgtaattgcagggccaatgattgatgccacagataattttactgaagaaaaatatggtcagaaaggagaagccaacaacaacaagctctcttcacacataataactatgcctattccagagcttcccactaaagctaaccaagagagaaagacttgagtaatttggaatgtgaataggaattaatgttttttaaatgtatgttccatcaaccccatttttccctttttagcaattattcctttctcctttctcttttttttttcttttttctttgctaccaaaagggtcttgtttgttgcatttaagcaatatataacatatataaatatgtaaaaaattccaacttgctagtcaaagtagaatagagaatcataaagcttatctctcc

SEQ ID NO: 8515 - protein, 409 aa, Glycine max
  peptide (1)..(409): Ceres Seq. ID no. 15220462
  misc_feature (27)..(160): Pfam Name: Pfam Description:  Integral membrane protein DUF6
  misc_feature (1)..(383): NCBI GI NO: 2598575 NR Description: MtN21 [Medicago truncatula]
  misc_feature (1)..(402): NCBI GI NO: 15240683 NR Description: nodulin MtN21 family protein
  misc_feature (9)..(386): NCBI GI NO: 34908998 NR Description: nodulin-like protein
  misc_feature (15)..(389): NCBI GI NO: 30688451 NR Description: nodulin MtN21 family protein
  misc_feature (15)..(389): NCBI GI NO: 7487973 NR Description: probable integral membrane protein nodulinAt2g40900
  misc_feature (15)..(366): NCBI GI NO: 15228980 NR Description: nodulin MtN21 family protein
  misc_feature (15)..(366): NCBI GI NO: 21592817 NR Description: nodulin-like protein [Arabidopsis thaliana]
  misc_feature (7)..(382): NCBI GI NO: 15219123 NR Description: nodulin N21 family protein [Arabidopsis thaliana]
  misc_feature (7)..(382): NCBI GI NO: 17529004 NR Description: putative nodulin protein [Arabidopsis thaliana]
  misc_feature (7)..(382): NCBI GI NO: 6552743 NR Description: T26F17.11 [Arabidopsis thaliana]
MATEKLRGCANVFASSKPYLAMISLQFGYAGMNIITKVSLNQGMSHYVLVVYRHAFATAVIAPFAIIFERKGQPKITFPVFMQIFILALLGPVIDQNFYYAGLKLTSPTFSCAMSNMLPAMTFVMAVFCRMEKIEIKKVRCMAKIVGTLVTVAGAMLMTLYRGPIVEMVWAKHPHNKTNATTTTESFDKDWFLGCTFLIIATLAWASLFVLQAKAIQTYKNHQLSLTSLVCFIGTLQAIAVTFVVEHNPSVWRIGWDVSLLAAAYAGIVTSSISYYVQGLVIKMKGPVFATAFSPLMMIIVAIMGSFILAEQIYLGGVIGAILIVIGLYSVLWGKHKEQIESKVADEIPLPVKDAQIAVIAGPMIDATDNFTEEKYGQKGEANNNKLSSHIITMPIPELPTKANQERKT

SEQ ID NO: 8516 - protein, 388 aa, Glycine max
  peptide (1)..(388): Ceres Seq. ID no. 15220463
  misc_feature (6)..(139): Pfam Name: Pfam Description:  Integral membrane protein DUF6
  misc_feature (1)..(362): NCBI GI NO: 2598575 NR Description: MtN21 [Medicago truncatula]
  misc_feature (1)..(381): NCBI GI NO: 15240683 NR Description: nodulin MtN21 family protein
  misc_feature (1)..(365): NCBI GI NO: 34908998 NR Description: nodulin-like protein
  misc_feature (1)..(368): NCBI GI NO: 30688451 NR Description: nodulin MtN21 family protein
  misc_feature (1)..(368): NCBI GI NO: 7487973 NR Description: probable integral membrane protein nodulinAt2g40900
  misc_feature (1)..(345): NCBI GI NO: 15228980 NR Description: nodulin MtN21 family protein
  misc_feature (1)..(345): NCBI GI NO: 21592817 NR Description: nodulin-like protein [Arabidopsis thaliana]
  misc_feature (1)..(361): NCBI GI NO: 15219123 NR Description: nodulin N21 family protein [Arabidopsis thaliana]
  misc_feature (1)..(361): NCBI GI NO: 17529004 NR Description: putative nodulin protein [Arabidopsis thaliana]
  misc_feature (1)..(361): NCBI GI NO: 6552743 NR Description: T26F17.11 [Arabidopsis thaliana]
MISLQFGYAGMNIITKVSLNQGMSHYVLVVYRHAFATAVIAPFAIIFERKGQPKITFPVFMQIFILALLGPVIDQNFYYAGLKLTSPTFSCAMSNMLPAMTFVMAVFCRMEKIEIKKVRCMAKIVGTLVTVAGAMLMTLYRGPIVEMVWAKHPHNKTNATTTTESFDKDWFLGCTFLIIATLAWASLFVLQAKAIQTYKNHQLSLTSLVCFIGTLQAIAVTFVVEHNPSVWRIGWDVSLLAAAYAGIVTSSISYYVQGLVIKMKGPVFATAFSPLMMIIVAIMGSFILAEQIYLGGVIGAILIVIGLYSVLWGKHKEQIESKVADEIPLPVKDAQIAVIAGPMIDATDNFTEEKYGQKGEANNNKLSSHIITMPIPELPTKANQERKT

SEQ ID NO: 8517 - protein, 378 aa, Glycine max
  peptide (1)..(378): Ceres Seq. ID no. 15220464
  misc_feature (1)..(129): Pfam Name: Pfam Description:  Integral membrane protein DUF6
  misc_feature (1)..(352): NCBI GI NO: 2598575 NR Description: MtN21 [Medicago truncatula]
  misc_feature (1)..(371): NCBI GI NO: 15240683 NR Description: nodulin MtN21 family protein
  misc_feature (1)..(355): NCBI GI NO: 34908998 NR Description: nodulin-like protein
  misc_feature (1)..(358): NCBI GI NO: 30688451 NR Description: nodulin MtN21 family protein
  misc_feature (1)..(358): NCBI GI NO: 7487973 NR Description: probable integral membrane protein nodulinAt2g40900
  misc_feature (1)..(335): NCBI GI NO: 15228980 NR Description: nodulin MtN21 family protein
  misc_feature (1)..(335): NCBI GI NO: 21592817 NR Description: nodulin-like protein [Arabidopsis thaliana]
  misc_feature (1)..(351): NCBI GI NO: 15219123 NR Description: nodulin N21 family protein [Arabidopsis thaliana]
  misc_feature (1)..(351): NCBI GI NO: 17529004 NR Description: putative nodulin protein [Arabidopsis thaliana]
  misc_feature (1)..(351): NCBI GI NO: 6552743 NR Description: T26F17.11 [Arabidopsis thaliana]
MNIITKVSLNQGMSHYVLVVYRHAFATAVIAPFAIIFERKGQPKITFPVFMQIFILALLGPVIDQNFYYAGLKLTSPTFSCAMSNMLPAMTFVMAVFCRMEKIEIKKVRCMAKIVGTLVTVAGAMLMTLYRGPIVEMVWAKHPHNKTNATTTTESFDKDWFLGCTFLIIATLAWASLFVLQAKAIQTYKNHQLSLTSLVCFIGTLQAIAVTFVVEHNPSVWRIGWDVSLLAAAYAGIVTSSISYYVQGLVIKMKGPVFATAFSPLMMIIVAIMGSFILAEQIYLGGVIGAILIVIGLYSVLWGKHKEQIESKVADEIPLPVKDAQIAVIAGPMIDATDNFTEEKYGQKGEANNNKLSSHIITMPIPELPTKANQERKT

SEQ ID NO: 8518 - DNA, 1132 bp, Glycine max
  misc_feature (1)..(1132): Ceres Seq. ID no. 14314252
gacactgcggtacagagagaggcaagtcccacatggatgttccaaacagcccggaaatctcggttgatgttcctccttaccttcgagtgcacaaagacagcacggtcgagagaattgccggcacccaagtcgttcccgcaggcctcgattccgacaccaacgttgtctccaaagacatcctcgtcgtccccgaaaccggcgtcactggcagactctaccgtcccaattccaccccgccaaccgccaataagctccctttacttgtctacttccacggcggcgccttctgcatctcctccgcctccgatcctctctaccacacctctctcaacaacctcgtcgccgaggccaacgttgtcgctctctccgtcaattacaggctcgcgccagaacaccctcttcccaccgcgtaccaagactcttggtccgcgattcaatgggtcgctgacgcctctcgtgctaaacaacaccaccaagaagattggatcagggacaacgttgactttgacagagtcttcctagcaggggacagcgcaggtgccaacctgggacactacatggccttaaaattgaataataattttccaacaaatgatggtttcgatttcaaggttgcgggtcttatcatggtgaacccttatttctggggaaaggaagcaattggagtggagattactgatccggagaggaagaagatggtggataagtggtggagttttgtttgtccttcggataaagggaacgatgaccctttgattaacccctttgtggaggaggctccgggtattgaaggggttgcttgcgatagggttcttgttactgttgcggagaaagacatactgagggaaagggggaagctttatcacaaaatgttgagtaacagtgactggagaggaactgctgagttccacgagactccaggggaggatcatgtgtttcacatcttcaaccccaactgcgagcaagcaaagagtttgattaaacgcattgctcatttcattaatgaacattgaatgtttactgtcattttgttcttttttcttgtgttgtgttgtgtgtggatccattaataaaattcaactttgacatttaggttttgattttgatggaatacaataagttttgattcctc

SEQ ID NO: 8519 - protein, 336 aa, Glycine max
  peptide (1)..(336): Ceres Seq. ID no. 14314253
  misc_feature (71)..(129): Pfam Name: Pfam Description:  Carboxylesterase
  misc_feature (18)..(335): NCBI GI NO: 18401743 NR Description: expressed protein [Arabidopsis thaliana]
  misc_feature (18)..(335): NCBI GI NO: 21536771 NR Description: unknown [Arabidopsis thaliana]
  misc_feature (18)..(333): NCBI GI NO: 15228425 NR Description: expressed protein [Arabidopsis thaliana]
  misc_feature (18)..(333): NCBI GI NO: 15222795 NR Description: expressed protein [Arabidopsis thaliana]
  misc_feature (18)..(333): NCBI GI NO: 18086341 NR Description: AT3g48690/T8P19_200 [Arabidopsis thaliana]
  misc_feature (18)..(333): NCBI GI NO: 15228426 NR Description: expressed protein [Arabidopsis thaliana]
  misc_feature (15)..(333): NCBI GI NO: 18402731 NR Description: expressed protein [Arabidopsis thaliana]
  misc_feature (15)..(333): NCBI GI NO: 21537287 NR Description: putative esterase [Arabidopsis thaliana]
  misc_feature (25)..(333): NCBI GI NO: 15222791 NR Description: hypothetical protein [Arabidopsis thaliana]
  misc_feature (19)..(335): NCBI GI NO: 15227669 NR Description: expressed protein [Arabidopsis thaliana]
HCGTERGKSHMDVPNSPEISVDVPPYLRVHKDSTVERIAGTQVVPAGLDSDTNVVSKDILVVPETGVTGRLYRPNSTPPTANKLPLLVYFHGGAFCISSASDPLYHTSLNNLVAEANVVALSVNYRLAPEHPLPTAYQDSWSAIQWVADASRAKQHHQEDWIRDNVDFDRVFLAGDSAGANLGHYMALKLNNNFPTNDGFDFKVAGLIMVNPYFWGKEAIGVEITDPERKKMVDKWWSFVCPSDKGNDDPLINPFVEEAPGIEGVACDRVLVTVAEKDILRERGKLYHKMLSNSDWRGTAEFHETPGEDHVFHIFNPNCEQAKSLIKRIAHFINEH

SEQ ID NO: 8520 - protein, 326 aa, Glycine max
  peptide (1)..(326): Ceres Seq. ID no. 14314254
  misc_feature (61)..(119): Pfam Name: Pfam Description:  Carboxylesterase
  misc_feature (8)..(325): NCBI GI NO: 18401743 NR Description: expressed protein [Arabidopsis thaliana]
  misc_feature (8)..(325): NCBI GI NO: 21536771 NR Description: unknown [Arabidopsis thaliana]
  misc_feature (8)..(323): NCBI GI NO: 15228425 NR Description: expressed protein [Arabidopsis thaliana]
  misc_feature (8)..(323): NCBI GI NO: 15222795 NR Description: expressed protein [Arabidopsis thaliana]
  misc_feature (8)..(323): NCBI GI NO: 18086341 NR Description: AT3g48690/T8P19_200 [Arabidopsis thaliana]
  misc_feature (8)..(323): NCBI GI NO: 15228426 NR Description: expressed protein [Arabidopsis thaliana]
  misc_feature (5)..(323): NCBI GI NO: 18402731 NR Description: expressed protein [Arabidopsis thaliana]
  misc_feature (5)..(323): NCBI GI NO: 21537287 NR Description: putative esterase [Arabidopsis thaliana]
  misc_feature (15)..(323): NCBI GI NO: 15222791 NR Description: hypothetical protein [Arabidopsis thaliana]
  misc_feature (9)..(325): NCBI GI NO: 15227669 NR Description: expressed protein [Arabidopsis thaliana]
MDVPNSPEISVDVPPYLRVHKDSTVERIAGTQVVPAGLDSDTNVVSKDILVVPETGVTGRLYRPNSTPPTANKLPLLVYFHGGAFCISSASDPLYHTSLNNLVAEANVVALSVNYRLAPEHPLPTAYQDSWSAIQWVADASRAKQHHQEDWIRDNVDFDRVFLAGDSAGANLGHYMALKLNNNFPTNDGFDFKVAGLIMVNPYFWGKEAIGVEITDPERKKMVDKWWSFVCPSDKGNDDPLINPFVEEAPGIEGVACDRVLVTVAEKDILRERGKLYHKMLSNSDWRGTAEFHETPGEDHVFHIFNPNCEQAKSLIKRIAHFINEH

SEQ ID NO: 8521 - protein, 173 aa, Glycine max
  peptide (1)..(173): Ceres Seq. ID no. 14314255
  misc_feature (36)..(136): Pfam Name: Pfam Description:  Extensin-like region
DTAVQREASPTWMFQTARKSRLMFLLTFECTKTARSRELPAPKSFPQASIPTPTLSPKTSSSSPKPASLADSTVPIPPRQPPISSLYLSTSTAAPSASPPPPILSTTPLSTTSSPRPTLSLSPSITGSRQNTLFPPRTKTLGPRFNGSLTPLVLNNTTKKIGSGTTLTLTESS

SEQ ID NO: 8522 - DNA, 1371 bp, Glycine max
  misc_feature (1)..(1371): Ceres Seq. ID no. 15172553
aaaccacgaaaggatgcgagaataagaatagctttatagttaacacacacttcgtcttgttgctgagacaagagtcataatcttggctgtaacaggttgaacactgcatcgcaaattctgaatggaaatgtgtggagccacagctctgacatggtctcacaccatctgtccatcgcttcaccttcctcgatccgtctctaccagggaggctaggaggagcttcagtgtttggtgtgtctctgatcaagaccccaagggaaataaaatgatcatatctgtaactggagcaacaggttttattggtagaaggttggtgcaaagattacatgcagacaatcacagtgttcatgtcttgacacgatccaaatctaacgcagaaacaatttttccggcaaaagactttcctggaatcaagatagcagaagagccggaatggaaagatagcattcagggctcaacgggggttgtgaatttggctggactgcccataagtacccgatggtctcctgagataaaaaaggaaatcaagcaaagcaggattcgagtgacctcaaaggttgtagaattgataaacagtgcaccagacgatattcgacctaaagtttttgttagtgctacagctgttggttattatggcaccagtgagacacaagtctttgatgaacaaagtccatcaggaaaggattacttggctgaggtttgtagggaatgggaatcgacagccctaaaggtaaacggaggtgttagagtggctctaattcgcattggtgttgttcttggtaaagatggtggagcattagctaaaatgatacctatgttcaagttgtttgctggtggacctctaggctctggaacacaatggttctcctggattcatttggaagacattgtcaatttaatatatgaaacgctgtcaaatccatcttacaaaggtgttatcaatggaactgcaccaaatcctgtgcgattggcagaattgtgtgatcagctgggacatgccttgggtcgtccctcatggctaccagtaccagactttgcgctcaaggctgtccttggagaaggtgctactgtggttttagaagggcagaaagtgcttcctactcaagctaagaagttgggtttcccattcaaatattcttacgtgaaggatgccctgcaagcaattctttcttgaaagctgcatagcagctactgccacattcttaattcttttgacatcagtggcattcaccgtattgagatttttgaaagcgatagatatacttctgaagatgtgattgaattgtaatctattttatttttggtcatgtgaattcaaaaacgtaactattaactaacaaaaaaaaaaaaaaaaaaaaaaaaaaaaaaaag

SEQ ID NO: 8523 - protein, 350 aa, Glycine max
  peptide (1)..(350): Ceres Seq. ID no. 15172554
  misc_feature (51)..(296): Pfam Name: Pfam Description:  NAD dependent epimerase/dehydratase family
  misc_feature (1)..(349): NCBI GI NO: 18399648 NR Description: expressed protein [Arabidopsis thaliana]
  misc_feature (70)..(349): NCBI GI NO: 25326146 NR Description: hypothetical protein At2g21280
  misc_feature (49)..(350): NCBI GI NO: 23043197 NR Description: hypothetical protein
  misc_feature (49)..(349): NCBI GI NO: 17229882 NR Description: cell division inhibitor [Nostoc sp. PCC 7120]
  misc_feature (49)..(350): NCBI GI NO: 23130096 NR Description: hypothetical protein [Nostoc punctiforme]
  misc_feature (49)..(349): NCBI GI NO: 25019701 NR Description: unknown [Synechococcus sp. PCC 7942]
  misc_feature (49)..(349): NCBI GI NO: 7388457 NR Description: Hypothetical protein slr1223
  misc_feature (49)..(349): NCBI GI NO: 16330099 NR Description: cell division inhibitor
  misc_feature (49)..(349): NCBI GI NO: 22298008 NR Description: ORF_ID:tll0465~putative sugar nucleotide epimerase
  misc_feature (49)..(348): NCBI GI NO: 33239592 NR Description: Predicted nucleoside-diphosphate sugar epimerase
MEMCGATALTWSHTICPSLHLPRSVSTREARRSFSVWCVSDQDPKGNKMIISVTGATGFIGRRLVQRLHADNHSVHVLTRSKSNAETIFPAKDFPGIKIAEEPEWKDSIQGSTGVVNLAGLPISTRWSPEIKKEIKQSRIRVTSKVVELINSAPDDIRPKVFVSATAVGYYGTSETQVFDEQSPSGKDYLAEVCREWESTALKVNGGVRVALIRIGVVLGKDGGALAKMIPMFKLFAGGPLGSGTQWFSWIHLEDIVNLIYETLSNPSYKGVINGTAPNPVRLAELCDQLGHALGRPSWLPVPDFALKAVLGEGATVVLEGQKVLPTQAKKLGFPFKYSYVKDALQAILS

SEQ ID NO: 8524 - protein, 348 aa, Glycine max
  peptide (1)..(348): Ceres Seq. ID no. 15172555
  misc_feature (49)..(294): Pfam Name: Pfam Description:  NAD dependent epimerase/dehydratase family
  misc_feature (1)..(347): NCBI GI NO: 18399648 NR Description: expressed protein [Arabidopsis thaliana]
  misc_feature (68)..(347): NCBI GI NO: 25326146 NR Description: hypothetical protein At2g21280
  misc_feature (47)..(348): NCBI GI NO: 23043197 NR Description: hypothetical protein
  misc_feature (47)..(347): NCBI GI NO: 17229882 NR Description: cell division inhibitor [Nostoc sp. PCC 7120]
  misc_feature (47)..(348): NCBI GI NO: 23130096 NR Description: hypothetical protein [Nostoc punctiforme]
  misc_feature (47)..(347): NCBI GI NO: 25019701 NR Description: unknown [Synechococcus sp. PCC 7942]
  misc_feature (47)..(347): NCBI GI NO: 7388457 NR Description: Hypothetical protein slr1223
  misc_feature (47)..(347): NCBI GI NO: 16330099 NR Description: cell division inhibitor
  misc_feature (47)..(347): NCBI GI NO: 22298008 NR Description: ORF_ID:tll0465~putative sugar nucleotide epimerase
  misc_feature (47)..(346): NCBI GI NO: 33239592 NR Description: Predicted nucleoside-diphosphate sugar epimerase
MCGATALTWSHTICPSLHLPRSVSTREARRSFSVWCVSDQDPKGNKMIISVTGATGFIGRRLVQRLHADNHSVHVLTRSKSNAETIFPAKDFPGIKIAEEPEWKDSIQGSTGVVNLAGLPISTRWSPEIKKEIKQSRIRVTSKVVELINSAPDDIRPKVFVSATAVGYYGTSETQVFDEQSPSGKDYLAEVCREWESTALKVNGGVRVALIRIGVVLGKDGGALAKMIPMFKLFAGGPLGSGTQWFSWIHLEDIVNLIYETLSNPSYKGVINGTAPNPVRLAELCDQLGHALGRPSWLPVPDFALKAVLGEGATVVLEGQKVLPTQAKKLGFPFKYSYVKDALQAILS

SEQ ID NO: 8525 - protein, 302 aa, Glycine max
  peptide (1)..(302): Ceres Seq. ID no. 15172556
  misc_feature (3)..(248): Pfam Name: Pfam Description:  NAD dependent epimerase/dehydratase family
  misc_feature (1)..(301): NCBI GI NO: 18399648 NR Description: expressed protein [Arabidopsis thaliana]
  misc_feature (22)..(301): NCBI GI NO: 25326146 NR Description: hypothetical protein At2g21280
  misc_feature (1)..(302): NCBI GI NO: 23043197 NR Description: hypothetical protein
  misc_feature (1)..(301): NCBI GI NO: 17229882 NR Description: cell division inhibitor [Nostoc sp. PCC 7120]
  misc_feature (1)..(302): NCBI GI NO: 23130096 NR Description: hypothetical protein [Nostoc punctiforme]
  misc_feature (1)..(301): NCBI GI NO: 25019701 NR Description: unknown [Synechococcus sp. PCC 7942]
  misc_feature (1)..(301): NCBI GI NO: 7388457 NR Description: Hypothetical protein slr1223
  misc_feature (1)..(301): NCBI GI NO: 16330099 NR Description: cell division inhibitor
  misc_feature (1)..(301): NCBI GI NO: 22298008 NR Description: ORF_ID:tll0465~putative sugar nucleotide epimerase
  misc_feature (1)..(300): NCBI GI NO: 33239592 NR Description: Predicted nucleoside-diphosphate sugar epimerase
MIISVTGATGFIGRRLVQRLHADNHSVHVLTRSKSNAETIFPAKDFPGIKIAEEPEWKDSIQGSTGVVNLAGLPISTRWSPEIKKEIKQSRIRVTSKVVELINSAPDDIRPKVFVSATAVGYYGTSETQVFDEQSPSGKDYLAEVCREWESTALKVNGGVRVALIRIGVVLGKDGGALAKMIPMFKLFAGGPLGSGTQWFSWIHLEDIVNLIYETLSNPSYKGVINGTAPNPVRLAELCDQLGHALGRPSWLPVPDFALKAVLGEGATVVLEGQKVLPTQAKKLGFPFKYSYVKDALQAILS

SEQ ID NO: 8526 - DNA, 1599 bp, Glycine max
  misc_feature (1)..(1599): Ceres Seq. ID no. 14314319
acccttttcgaagcttgaggaggaagagtgcctcggtattggcgatgaaaaaaatgaagactcaatcatggcgttgatgatgaataagcggggcagtaccttttttgaccaaagaaagaaagccaccacagttaaaataaaaaacttgtccctttgacaagcacttcttagctctctctccgccattctttctttattgctccctccctcctttcccctcctctcccacacgcttcttcttatcctcattccctttcttcaattccattttcacatccttccttcaacttccactgttagaaacttcacgtatgcaaccatgcttctttaccaaccacccaaagaagaggtagaaagaaccatgaagggcaacaacgttttggatctgaaaacgttaattgatgagcttgagtcatcatcaattgaagtcccttcggtttttatctgccctatttcacttgagccaatgctagacccggtgaccctttgcacgggacaaacctacgaccgttccaacatcctcagatggttctccctcggtcacaacacgtgtcccacaacaatgcaagagctttgggatgattcggtcacaccaaacaccacactccaccacttcatactctcttggttctctcacaagtacttggtcatgaagaagaagctcgaggacgttcaaggcacggccttggagctcttggacacgttaaagaaggtaaagggtcaaaatagagttcgagctctcaaacaacttcgccaactcgttgattcccacgtgtccacgaggaaaaccgttgaggaaaataatggttcttctttgatttcttccttgctgggtcctttcacttcccacgctgttggttcggaagcaattgggattctcgtgaatttggagttgggttcggagttgaagaggagtctcatggaccccgcgaaggtgtcgttgttggtggacatcatgaacgagggaacaattcagacaaagatgaattgtgccaaattgattcaaacgttgttggtagaaggtgacccctccgagacagttgttttatcaagtttgagtcttttggttggggtgttgaggttagtgagagataagaaacaccccactagtgttgtaaccggactcatattactcaaaattgtatcttcgcgtgaatccgttagaggctcaattataagcataggagcggtgcctcaattgattcagcttttacccactttgaataatgagtgtttggagatagcacttcatattcttgaggttttgtcaacacttcctgaagggagaatggctttgaaagagtgtccaaatattattcccaatgtggtcaagttgttgatgagagtttcagagagttgcacacaatttgcattgtcgatattgtgggctatttacaagcttgccccagaggaatgtgcttcgaaagctgtggaggcagggttggcggcgaagctactgctagtaattcagagtggttgcaacccggtgttaaagcagaaatctaccgagtttttgaaaatgtgcagcctagattactctactagtattttgatttccaagtgtatgcttactgcaacaatacaatgaaattcaaaacc

SEQ ID NO: 8527 - protein, 422 aa, Glycine max
  peptide (1)..(422): Ceres Seq. ID no. 14314320
  misc_feature (36)..(110): Pfam Name: Pfam Description:  U-box domain
  misc_feature (21)..(422): NCBI GI NO: 18408953 NR Description: expressed protein [Arabidopsis thaliana]
  misc_feature (21)..(422): NCBI GI NO: 21536926 NR Description: unknown [Arabidopsis thaliana]
  misc_feature (21)..(422): NCBI GI NO: 15239204 NR Description: expressed protein [Arabidopsis thaliana]
  misc_feature (21)..(422): NCBI GI NO: 17064800 NR Description: Unknown protein [Arabidopsis thaliana]
  misc_feature (21)..(416): NCBI GI NO: 7486518 NR Description: hypothetical protein F6H11
  misc_feature (21)..(401): NCBI GI NO: 11358045 NR Description: hypothetical protein T16K5
  misc_feature (17)..(421): NCBI GI NO: 20330772 NR Description: Unknown protein
  misc_feature (35)..(419): NCBI GI NO: 25408431 NR Description: hypothetical protein At2g35930
  misc_feature (35)..(419): NCBI GI NO: 30686609 NR Description: expressed protein [Arabidopsis thaliana]
  misc_feature (31)..(400): NCBI GI NO: 13539578 NR Description: photoperiod responsive protein
MLLYQPPKEEVERTMKGNNVLDLKTLIDELESSSIEVPSVFICPISLEPMLDPVTLCTGQTYDRSNILRWFSLGHNTCPTTMQELWDDSVTPNTTLHHFILSWFSHKYLVMKKKLEDVQGTALELLDTLKKVKGQNRVRALKQLRQLVDSHVSTRKTVEENNGSSLISSLLGPFTSHAVGSEAIGILVNLELGSELKRSLMDPAKVSLLVDIMNEGTIQTKMNCAKLIQTLLVEGDPSETVVLSSLSLLVGVLRLVRDKKHPTSVVTGLILLKIVSSRESVRGSIISIGAVPQLIQLLPTLNNECLEIALHILEVLSTLPEGRMALKECPNIIPNVVKLLMRVSESCTQFALSILWAIYKLAPEECASKAVEAGLAAKLLLVIQSGCNPVLKQKSTEFLKMCSLDYSTSILISKCMLTATIQ

SEQ ID NO: 8528 - protein, 408 aa, Glycine max
  peptide (1)..(408): Ceres Seq. ID no. 14314321
  misc_feature (22)..(96): Pfam Name: Pfam Description:  U-box domain
  misc_feature (7)..(408): NCBI GI NO: 18408953 NR Description: expressed protein [Arabidopsis thaliana]
  misc_feature (7)..(408): NCBI GI NO: 21536926 NR Description: unknown [Arabidopsis thaliana]
  misc_feature (7)..(408): NCBI GI NO: 15239204 NR Description: expressed protein [Arabidopsis thaliana]
  misc_feature (7)..(408): NCBI GI NO: 17064800 NR Description: Unknown protein [Arabidopsis thaliana]
  misc_feature (7)..(402): NCBI GI NO: 7486518 NR Description: hypothetical protein F6H11
  misc_feature (7)..(387): NCBI GI NO: 11358045 NR Description: hypothetical protein T16K5
  misc_feature (3)..(407): NCBI GI NO: 20330772 NR Description: Unknown protein
  misc_feature (21)..(405): NCBI GI NO: 25408431 NR Description: hypothetical protein At2g35930
  misc_feature (21)..(405): NCBI GI NO: 30686609 NR Description: expressed protein [Arabidopsis thaliana]
  misc_feature (17)..(386): NCBI GI NO: 13539578 NR Description: photoperiod responsive protein
MKGNNVLDLKTLIDELESSSIEVPSVFICPISLEPMLDPVTLCTGQTYDRSNILRWFSLGHNTCPTTMQELWDDSVTPNTTLHHFILSWFSHKYLVMKKKLEDVQGTALELLDTLKKVKGQNRVRALKQLRQLVDSHVSTRKTVEENNGSSLISSLLGPFTSHAVGSEAIGILVNLELGSELKRSLMDPAKVSLLVDIMNEGTIQTKMNCAKLIQTLLVEGDPSETVVLSSLSLLVGVLRLVRDKKHPTSVVTGLILLKIVSSRESVRGSIISIGAVPQLIQLLPTLNNECLEIALHILEVLSTLPEGRMALKECPNIIPNVVKLLMRVSESCTQFALSILWAIYKLAPEECASKAVEAGLAAKLLLVIQSGCNPVLKQKSTEFLKMCSLDYSTSILISKCMLTATIQ

SEQ ID NO: 8529 - protein, 373 aa, Glycine max
  peptide (1)..(373): Ceres Seq. ID no. 14314322
  misc_feature (1)..(61): Pfam Name: Pfam Description:  U-box domain
  misc_feature (1)..(373): NCBI GI NO: 18408953 NR Description: expressed protein [Arabidopsis thaliana]
  misc_feature (1)..(373): NCBI GI NO: 21536926 NR Description: unknown [Arabidopsis thaliana]
  misc_feature (1)..(373): NCBI GI NO: 15239204 NR Description: expressed protein [Arabidopsis thaliana]
  misc_feature (1)..(373): NCBI GI NO: 17064800 NR Description: Unknown protein [Arabidopsis thaliana]
  misc_feature (1)..(367): NCBI GI NO: 7486518 NR Description: hypothetical protein F6H11
  misc_feature (1)..(352): NCBI GI NO: 11358045 NR Description: hypothetical protein T16K5
  misc_feature (1)..(372): NCBI GI NO: 20330772 NR Description: Unknown protein
  misc_feature (1)..(370): NCBI GI NO: 25408431 NR Description: hypothetical protein At2g35930
  misc_feature (1)..(370): NCBI GI NO: 30686609 NR Description: expressed protein [Arabidopsis thaliana]
  misc_feature (1)..(351): NCBI GI NO: 13539578 NR Description: photoperiod responsive protein
MLDPVTLCTGQTYDRSNILRWFSLGHNTCPTTMQELWDDSVTPNTTLHHFILSWFSHKYLVMKKKLEDVQGTALELLDTLKKVKGQNRVRALKQLRQLVDSHVSTRKTVEENNGSSLISSLLGPFTSHAVGSEAIGILVNLELGSELKRSLMDPAKVSLLVDIMNEGTIQTKMNCAKLIQTLLVEGDPSETVVLSSLSLLVGVLRLVRDKKHPTSVVTGLILLKIVSSRESVRGSIISIGAVPQLIQLLPTLNNECLEIALHILEVLSTLPEGRMALKECPNIIPNVVKLLMRVSESCTQFALSILWAIYKLAPEECASKAVEAGLAAKLLLVIQSGCNPVLKQKSTEFLKMCSLDYSTSILISKCMLTATIQ

SEQ ID NO: 8530 - DNA, 1177 bp, Glycine max
  misc_feature (1)..(1177): Ceres Seq. ID no. 15177758
catctcaagtcttatcatcttcatctcccaagggattcaatacaataccaggctagaagaaactccactcatcaccatctcaagcaactaattaacaagctagtactctttgagtgtttggcaattggcttagatttcttgtacttggaacaagatggaaagcactgtcacatttgagactgatctcaacctcaaggcaaccgagcttagattggggcttccaggaacagaagaaattgttgaaaaaccacttcctgcaagtgctagaattaccaacaaaaggcctttgtctgaaacctctgaggagtgtgcttcaaagggttctagtgctccacatgtggaaactgaagcagcccctcctgccaaggctaagatagtggggtggccaccaatcagatcctacagaaagaacagccttcaggagaatgatggtgctgggatttatgtgaaagtgagcatggatggagctccttacctcagaaagatagacttgaaggtctatggaggctacacacaactcctcaaagctctagaaaacatgttcaagttgaccataggtgagtattctgaaaaagaaggttataagggatctgactatgcacctacatatgaagacaaagatggtgactggatgttagttggagatgttccatgggacatgtttgtgacttcttgcaaaaggctaagaatcatgaaaggatcagaggcaaggggtttgggttgtgctgtatgagaaaaccaaaccactaaaaattactatgagcagagaattaaaaaaagtgttttgggggtgaagggaaaaacatgctgaaaagcttgtgttctcggatctgaagggttttgacttttgaaatcactctagtgtgtgcttttggcatacctttatatggagttatactctgaagcaggagaagatggaagatacggtgcagtttcgatcttcctcaagtttggcaacttttatggttattattttggcatctgtggttggatgctatgcttatgatgttgtttccactgatcctttttgaagtttcatgtgagaaatcttagagatttcaaatgaaactttgtgtagaggagagatagaaaattaaaggttatatgtaatattgtttaatccaagttttttggttgtgttgatacaagaatacaatgtaatatactaagtgttggt

SEQ ID NO: 8531 - protein, 192 aa, Glycine max
  peptide (1)..(192): Ceres Seq. ID no. 15177759
  misc_feature (11)..(192): Pfam Name: Pfam Description:  AUX/IAA family
  misc_feature (1)..(192): NCBI GI NO: 416641 NR Description: Auxin-induced protein 22B
  misc_feature (11)..(192): NCBI GI NO: 1352057 NR Description: AUXIN-INDUCED PROTEIN IAA4
  misc_feature (1)..(192): NCBI GI NO: 34550779 NR Description: Gbiaa-Re [Gossypium barbadense]
  misc_feature (11)..(192): NCBI GI NO: 452777 NR Description: auxin-induced protein [Pisum sativum]
  misc_feature (1)..(190): NCBI GI NO: 11131103 NR Description: Auxin-induced protein 22D
  misc_feature (7)..(192): NCBI GI NO: 20269063 NR Description: aux/IAA protein
  misc_feature (6)..(190): NCBI GI NO: 11131105 NR Description: Auxin-induced protein 22E
  misc_feature (1)..(188): NCBI GI NO: 4887018 NR Description: Nt-iaa4.5 deduced protein [Nicotiana tabacum]
  misc_feature (11)..(192): NCBI GI NO: 15219692 NR Description: auxin-responsive protein IAA3
  misc_feature (1)..(190): NCBI GI NO: 15239950 NR Description: auxin-responsive protein IAA4
MESTVTFETDLNLKATELRLGLPGTEEIVEKPLPASARITNKRPLSETSEECASKGSSAPHVETEAAPPAKAKIVGWPPIRSYRKNSLQENDGAGIYVKVSMDGAPYLRKIDLKVYGGYTQLLKALENMFKLTIGEYSEKEGYKGSDYAPTYEDKDGDWMLVGDVPWDMFVTSCKRLRIMKGSEARGLGCAV

SEQ ID NO: 8532 - DNA, 1636 bp, Glycine max
  misc_feature (1)..(1636): Ceres Seq. ID no. 14315418
agagtgtaaagtgtaaaacgttggttttctctgagaatggcaatgcaggcaggggaactctgtcagcaccaaagtccacattgccctctcattttcttcaacccgattcccgattttggttccttcagcggagggttgtttctcgagcccaaaatccccgattccttcgttcgttccatttcgctgaagatccactccactcccttttcagaatccaatcctcgccgccaccggagaagggttccggcagcgtgctttctatcggtgagcttgccgagtgcaaatctcgttaccgaacccaaactgcaaaatggcgaacacgtgtcagaccaggtgacaacctcaaacggtgtcgttctgcaaagaaaggttagggtacgaggaggcaatgccgtcaacaccaccaaacatctctgggccggtgctgtagccgctatggtctctagaacttgtgtggctccacttgaaaggcttaagttggagtacatagtccgtggtgagaagaggagcatattcgagcttattagcaaaattgcttcttctcaagggttgagaggattttggaaaggcaaccttgtgaatattctgcggacagctccattcaaagcggttaatttttgtgcttacgatacttatagaaagcagctgcttaggttttctgggaatgaggaaactaccaattttgagaggtttattgctggtgctgctgctgggattactgctaccattatctgcctccctcttgacactatccgaaccaagttggtggcacctggtggagaagctttgggcggtgtaattggtgctttcagatacatgattcgaactgaaggattcttttctctttacaagggtttagtgccatcaattataaaaggaatgaagagaatccagaatatgcataaacagggtcaggaactgagtgcctttgaccaacttgagttgggaccggtaaggacattgttgaatggggctattgctggtgcttgtgcagaagctgctacatacccatttgaagtggtgagaaggcaacttcaattgcaagtccaggctacaaaattaagttcttttgcaacatttgccaaaatagttgaacagggaggcattccagctctctatgcaggacttattcccagcttattacaggtgcttccttcagcttccataagtttctttgtctatgagttcatgaagattgttctgaaagtggagtaggcaatgaacaaattcccaggtatatactgctaagaagctgcaccatgatttacgggcaagctgctaaaatagttacagaatagtaacattcaattttaattggcaatcatatttgatgtctgcctttgagggtgaaaggataattcaggtctgctatcccgtacaactgatcacagtatcaacagaatttttggattgactctacactcaatatacccaggcttcaagtctgcaaagtgaaaataaatttattttgttactcccagatcttgaatcctattctcattaggtttacacaattttgttagttttttttttccatctggcagtaagtcttgatcattatcatggggcgtacaagcaaagtccaattactttataagttataacctgaaatgtagcttataaattattcttgtgc

SEQ ID NO: 8533 - protein, 392 aa, Glycine max
  peptide (1)..(392): Ceres Seq. ID no. 14315419
  misc_feature (32)..(279): NCBI GI NO: 15238315 NR Description: mitochondrial carrier protein family
  misc_feature (266)..(392): NCBI GI NO: 15238315 NR Description: mitochondrial carrier protein family
  misc_feature (31)..(278): NCBI GI NO: 25406546 NR Description: hypothetical protein T11I11.12
  misc_feature (267)..(392): NCBI GI NO: 25406546 NR Description: hypothetical protein T11I11.12
  misc_feature (31)..(239): NCBI GI NO: 22330713 NR Description: mitochondrial carrier protein family
  misc_feature (124)..(391): NCBI GI NO: 27369998 NR Description: calcium-binding transporter [Mus musculus]
  misc_feature (124)..(391): NCBI GI NO: 33286910 NR Description: Calcium-binding transporter [Mus musculus]
  misc_feature (105)..(389): NCBI GI NO: 34895726 NR Description: putative peroxisomal Ca-dependent solute carrierprotein
  misc_feature (124)..(391): NCBI GI NO: 33598954 NR Description: calcium-binding transporter [Homo sapiens]
  misc_feature (124)..(391): NCBI GI NO: 11360341 NR Description: peroxisomal Ca-dependent solute carrier
MAMQAGELCQHQSPHCPLIFFNPIPDFGSFSGGLFLEPKIPDSFVRSISLKIHSTPFSESNPRRHRRRVPAACFLSVSLPSANLVTEPKLQNGEHVSDQVTTSNGVVLQRKVRVRGGNAVNTTKHLWAGAVAAMVSRTCVAPLERLKLEYIVRGEKRSIFELISKIASSQGLRGFWKGNLVNILRTAPFKAVNFCAYDTYRKQLLRFSGNEETTNFERFIAGAAAGITATIICLPLDTIRTKLVAPGGEALGGVIGAFRYMIRTEGFFSLYKGLVPSIIKGMKRIQNMHKQGQELSAFDQLELGPVRTLLNGAIAGACAEAATYPFEVVRRQLQLQVQATKLSSFATFAKIVEQGGIPALYAGLIPSLLQVLPSASISFFVYEFMKIVLKVE

SEQ ID NO: 8534 - protein, 390 aa, Glycine max
  peptide (1)..(390): Ceres Seq. ID no. 14315420
  misc_feature (30)..(277): NCBI GI NO: 15238315 NR Description: mitochondrial carrier protein family
  misc_feature (264)..(390): NCBI GI NO: 15238315 NR Description: mitochondrial carrier protein family
  misc_feature (29)..(276): NCBI GI NO: 25406546 NR Description: hypothetical protein T11I11.12
  misc_feature (265)..(390): NCBI GI NO: 25406546 NR Description: hypothetical protein T11I11.12
  misc_feature (29)..(237): NCBI GI NO: 22330713 NR Description: mitochondrial carrier protein family
  misc_feature (122)..(389): NCBI GI NO: 27369998 NR Description: calcium-binding transporter [Mus musculus]
  misc_feature (122)..(389): NCBI GI NO: 33286910 NR Description: Calcium-binding transporter [Mus musculus]
  misc_feature (103)..(387): NCBI GI NO: 34895726 NR Description: putative peroxisomal Ca-dependent solute carrierprotein
  misc_feature (122)..(389): NCBI GI NO: 33598954 NR Description: calcium-binding transporter [Homo sapiens]
  misc_feature (122)..(389): NCBI GI NO: 11360341 NR Description: peroxisomal Ca-dependent solute carrier
MQAGELCQHQSPHCPLIFFNPIPDFGSFSGGLFLEPKIPDSFVRSISLKIHSTPFSESNPRRHRRRVPAACFLSVSLPSANLVTEPKLQNGEHVSDQVTTSNGVVLQRKVRVRGGNAVNTTKHLWAGAVAAMVSRTCVAPLERLKLEYIVRGEKRSIFELISKIASSQGLRGFWKGNLVNILRTAPFKAVNFCAYDTYRKQLLRFSGNEETTNFERFIAGAAAGITATIICLPLDTIRTKLVAPGGEALGGVIGAFRYMIRTEGFFSLYKGLVPSIIKGMKRIQNMHKQGQELSAFDQLELGPVRTLLNGAIAGACAEAATYPFEVVRRQLQLQVQATKLSSFATFAKIVEQGGIPALYAGLIPSLLQVLPSASISFFVYEFMKIVLKVE

SEQ ID NO: 8535 - protein, 259 aa, Glycine max
  peptide (1)..(259): Ceres Seq. ID no. 14315421
  misc_feature (1)..(146): NCBI GI NO: 15238315 NR Description: mitochondrial carrier protein family
  misc_feature (133)..(259): NCBI GI NO: 15238315 NR Description: mitochondrial carrier protein family
  misc_feature (1)..(145): NCBI GI NO: 25406546 NR Description: hypothetical protein T11I11.12
  misc_feature (134)..(259): NCBI GI NO: 25406546 NR Description: hypothetical protein T11I11.12
  misc_feature (1)..(106): NCBI GI NO: 22330713 NR Description: mitochondrial carrier protein family
  misc_feature (1)..(258): NCBI GI NO: 27369998 NR Description: calcium-binding transporter [Mus musculus]
  misc_feature (1)..(258): NCBI GI NO: 33286910 NR Description: Calcium-binding transporter [Mus musculus]
  misc_feature (1)..(256): NCBI GI NO: 34895726 NR Description: putative peroxisomal Ca-dependent solute carrierprotein
  misc_feature (1)..(258): NCBI GI NO: 33598954 NR Description: calcium-binding transporter [Homo sapiens]
  misc_feature (1)..(258): NCBI GI NO: 11360341 NR Description: peroxisomal Ca-dependent solute carrier
MVSRTCVAPLERLKLEYIVRGEKRSIFELISKIASSQGLRGFWKGNLVNILRTAPFKAVNFCAYDTYRKQLLRFSGNEETTNFERFIAGAAAGITATIICLPLDTIRTKLVAPGGEALGGVIGAFRYMIRTEGFFSLYKGLVPSIIKGMKRIQNMHKQGQELSAFDQLELGPVRTLLNGAIAGACAEAATYPFEVVRRQLQLQVQATKLSSFATFAKIVEQGGIPALYAGLIPSLLQVLPSASISFFVYEFMKIVLKVE

SEQ ID NO: 8536 - DNA, 1252 bp, Glycine max
  misc_feature (1)..(1252): Ceres Seq. ID no. 15170595
atgttcacaccaactaactacacatccgaatccatgaacaccaatctcataaggccttgtctctcgctctcgctctcgcgtcgctgctctattccgttcttcacgtgacatcacggcctcaagaaacgtcgtcgtattagagaaaggcgcgtaacgcatgaagagacaaatgttgcatgatctgattgagaatgcaggaggctgcgctgtcaccgatggaggattcgccacgcagctcgaaaagcatggagcctccatcaacgatcctctttggagcgccatctatttgatcaaagacccacatcttatcaaacaggttcacttggaatacttggaggctggtgctgatatattggttacttcatcataccaggctacacttcctggattttcatcgaagggtctatccattgaggaaggggaatcactactagagaagagtgtcaaattggcagttgaagcccgtgatggtttctggaattcagctataataaatcctgggaataaatacagaagagctttggttgcagcctccattggaagctacggatcttaccttgctgatggctcagaatacagtggctgctatggacctgatgtaaatttaaagaagttgaaggattttcatcgccgcagattgcaagttcttgttgaagctggtccagatttacttgcctttgagaccattccaaacaaacttgaagctcaggcttgtgtcgaattgcttgaagaagaaagtgtcaaaatcccatcttggatctgttttaccactgtagatggtgagaatgctccctcaggagagagtttcaaggactgccttgaagcattaaataagagtaacaaagtagatgctgttggtataaactgtgcacctccccatcttatggaaaatctcatttgcaaatttaagcagttaacaaagaaggccatcattgtttatcccaatagtggggaggtatgggatggtaaagccaagaaatggcttccatctaagtgttttcacgatgatgaatttggatttaatgcaacaaggtggcgtgatttgggagctaaaataataggaggttgttgccggactacaccctccaccattcaaattatttcaaatgctttaagagaaaaatcttgattgtgctagtagatgcaactttttttgacaaattgcaatatcttgtctagttattttctataatctatagtctaaatttaaattgtttaaaaaaaaaaaaaaaaaaaaaaaaaaaaaaaaaag

SEQ ID NO: 8537 - protein, 323 aa, Glycine max
  peptide (1)..(323): Ceres Seq. ID no. 15170596
  misc_feature (16)..(320): Pfam Name: Pfam Description:  Homocysteine S-methyltransferase
  misc_feature (1)..(322): NCBI GI NO: 15230929 NR Description: homocysteine S-methyltransferase AtHMT-1
  misc_feature (5)..(323): NCBI GI NO: 10732785 NR Description: homocysteine S-methyltransferase-1 [Zea mays]
  misc_feature (6)..(323): NCBI GI NO: 22748320 NR Description: Putative homocysteine S-methyltransferase-1
  misc_feature (5)..(322): NCBI GI NO: 18403505 NR Description: selenocysteine methyltransferase -related
  misc_feature (6)..(319): NCBI GI NO: 15229396 NR Description: homocysteine S-methyltransferase AtHMT-2
  misc_feature (6)..(319): NCBI GI NO: 25453566 NR Description: homocysteine S-methyltransferase (EC 2
  misc_feature (5)..(322): NCBI GI NO: 21593147 NR Description: putative selenocysteine methyltransferase
  misc_feature (1)..(321): NCBI GI NO: 10732789 NR Description: homocysteine S-methyltransferase-3 [Zea mays]
  misc_feature (10)..(321): NCBI GI NO: 10732787 NR Description: homocysteine S-methyltransferase-2 [Zea mays]
  misc_feature (6)..(321): NCBI GI NO: 10732791 NR Description: homocysteine S-methyltransferase-4 [Zea mays]
MKRQMLHDLIENAGGCAVTDGGFATQLEKHGASINDPLWSAIYLIKDPHLIKQVHLEYLEAGADILVTSSYQATLPGFSSKGLSIEEGESLLEKSVKLAVEARDGFWNSAIINPGNKYRRALVAASIGSYGSYLADGSEYSGCYGPDVNLKKLKDFHRRRLQVLVEAGPDLLAFETIPNKLEAQACVELLEEESVKIPSWICFTTVDGENAPSGESFKDCLEALNKSNKVDAVGINCAPPHLMENLICKFKQLTKKAIIVYPNSGEVWDGKAKKWLPSKCFHDDEFGFNATRWRDLGAKIIGGCCRTTPSTIQIISNALREKS

SEQ ID NO: 8538 - protein, 319 aa, Glycine max
  peptide (1)..(319): Ceres Seq. ID no. 15170597
  misc_feature (12)..(316): Pfam Name: Pfam Description:  Homocysteine S-methyltransferase
  misc_feature (1)..(318): NCBI GI NO: 15230929 NR Description: homocysteine S-methyltransferase AtHMT-1
  misc_feature (1)..(319): NCBI GI NO: 10732785 NR Description: homocysteine S-methyltransferase-1 [Zea mays]
  misc_feature (2)..(319): NCBI GI NO: 22748320 NR Description: Putative homocysteine S-methyltransferase-1
  misc_feature (1)..(318): NCBI GI NO: 18403505 NR Description: selenocysteine methyltransferase -related
  misc_feature (2)..(315): NCBI GI NO: 15229396 NR Description: homocysteine S-methyltransferase AtHMT-2
  misc_feature (2)..(315): NCBI GI NO: 25453566 NR Description: homocysteine S-methyltransferase (EC 2
  misc_feature (1)..(318): NCBI GI NO: 21593147 NR Description: putative selenocysteine methyltransferase
  misc_feature (1)..(317): NCBI GI NO: 10732789 NR Description: homocysteine S-methyltransferase-3 [Zea mays]
  misc_feature (6)..(317): NCBI GI NO: 10732787 NR Description: homocysteine S-methyltransferase-2 [Zea mays]
  misc_feature (2)..(317): NCBI GI NO: 10732791 NR Description: homocysteine S-methyltransferase-4 [Zea mays]
MLHDLIENAGGCAVTDGGFATQLEKHGASINDPLWSAIYLIKDPHLIKQVHLEYLEAGADILVTSSYQATLPGFSSKGLSIEEGESLLEKSVKLAVEARDGFWNSAIINPGNKYRRALVAASIGSYGSYLADGSEYSGCYGPDVNLKKLKDFHRRRLQVLVEAGPDLLAFETIPNKLEAQACVELLEEESVKIPSWICFTTVDGENAPSGESFKDCLEALNKSNKVDAVGINCAPPHLMENLICKFKQLTKKAIIVYPNSGEVWDGKAKKWLPSKCFHDDEFGFNATRWRDLGAKIIGGCCRTTPSTIQIISNALREKS

SEQ ID NO: 8539 - DNA, 1043 bp, Glycine max
  misc_feature (1)..(1043): Ceres Seq. ID no. 14306138
tctctgttagcactctcctctcgacgattccctgtgatctctctctctctttctctctctttctctctcagtcttctctcgctgtggttcagatttcagagcaggatccaaaagccttgcttggtcaagactcattcatgtctgttcctaatgaggaaaacttgtcgtcacattcccagctttcttctcattttttcttggatctccttgattccatcatagttgatgtagcatcagagtgtcacagagtagcaaggctggggcttgattctaatttggaagaagaagatgaagaattgaagctatcggcacaagccagggttagggtggctgatcctagtaacagtaatgaagcaaatggcaagtatgtggttgacatatttggacaaacccatcctcctgtggcaaatgaaatatttgattgcatgaattgtggtcgatccatcatgactgggaggtttgctccacatttggagaagtgcatgggaaagggtaggaaggcacgtctgaaagtgacaagaagcagcacagccgcgcagaaccggtattcacgaggcagtcctagtcctggttctacatattctccatattcaaattactctaccaatagcatgaatcggttggcaaatggaacctccacttttgcaggtgaggagcactcaaatgggacactggagtcatgaactagttcatgtgtaatggctggaatacaggatttctgtcataccttgaacttgtttcttcgccgggagatgtggctgaatttaattgtgtttgaaaataatatttcaaacattttggacctaaacataacaaccatcgttgcctacatcctcgaattgttgtctaccttaaaaaaaaaaaactttgctttttacagtgagttccattgtaattttattatgttttactcctagttccgttgtaattttattataattttactatctgttaacatatgtatattgtgtgcaactatgaactagtattgttcatggatgaaaagatgctcagggttgagatgaataatacacagacatttg

SEQ ID NO: 8540 - protein, 226 aa, Glycine max
  peptide (1)..(226): Ceres Seq. ID no. 14306139
  misc_feature (51)..(224): NCBI GI NO: 22327952 NR Description: expressed protein [Arabidopsis thaliana]
  misc_feature (35)..(224): NCBI GI NO: 8843778 NR Description: emb|CAB85555
  misc_feature (46)..(184): NCBI GI NO: 26984622 NR Description: SI:dZ180G5.4 (novel protein) [Danio rerio]
SVSTLLSTIPCDLSLSFSLFLSQSSLAVVQISEQDPKALLGQDSFMSVPNEENLSSHSQLSSHFFLDLLDSIIVDVASECHRVARLGLDSNLEEEDEELKLSAQARVRVADPSNSNEANGKYVVDIFGQTHPPVANEIFDCMNCGRSIMTGRFAPHLEKCMGKGRKARLKVTRSSTAAQNRYSRGSPSPGSTYSPYSNYSTNSMNRLANGTSTFAGEEHSNGTLES

SEQ ID NO: 8541 - protein, 181 aa, Glycine max
  peptide (1)..(181): Ceres Seq. ID no. 14306140
  misc_feature (6)..(179): NCBI GI NO: 22327952 NR Description: expressed protein [Arabidopsis thaliana]
  misc_feature (1)..(179): NCBI GI NO: 8843778 NR Description: emb|CAB85555
  misc_feature (1)..(139): NCBI GI NO: 26984622 NR Description: SI:dZ180G5.4 (novel protein) [Danio rerio]
MSVPNEENLSSHSQLSSHFFLDLLDSIIVDVASECHRVARLGLDSNLEEEDEELKLSAQARVRVADPSNSNEANGKYVVDIFGQTHPPVANEIFDCMNCGRSIMTGRFAPHLEKCMGKGRKARLKVTRSSTAAQNRYSRGSPSPGSTYSPYSNYSTNSMNRLANGTSTFAGEEHSNGTLES

SEQ ID NO: 8542 - DNA, 594 bp, Glycine max
  misc_feature (1)..(594): Ceres Seq. ID no. 15168472
aagtgaggatagaggctggggctgtggctgaggctgagttctgtaattgtgttttggctgtggacaatggctctgtcttctgggcttttcttgtgttcttcttcccgtgttctcccaccaccagaaacccacactttcatgaggaccaggccttcttctgctgccttgcgcaccatttccgttagctgttgcaccgtctctcagtcgtctaagccagcccgcaaaatccgtggtatcatgaaaccccgcaaagtctcccccgagatggaagacctcgtcggcgctcccgagatggctcgaacccaagtcctcaaacggatttgggcttacattaaggacaacaatcttcaggaccctacagacaagaggactataaattgcgatgagaagctgaagaaggtgtttgcagggaaagatcaagttgagatgctagagattgctcgcttgattagccctcacttccttaaaagtgaaagtgaaagttaagtttttgtatgaaggtcatgctttggtgtattgaacaattacatttggccttgagacatagtagcgtttagtttttgtggtactctgaaaacagaacgagccttgttg

SEQ ID NO: 8543 - protein, 139 aa, Glycine max
  peptide (1)..(139): Ceres Seq. ID no. 15168473
  misc_feature (57)..(133): Pfam Name: Pfam Description:  SWIB/MDM2 domain
  misc_feature (1)..(133): NCBI GI NO: 19698859 NR Description: unknown protein [Arabidopsis thaliana]
  misc_feature (1)..(133): NCBI GI NO: 18397658 NR Description: expressed protein [Arabidopsis thaliana]
  misc_feature (1)..(133): NCBI GI NO: 21593713 NR Description: unknown [Arabidopsis thaliana]
  misc_feature (1)..(133): NCBI GI NO: 14423526 NR Description: putative protein [Arabidopsis thaliana]
  misc_feature (1)..(133): NCBI GI NO: 15235320 NR Description: expressed protein [Arabidopsis thaliana]
  misc_feature (1)..(133): NCBI GI NO: 21553903 NR Description: unknown [Arabidopsis thaliana]
  misc_feature (1)..(134): NCBI GI NO: 14488372 NR Description: hypothetical protein
  misc_feature (9)..(135): NCBI GI NO: 33667910 NR Description: SWIb domain-containing protein [Solanum chacoense]
  misc_feature (45)..(135): NCBI GI NO: 18396594 NR Description: expressed protein [Arabidopsis thaliana]
  misc_feature (49)..(139): NCBI GI NO: 15222765 NR Description: hypothetical protein [Arabidopsis thaliana]
MALSSGLFLCSSSRVLPPPETHTFMRTRPSSAALRTISVSCCTVSQSSKPARKIRGIMKPRKVSPEMEDLVGAPEMARTQVLKRIWAYIKDNNLQDPTDKRTINCDEKLKKVFAGKDQVEMLEIARLISPHFLKSESES

SEQ ID NO: 8544 - protein, 115 aa, Glycine max
  peptide (1)..(115): Ceres Seq. ID no. 15168474
  misc_feature (33)..(109): Pfam Name: Pfam Description:  SWIB/MDM2 domain
  misc_feature (1)..(109): NCBI GI NO: 19698859 NR Description: unknown protein [Arabidopsis thaliana]
  misc_feature (1)..(109): NCBI GI NO: 18397658 NR Description: expressed protein [Arabidopsis thaliana]
  misc_feature (1)..(109): NCBI GI NO: 21593713 NR Description: unknown [Arabidopsis thaliana]
  misc_feature (1)..(109): NCBI GI NO: 14423526 NR Description: putative protein [Arabidopsis thaliana]
  misc_feature (1)..(109): NCBI GI NO: 15235320 NR Description: expressed protein [Arabidopsis thaliana]
  misc_feature (1)..(109): NCBI GI NO: 21553903 NR Description: unknown [Arabidopsis thaliana]
  misc_feature (1)..(110): NCBI GI NO: 14488372 NR Description: hypothetical protein
  misc_feature (1)..(111): NCBI GI NO: 33667910 NR Description: SWIb domain-containing protein [Solanum chacoense]
  misc_feature (21)..(111): NCBI GI NO: 18396594 NR Description: expressed protein [Arabidopsis thaliana]
  misc_feature (25)..(115): NCBI GI NO: 15222765 NR Description: hypothetical protein [Arabidopsis thaliana]
MRTRPSSAALRTISVSCCTVSQSSKPARKIRGIMKPRKVSPEMEDLVGAPEMARTQVLKRIWAYIKDNNLQDPTDKRTINCDEKLKKVFAGKDQVEMLEIARLISPHFLKSESES

SEQ ID NO: 8545 - protein, 82 aa, Glycine max
  peptide (1)..(82): Ceres Seq. ID no. 15168475
  misc_feature (1)..(76): Pfam Name: Pfam Description:  SWIB/MDM2 domain
  misc_feature (1)..(76): NCBI GI NO: 19698859 NR Description: unknown protein [Arabidopsis thaliana]
  misc_feature (1)..(76): NCBI GI NO: 18397658 NR Description: expressed protein [Arabidopsis thaliana]
  misc_feature (1)..(76): NCBI GI NO: 21593713 NR Description: unknown [Arabidopsis thaliana]
  misc_feature (1)..(76): NCBI GI NO: 14423526 NR Description: putative protein [Arabidopsis thaliana]
  misc_feature (1)..(76): NCBI GI NO: 15235320 NR Description: expressed protein [Arabidopsis thaliana]
  misc_feature (1)..(76): NCBI GI NO: 21553903 NR Description: unknown [Arabidopsis thaliana]
  misc_feature (1)..(77): NCBI GI NO: 14488372 NR Description: hypothetical protein
  misc_feature (1)..(78): NCBI GI NO: 33667910 NR Description: SWIb domain-containing protein [Solanum chacoense]
  misc_feature (1)..(78): NCBI GI NO: 18396594 NR Description: expressed protein [Arabidopsis thaliana]
  misc_feature (1)..(82): NCBI GI NO: 15222765 NR Description: hypothetical protein [Arabidopsis thaliana]
MKPRKVSPEMEDLVGAPEMARTQVLKRIWAYIKDNNLQDPTDKRTINCDEKLKKVFAGKDQVEMLEIARLISPHFLKSESES

SEQ ID NO: 8546 - DNA, 749 bp, Glycine max
  misc_feature (1)..(749): Ceres Seq. ID no. 15173807
aaaaaaaatatttgagaggatcgtgagagggacggtagcagagattccgtgagttgcaaaaatgaaaacaattctttctgcagagaccatgaacatcccggacggcgtgagcgtcaaggttaatgccaaggtcatcgaagttgagggcccccgcggaaaattggtgcgagacttcaagcacttgaatctcgattttcagctcatcactgacgaaaacggtaaaaggaagctgaaggtggaggcctggttcggttctcggaaaacatccgccgccattcgcaccgccctgagccacgtggagaatctgatcaccggcgtcaccaagggctaccgctacaaaatgaggttcgtttatgcccattttcccatcaacgcaagcatcggcaacgacaacaagtctattgagatcagaaatttccttggcgaaaagaaggtgagaaaagtggaccttcttaacggtgtttccgttgttcgatctgaaaaagttaaagatgaattgattttggatgggaacgacattgaacttgtttctaggtcctgtgctctcattaaccagaaatgccatgttaaaaagaaggatatcaggaaatttctcgatggcatttatgttagtgagaagggaacaatactggaagagtagatgttgaaaacaacaagcaccttgattgtttagtttgggttgcttttttgttaactgtttgagattggattttacaattttgtgttgtcaaacttttccttttgcgaat

SEQ ID NO: 8547 - protein, 192 aa, Glycine max
  peptide (1)..(192): Ceres Seq. ID no. 15173808
  misc_feature (101)..(180): Pfam Name: Pfam Description:  Ribosomal protein L6
  misc_feature (1)..(192): NCBI GI NO: 266945 NR Description: 60S ribosomal protein L9
  misc_feature (1)..(192): NCBI GI NO: 6015604 NR Description: ribosomal protein L9 [Pisum sativum]
  misc_feature (1)..(192): NCBI GI NO: 18398753 NR Description: 60S ribosomal protein L9 (RPL90B)
  misc_feature (1)..(192): NCBI GI NO: 21554945 NR Description: ribosomal protein L9, putative
  misc_feature (1)..(192): NCBI GI NO: 15235114 NR Description: 60S ribosomal protein L9 (RPL90D)
  misc_feature (1)..(192): NCBI GI NO: 33087067 NR Description: ribosomal L9-like protein
  misc_feature (1)..(192): NCBI GI NO: 6174959 NR Description: 60S RIBOSOMAL PROTEIN L9
  misc_feature (1)..(192): NCBI GI NO: 2129720 NR Description: ribosomal protein L9
  misc_feature (33)..(165): NCBI GI NO: 12322579 NR Description: ribosomal protein L9, 5' partial
  misc_feature (1)..(191): NCBI GI NO: 37779100 NR Description: ribosomal protein L9 [Pagrus major]
MKTILSAETMNIPDGVSVKVNAKVIEVEGPRGKLVRDFKHLNLDFQLITDENGKRKLKVEAWFGSRKTSAAIRTALSHVENLITGVTKGYRYKMRFVYAHFPINASIGNDNKSIEIRNFLGEKKVRKVDLLNGVSVVRSEKVKDELILDGNDIELVSRSCALINQKCHVKKKDIRKFLDGIYVSEKGTILEE

SEQ ID NO: 8548 - protein, 183 aa, Glycine max
  peptide (1)..(183): Ceres Seq. ID no. 15173809
  misc_feature (92)..(171): Pfam Name: Pfam Description:  Ribosomal protein L6
  misc_feature (1)..(183): NCBI GI NO: 266945 NR Description: 60S ribosomal protein L9
  misc_feature (1)..(183): NCBI GI NO: 6015604 NR Description: ribosomal protein L9 [Pisum sativum]
  misc_feature (1)..(183): NCBI GI NO: 18398753 NR Description: 60S ribosomal protein L9 (RPL90B)
  misc_feature (1)..(183): NCBI GI NO: 21554945 NR Description: ribosomal protein L9, putative
  misc_feature (1)..(183): NCBI GI NO: 15235114 NR Description: 60S ribosomal protein L9 (RPL90D)
  misc_feature (1)..(183): NCBI GI NO: 33087067 NR Description: ribosomal L9-like protein
  misc_feature (1)..(183): NCBI GI NO: 6174959 NR Description: 60S RIBOSOMAL PROTEIN L9
  misc_feature (1)..(183): NCBI GI NO: 2129720 NR Description: ribosomal protein L9
  misc_feature (24)..(156): NCBI GI NO: 12322579 NR Description: ribosomal protein L9, 5' partial
  misc_feature (1)..(182): NCBI GI NO: 37779100 NR Description: ribosomal protein L9 [Pagrus major]
MNIPDGVSVKVNAKVIEVEGPRGKLVRDFKHLNLDFQLITDENGKRKLKVEAWFGSRKTSAAIRTALSHVENLITGVTKGYRYKMRFVYAHFPINASIGNDNKSIEIRNFLGEKKVRKVDLLNGVSVVRSEKVKDELILDGNDIELVSRSCALINQKCHVKKKDIRKFLDGIYVSEKGTILEE

SEQ ID NO: 8549 - protein, 99 aa, Glycine max
  peptide (1)..(99): Ceres Seq. ID no. 15173810
  misc_feature (8)..(87): Pfam Name: Pfam Description:  Ribosomal protein L6
  misc_feature (1)..(99): NCBI GI NO: 266945 NR Description: 60S ribosomal protein L9
  misc_feature (1)..(99): NCBI GI NO: 6015604 NR Description: ribosomal protein L9 [Pisum sativum]
  misc_feature (1)..(99): NCBI GI NO: 18398753 NR Description: 60S ribosomal protein L9 (RPL90B)
  misc_feature (1)..(99): NCBI GI NO: 21554945 NR Description: ribosomal protein L9, putative
  misc_feature (1)..(99): NCBI GI NO: 15235114 NR Description: 60S ribosomal protein L9 (RPL90D)
  misc_feature (1)..(99): NCBI GI NO: 33087067 NR Description: ribosomal L9-like protein
  misc_feature (1)..(99): NCBI GI NO: 6174959 NR Description: 60S RIBOSOMAL PROTEIN L9
  misc_feature (1)..(99): NCBI GI NO: 2129720 NR Description: ribosomal protein L9
  misc_feature (1)..(72): NCBI GI NO: 12322579 NR Description: ribosomal protein L9, 5' partial
  misc_feature (1)..(98): NCBI GI NO: 37779100 NR Description: ribosomal protein L9 [Pagrus major]
MRFVYAHFPINASIGNDNKSIEIRNFLGEKKVRKVDLLNGVSVVRSEKVKDELILDGNDIELVSRSCALINQKCHVKKKDIRKFLDGIYVSEKGTILEE

SEQ ID NO: 8550 - DNA, 1129 bp, Glycine max
  misc_feature (1)..(1129): Ceres Seq. ID no. 14306062
tccactccctcttcttctcttcttcccccaacaaactaaaccaaaccataccattaagaaacaacacatctatctcagtccccaaaccaagaaaccctaaattaaattcatgtgctcctccaggtctaccagtgctgcaccaacaagaccttgttacttggaacaaggccacggcttggcttccttaaaacacatggatgcgtgtcataatcgtgccaacaactttgtctctaggtccatgaccatgggttacggcacttcctaccacagaactagtttaaggaacaacaacaacaacaacaacaacaacgtttctgtttcttcaccaagatctgcgagattctacgacgccagattcgaagatcaacaccacccccacttcctctccgcttgtttcctctgcaaaaaatctctcggggacaatagagacatcttcatgtatagaggggacacaccgttttgtagcgaagagtgcaggcaagagcagattgagatagacgaagccaaagagaagaataggaacctttcttcatcgatgaaagctttaaggaacaaggagcagagaaataataataataaatccacgtcgccaaacaaggcgcaacaagactactcgttccgtacgggggcagttgcggcggcgtagggtacaagtacaacgtaggattcctcgagagaggaaccaacaaatgaacgaacggaactgagggcagtgttcccggaaaaggaaagaaaacatttttagaaaagaagaaaaaaaaagtgtgactgaaaaggaaagtaaacaaagggaagttaagttgcgagctttggtttacttctcttcctttttttctttctttctttccacgaacaaagggtctcaaagagaaaggggaattttgtgagctgtgaatggtatacgtgtggcaaagtgtgtgtgcttacaacagtgggagattctctctgccaaatgactcaaaattttcgggtttgctttttttttttttctttttcttttattttttatggggatcaaatttggttttgtttccttttgtatatcaccctacctcgttgagttatagtggttgtgctaatagtttcagttttcaaaaaacggaaactgaatacaatggaaattttctcc

SEQ ID NO: 8551 - protein, 178 aa, Glycine max
  peptide (1)..(178): Ceres Seq. ID no. 14306063
  misc_feature (75)..(134): Pfam Name: DUF581 Pfam Description: Protein of unknown function
  misc_feature (13)..(178): NCBI GI NO: 21594214 NR Description: unknown [Arabidopsis thaliana]
  misc_feature (13)..(178): NCBI GI NO: 18414940 NR Description: senescence-associated protein -related
  misc_feature (33)..(178): NCBI GI NO: 15238001 NR Description: senescence-associated protein -related
  misc_feature (79)..(178): NCBI GI NO: 7485163 NR Description: hypothetical protein - Arabidopsis thaliana
  misc_feature (87)..(152): NCBI GI NO: 38344283 NR Description: OSJNBa0013K16.15
  misc_feature (90)..(165): NCBI GI NO: 38344280 NR Description: OSJNBa0013K16.12
  misc_feature (76)..(178): NCBI GI NO: 18406598 NR Description: senescence-associated protein -related
  misc_feature (75)..(156): NCBI GI NO: 38344282 NR Description: OSJNBa0013K16.14
  misc_feature (76)..(161): NCBI GI NO: 38344285 NR Description: OSJNBa0013K16.17
  misc_feature (68)..(138): NCBI GI NO: 21593931 NR Description: unknown [Arabidopsis thaliana]
MCSSRSTSAAPTRPCYLEQGHGLASLKHMDACHNRANNFVSRSMTMGYGTSYHRTSLRNNNNNNNNNVSVSSPRSARFYDARFEDQHHPHFLSACFLCKKSLGDNRDIFMYRGDTPFCSEECRQEQIEIDEAKEKNRNLSSSMKALRNKEQRNNNNKSTSPNKAQQDYSFRTGAVAAA

SEQ ID NO: 8552 - protein, 150 aa, Glycine max
  peptide (1)..(150): Ceres Seq. ID no. 14306064
  misc_feature (47)..(106): Pfam Name: DUF581 Pfam Description: Protein of unknown function
  misc_feature (1)..(150): NCBI GI NO: 21594214 NR Description: unknown [Arabidopsis thaliana]
  misc_feature (1)..(150): NCBI GI NO: 18414940 NR Description: senescence-associated protein -related
  misc_feature (5)..(150): NCBI GI NO: 15238001 NR Description: senescence-associated protein -related
  misc_feature (51)..(150): NCBI GI NO: 7485163 NR Description: hypothetical protein - Arabidopsis thaliana
  misc_feature (59)..(124): NCBI GI NO: 38344283 NR Description: OSJNBa0013K16.15
  misc_feature (62)..(137): NCBI GI NO: 38344280 NR Description: OSJNBa0013K16.12
  misc_feature (48)..(150): NCBI GI NO: 18406598 NR Description: senescence-associated protein -related
  misc_feature (47)..(128): NCBI GI NO: 38344282 NR Description: OSJNBa0013K16.14
  misc_feature (48)..(133): NCBI GI NO: 38344285 NR Description: OSJNBa0013K16.17
  misc_feature (40)..(110): NCBI GI NO: 21593931 NR Description: unknown [Arabidopsis thaliana]
MDACHNRANNFVSRSMTMGYGTSYHRTSLRNNNNNNNNNVSVSSPRSARFYDARFEDQHHPHFLSACFLCKKSLGDNRDIFMYRGDTPFCSEECRQEQIEIDEAKEKNRNLSSSMKALRNKEQRNNNNKSTSPNKAQQDYSFRTGAVAAA

SEQ ID NO: 8553 - protein, 135 aa, Glycine max
  peptide (1)..(135): Ceres Seq. ID no. 14306065
  misc_feature (32)..(91): Pfam Name: DUF581 Pfam Description: Protein of unknown function
  misc_feature (1)..(135): NCBI GI NO: 21594214 NR Description: unknown [Arabidopsis thaliana]
  misc_feature (1)..(135): NCBI GI NO: 18414940 NR Description: senescence-associated protein -related
  misc_feature (1)..(135): NCBI GI NO: 15238001 NR Description: senescence-associated protein -related
  misc_feature (36)..(135): NCBI GI NO: 7485163 NR Description: hypothetical protein - Arabidopsis thaliana
  misc_feature (44)..(109): NCBI GI NO: 38344283 NR Description: OSJNBa0013K16.15
  misc_feature (47)..(122): NCBI GI NO: 38344280 NR Description: OSJNBa0013K16.12
  misc_feature (33)..(135): NCBI GI NO: 18406598 NR Description: senescence-associated protein -related
  misc_feature (32)..(113): NCBI GI NO: 38344282 NR Description: OSJNBa0013K16.14
  misc_feature (33)..(118): NCBI GI NO: 38344285 NR Description: OSJNBa0013K16.17
  misc_feature (25)..(95): NCBI GI NO: 21593931 NR Description: unknown [Arabidopsis thaliana]
MTMGYGTSYHRTSLRNNNNNNNNNVSVSSPRSARFYDARFEDQHHPHFLSACFLCKKSLGDNRDIFMYRGDTPFCSEECRQEQIEIDEAKEKNRNLSSSMKALRNKEQRNNNNKSTSPNKAQQDYSFRTGAVAAA

SEQ ID NO: 8554 - DNA, 931 bp, Glycine max
  misc_feature (1)..(931): Ceres Seq. ID no. 13594252
ctctttcctcttgtgcgtgcagtagtgactagtgagcaaaaacgaaagaaagagccaccgtaaccgtaatcgcactgttagtaatatcaattctatagtttgttactgacgctgcacccaccgctaaactaaacttccccaatcaccatgggagattctaaacatatttccgttcaccgtcttctcggcgaaggcttaattgctgatgtggtgctgtggaagaattggcgcggagcggttgcggtgcttgtatctgccaccgcattgtggtacctcttcgagcgagccggttacaatttcttgtccttcgtcgccaatgtagtgttgcttcttgttgttattctctttttctgggccaaagctgctaaccttctcaatagacctcttcctcctctccccgatctggagatctcagaggaaactattgccagggttgctgatgcactgcaaatttggatgaatcgggctttgtccgttgcacatgacatagcaattgagaggaatttgctgctttgcctccaggttgttggtgtattgtgggtaatatcttacattggtagtttgttcaactttttgactttgatctattttggtgttcttctttgcttgtctcttcctgtgttgtatgacaagtaccaggaccaagttgatgacaggctgtgtgtgattcatgggattattcagacacagtatacaaaagttcacagtactgttttaagcaagattccaaaactctcaaacaaagaaaagaaggtgcagtaggaacatggtaagagcattctataatttggcatgtatttgatgcaaatagttactcaaaagcatattatcttacttatgtttgtagccaacttgtctattgaatgattaaatgtccatgattctactgttaatagcaatgtaacttattttagttctgcctgtggaagag

SEQ ID NO: 8555 - protein, 204 aa, Glycine max
  peptide (1)..(204): Ceres Seq. ID no. 13594253
  misc_feature (1)..(204): NCBI GI NO: 38345298 NR Description: OSJNBa0043A12.26
  misc_feature (1)..(204): NCBI GI NO: 18402246 NR Description: expressed protein [Arabidopsis thaliana]
  misc_feature (1)..(204): NCBI GI NO: 21593206 NR Description: unknown [Arabidopsis thaliana]
  misc_feature (8)..(204): NCBI GI NO: 30679374 NR Description: expressed protein [Arabidopsis thaliana]
  misc_feature (23)..(204): NCBI GI NO: 25411624 NR Description: hypothetical protein At2g15280
  misc_feature (8)..(202): NCBI GI NO: 34897094 NR Description: unknown protein
  misc_feature (9)..(201): NCBI GI NO: 15236556 NR Description: expressed protein [Arabidopsis thaliana]
  misc_feature (9)..(195): NCBI GI NO: 15222616 NR Description: expressed protein [Arabidopsis thaliana]
  misc_feature (9)..(201): NCBI GI NO: 18406991 NR Description: expressed protein [Arabidopsis thaliana]
  misc_feature (9)..(202): NCBI GI NO: 34904202 NR Description: P0492F05.25
MGDSKHISVHRLLGEGLIADVVLWKNWRGAVAVLVSATALWYLFERAGYNFLSFVANVVLLLVVILFFWAKAANLLNRPLPPLPDLEISEETIARVADALQIWMNRALSVAHDIAIERNLLLCLQVVGVLWVISYIGSLFNFLTLIYFGVLLCLSLPVLYDKYQDQVDDRLCVIHGIIQTQYTKVHSTVLSKIPKLSNKEKKVQ

SEQ ID NO: 8556 - DNA, 870 bp, Glycine max
  misc_feature (1)..(870): Ceres Seq. ID no. 12582457
accctttattctcttacgtctccaactaatcatacagatcgataatcataatcatatctatagctaattaacttaattattttcatccctctactcttcttctctcctctaaactctcttttccattcttgcttcctttgtgggttgtttgagttttctttccttcaatttaattgaaagatggcttgcttggtatctcgctcgggaagggaattgcagaggtacaacaacatgggtggccggcaagttgttgggtgcataccttatagatataaacaagacatagagggtaaaatgagcaacgaattggaagtactagtggttagttcacagaaaggtcaaggattgatgttccctaagggaggatgggaacttgatgaatccgtagaagaagcagcttatagggaatcccttgaagaagcaggagtaatgggaatgattgagcgtgaactggggcaatggaatttcattagcaaaagatatggcatatactatgaaggacacatgttccccatgtttgtcaaggaacaacttgatatatggcccgagaaaaatctacggagaagaatatggatgactgttgctgaagctagagaagtttgtcagcattggtggatgaaggaagcattagatatactggttcaaagaatcgtgtcttcacaacaacgaaaagaagatttatacagcatcggatgattctctaagttttaaaacaatttagtctaggtgggcctaggtcagattgccaagattttgaatcttcaaacattgagagttgttatacagaggattgatttagggagaggaacagaattgtagataaatatggaattgcaattcaatttaatttacacacttatagaacttacg

SEQ ID NO: 8557 - protein, 171 aa, Glycine max
  peptide (1)..(171): Ceres Seq. ID no. 12582458
  misc_feature (21)..(156): Pfam Name: Pfam Description:  NUDIX domain
  misc_feature (1)..(170): NCBI GI NO: 18379275 NR Description: expressed protein; protein id: At2g01670
  misc_feature (1)..(170): NCBI GI NO: 21595695 NR Description: unknown [Arabidopsis thaliana]
  misc_feature (1)..(166): NCBI GI NO: 15223919 NR Description: hypothetical protein; protein id: At1g14860.1
  misc_feature (1)..(154): NCBI GI NO: 15221055 NR Description: unknown protein; protein id: At1g18300.1
  misc_feature (1)..(161): NCBI GI NO: 22330598 NR Description: unknown protein; protein id: At1g73540
  misc_feature (1)..(161): NCBI GI NO: 25367539 NR Description: unknown protein [imported] - Arabidopsis thaliana
  misc_feature (1)..(150): NCBI GI NO: 18399682 NR Description: expressed protein; protein id: At3g12600.1
  misc_feature (1)..(170): NCBI GI NO: 15231598 NR Description: MutT-like protein; protein id: At3g26690.1
  misc_feature (1)..(163): NCBI GI NO: 18391450 NR Description: expressed protein; protein id: At1g12880
  misc_feature (1)..(163): NCBI GI NO: 25518008 NR Description: F13K23.14 protein - Arabidopsis thaliana
MACLVSRSGRELQRYNNMGGRQVVGCIPYRYKQDIEGKMSNELEVLVVSSQKGQGLMFPKGGWELDESVEEAAYRESLEEAGVMGMIERELGQWNFISKRYGIYYEGHMFPMFVKEQLDIWPEKNLRRRIWMTVAEAREVCQHWWMKEALDILVQRIVSSQQRKEDLYSIG

SEQ ID NO: 8558 - protein, 154 aa, Glycine max
  peptide (1)..(154): Ceres Seq. ID no. 12582459
  misc_feature (4)..(139): Pfam Name: Pfam Description:  NUDIX domain
  misc_feature (1)..(153): NCBI GI NO: 18379275 NR Description: expressed protein; protein id: At2g01670
  misc_feature (1)..(153): NCBI GI NO: 21595695 NR Description: unknown [Arabidopsis thaliana]
  misc_feature (1)..(149): NCBI GI NO: 15223919 NR Description: hypothetical protein; protein id: At1g14860.1
  misc_feature (1)..(137): NCBI GI NO: 15221055 NR Description: unknown protein; protein id: At1g18300.1
  misc_feature (1)..(144): NCBI GI NO: 22330598 NR Description: unknown protein; protein id: At1g73540
  misc_feature (1)..(144): NCBI GI NO: 25367539 NR Description: unknown protein [imported] - Arabidopsis thaliana
  misc_feature (1)..(133): NCBI GI NO: 18399682 NR Description: expressed protein; protein id: At3g12600.1
  misc_feature (1)..(153): NCBI GI NO: 15231598 NR Description: MutT-like protein; protein id: At3g26690.1
  misc_feature (1)..(146): NCBI GI NO: 18391450 NR Description: expressed protein; protein id: At1g12880
  misc_feature (1)..(146): NCBI GI NO: 25518008 NR Description: F13K23.14 protein - Arabidopsis thaliana
MGGRQVVGCIPYRYKQDIEGKMSNELEVLVVSSQKGQGLMFPKGGWELDESVEEAAYRESLEEAGVMGMIERELGQWNFISKRYGIYYEGHMFPMFVKEQLDIWPEKNLRRRIWMTVAEAREVCQHWWMKEALDILVQRIVSSQQRKEDLYSIG

SEQ ID NO: 8559 - protein, 133 aa, Glycine max
  peptide (1)..(133): Ceres Seq. ID no. 12582460
  misc_feature (1)..(118): Pfam Name: Pfam Description:  NUDIX domain
  misc_feature (1)..(132): NCBI GI NO: 18379275 NR Description: expressed protein; protein id: At2g01670
  misc_feature (1)..(132): NCBI GI NO: 21595695 NR Description: unknown [Arabidopsis thaliana]
  misc_feature (1)..(128): NCBI GI NO: 15223919 NR Description: hypothetical protein; protein id: At1g14860.1
  misc_feature (1)..(116): NCBI GI NO: 15221055 NR Description: unknown protein; protein id: At1g18300.1
  misc_feature (1)..(123): NCBI GI NO: 22330598 NR Description: unknown protein; protein id: At1g73540
  misc_feature (1)..(123): NCBI GI NO: 25367539 NR Description: unknown protein [imported] - Arabidopsis thaliana
  misc_feature (1)..(112): NCBI GI NO: 18399682 NR Description: expressed protein; protein id: At3g12600.1
  misc_feature (1)..(132): NCBI GI NO: 15231598 NR Description: MutT-like protein; protein id: At3g26690.1
  misc_feature (1)..(125): NCBI GI NO: 18391450 NR Description: expressed protein; protein id: At1g12880
  misc_feature (1)..(125): NCBI GI NO: 25518008 NR Description: F13K23.14 protein - Arabidopsis thaliana
MSNELEVLVVSSQKGQGLMFPKGGWELDESVEEAAYRESLEEAGVMGMIERELGQWNFISKRYGIYYEGHMFPMFVKEQLDIWPEKNLRRRIWMTVAEAREVCQHWWMKEALDILVQRIVSSQQRKEDLYSIG

SEQ ID NO: 8560 - DNA, 932 bp, Glycine max
  misc_feature (1)..(932): Ceres Seq. ID no. 13594254
aacttattcagccaacatagtaaggtgcaacagatagtaaccaagtgaagattccattcaagatgaaactctttgctcactttttctttatgttgttgttcttggtggccttttccaacatccaagtttgtttgggggactgtgataatcttcaggacacttgtccagcagttccacccaataagcagaccatattcatcaatggtcttcaatgcaaaaacccagttaatgtaacagctcaagatttcaggaccacagaactaagcaaaactggccctagagacatttttggtgcatctttgaaaattgtgagtgctgctgagttcattggcctcaatactcttggcctctccattggaagaactgaccttgatgggaatggcctggtgaacttccactatcatcctagggctactgagataatctatgtcaccaaaggggtgttgttggctggttttgttgacaccaaaaaccagtatttccagaagtttcttaaagtaggtgatgtctttgtgttccccaaggctttgttccacttctttctaaatactgattttgaagaagccactgttttctcagtgtacaacagccagaatcctggctttgtgtcccttagtcctacaacttttgacacaacattggagtcattggacaagatcaagaagagactcatctcactctctgcctctgaagctcaagctcaagctcaagatgtcaacagtttcatctctccagaattggaaaccatttacagttagccatttcaaattgcgtcaaattttgttatttacagcatttatttttcaaatatatagcgcttatccaaaaaagcgctgtatatattctccataacagcacttcaggcagtacatatatagcatttttttaaggagaagcgctatatattctggtatatatacagcacctgtttg

SEQ ID NO: 8561 - protein, 231 aa, Glycine max
  peptide (1)..(231): Ceres Seq. ID no. 13594255
  misc_feature (65)..(184): Pfam Name: Pfam Description:  Cupin
  misc_feature (7)..(205): NCBI GI NO: 15240338 NR Description: germin-like protein family [Arabidopsis thaliana]
  misc_feature (9)..(210): NCBI GI NO: 19071771 NR Description: germin-like protein [Pinus sylvestris]
  misc_feature (10)..(210): NCBI GI NO: 2745849 NR Description: germin-like protein; PcGER1 [Pinus caribaea]
  misc_feature (1)..(212): NCBI GI NO: 18203442 NR Description: Rhicadhesin receptor precursor
  misc_feature (9)..(210): NCBI GI NO: 7447346 NR Description: germin-like protein - Monterey pine
  misc_feature (26)..(185): NCBI GI NO: 22329473 NR Description: germin-like protein (GLP7) [Arabidopsis thaliana]
  misc_feature (7)..(212): NCBI GI NO: 15228673 NR Description: germin-like protein (GLP10) [Arabidopsis thaliana]
  misc_feature (8)..(206): NCBI GI NO: 38637079 NR Description: putative germin A
  misc_feature (10)..(192): NCBI GI NO: 25044823 NR Description: germin-like protein [Ananas comosus]
  misc_feature (10)..(199): NCBI GI NO: 15217561 NR Description: germin-like protein (GLP4) (GLP5)
MKLFAHFFFMLLFLVAFSNIQVCLGDCDNLQDTCPAVPPNKQTIFINGLQCKNPVNVTAQDFRTTELSKTGPRDIFGASLKIVSAAEFIGLNTLGLSIGRTDLDGNGLVNFHYHPRATEIIYVTKGVLLAGFVDTKNQYFQKFLKVGDVFVFPKALFHFFLNTDFEEATVFSVYNSQNPGFVSLSPTTFDTTLESLDKIKKRLISLSASEAQAQAQDVNSFISPELETIYS

SEQ ID NO: 8562 - protein, 222 aa, Glycine max
  peptide (1)..(222): Ceres Seq. ID no. 13594256
  misc_feature (56)..(175): Pfam Name: Pfam Description:  Cupin
  misc_feature (1)..(196): NCBI GI NO: 15240338 NR Description: germin-like protein family [Arabidopsis thaliana]
  misc_feature (1)..(201): NCBI GI NO: 19071771 NR Description: germin-like protein [Pinus sylvestris]
  misc_feature (1)..(201): NCBI GI NO: 2745849 NR Description: germin-like protein; PcGER1 [Pinus caribaea]
  misc_feature (1)..(203): NCBI GI NO: 18203442 NR Description: Rhicadhesin receptor precursor
  misc_feature (1)..(201): NCBI GI NO: 7447346 NR Description: germin-like protein - Monterey pine
  misc_feature (17)..(176): NCBI GI NO: 22329473 NR Description: germin-like protein (GLP7) [Arabidopsis thaliana]
  misc_feature (1)..(203): NCBI GI NO: 15228673 NR Description: germin-like protein (GLP10) [Arabidopsis thaliana]
  misc_feature (1)..(197): NCBI GI NO: 38637079 NR Description: putative germin A
  misc_feature (1)..(183): NCBI GI NO: 25044823 NR Description: germin-like protein [Ananas comosus]
  misc_feature (1)..(190): NCBI GI NO: 15217561 NR Description: germin-like protein (GLP4) (GLP5)
MLLFLVAFSNIQVCLGDCDNLQDTCPAVPPNKQTIFINGLQCKNPVNVTAQDFRTTELSKTGPRDIFGASLKIVSAAEFIGLNTLGLSIGRTDLDGNGLVNFHYHPRATEIIYVTKGVLLAGFVDTKNQYFQKFLKVGDVFVFPKALFHFFLNTDFEEATVFSVYNSQNPGFVSLSPTTFDTTLESLDKIKKRLISLSASEAQAQAQDVNSFISPELETIYS

SEQ ID NO: 8563 - DNA, 830 bp, Glycine max
  misc_feature (1)..(830): Ceres Seq. ID no. 15173757
attctgaaagagaagatagggagggtgggtggtttggtttggtgcaaatcaatggattccttagaagacagcggctattgggattttctcgattactctttcattgatcaagcgccccctgatttcctttggtccaataatactattagtgtgaacaccgaagttgacattccaggtgatgctgctgcgtgtcaagagaacaccaagaagaggggacatgctgattcaagctgccaggtgggatctaaagcttgccgtgagaagttgcggagggagagactcaatgaaaggttctgtgacttgagctctgttttggagccagggagacctgtgagaacagataaaccagctatacttgatgatgctatcagagtcttgagtcaacttaaaactgaagctcaggagctcaaaaaaacaaatgaaaaattactagaggaaataaaatgtttaaaggcagagaaaaatgaacttcgggaagagaaacttgttctgaaagcagataaggaaaggattgagaagcagttgaaggccttacccgttgcaccagcagggtatatgactccacctgtagctgctgctgcatatcaagcaggggttaacaagatggctctttatccaaactatggctacatcccaatgtggcaatatcttcctcaatctgtcagagacacatctcatgatcatgagctcaggcctcctgctgcatagttggttccttccattgttactctttggataattatttcacaacattggcgaagtattgacatgtaaatattgtcatccttcgatttttttttataataaaaatgagaaataattttgataat

SEQ ID NO: 8564 - protein, 235 aa, Glycine max
  peptide (1)..(235): Ceres Seq. ID no. 15173758
  misc_feature (81)..(130): Pfam Name: Pfam Description:  Helix-loop-helix DNA-binding domain
  misc_feature (68)..(235): NCBI GI NO: 18414212 NR Description: bHLH protein [Arabidopsis thaliana]
  misc_feature (68)..(235): NCBI GI NO: 30682847 NR Description: bHLH protein [Arabidopsis thaliana]
  misc_feature (65)..(235): NCBI GI NO: 20127030 NR Description: putative bHLH transcription factor
  misc_feature (65)..(235): NCBI GI NO: 22331274 NR Description: bHLH protein [Arabidopsis thaliana]
  misc_feature (31)..(235): NCBI GI NO: 15239706 NR Description: bHLH protein [Arabidopsis thaliana]
  misc_feature (31)..(235): NCBI GI NO: 21592325 NR Description: bHLH transcription factor, putative
  misc_feature (27)..(235): NCBI GI NO: 15223710 NR Description: bHLH protein [Arabidopsis thaliana]
  misc_feature (65)..(235): NCBI GI NO: 32352190 NR Description: hypothetical protein
  misc_feature (27)..(235): NCBI GI NO: 38636768 NR Description: helix-loop-helix-like protein
  misc_feature (45)..(235): NCBI GI NO: 29367409 NR Description: helix-loop-helix-like protein
ILKEKIGRVGGLVWCKSMDSLEDSGYWDFLDYSFIDQAPPDFLWSNNTISVNTEVDIPGDAAACQENTKKRGHADSSCQVGSKACREKLRRERLNERFCDLSSVLEPGRPVRTDKPAILDDAIRVLSQLKTEAQELKKTNEKLLEEIKCLKAEKNELREEKLVLKADKERIEKQLKALPVAPAGYMTPPVAAAAYQAGVNKMALYPNYGYIPMWQYLPQSVRDTSHDHELRPPAA

SEQ ID NO: 8565 - protein, 218 aa, Glycine max
  peptide (1)..(218): Ceres Seq. ID no. 15173759
  misc_feature (64)..(113): Pfam Name: Pfam Description:  Helix-loop-helix DNA-binding domain
  misc_feature (51)..(218): NCBI GI NO: 18414212 NR Description: bHLH protein [Arabidopsis thaliana]
  misc_feature (51)..(218): NCBI GI NO: 30682847 NR Description: bHLH protein [Arabidopsis thaliana]
  misc_feature (48)..(218): NCBI GI NO: 20127030 NR Description: putative bHLH transcription factor
  misc_feature (48)..(218): NCBI GI NO: 22331274 NR Description: bHLH protein [Arabidopsis thaliana]
  misc_feature (14)..(218): NCBI GI NO: 15239706 NR Description: bHLH protein [Arabidopsis thaliana]
  misc_feature (14)..(218): NCBI GI NO: 21592325 NR Description: bHLH transcription factor, putative
  misc_feature (10)..(218): NCBI GI NO: 15223710 NR Description: bHLH protein [Arabidopsis thaliana]
  misc_feature (48)..(218): NCBI GI NO: 32352190 NR Description: hypothetical protein
  misc_feature (10)..(218): NCBI GI NO: 38636768 NR Description: helix-loop-helix-like protein
  misc_feature (28)..(218): NCBI GI NO: 29367409 NR Description: helix-loop-helix-like protein
MDSLEDSGYWDFLDYSFIDQAPPDFLWSNNTISVNTEVDIPGDAAACQENTKKRGHADSSCQVGSKACREKLRRERLNERFCDLSSVLEPGRPVRTDKPAILDDAIRVLSQLKTEAQELKKTNEKLLEEIKCLKAEKNELREEKLVLKADKERIEKQLKALPVAPAGYMTPPVAAAAYQAGVNKMALYPNYGYIPMWQYLPQSVRDTSHDHELRPPAA

SEQ ID NO: 8566 - DNA, 943 bp, Glycine max
  misc_feature (1)..(943): Ceres Seq. ID no. 12608163
aaggtagcaattgaactgtcttcgaaatcaacaacaatctctctctgtctctggctatggctgctattcatgttcatgatgatggtgaagttggttttgaagaaggaatgctatggttaccctctcatgttctgaacgaggcatgcggcactaaggtatgtttgaggaaccgccaccaaaagttccaaaaccatcagcaaatgcatcagcagcgtcatcataaatcacctggagaaccaaaatcacagtactcaaaatctgcctcaagatcttcgtatcaaaggccaaaacttgccaatggtggacctggaatgcgagctattttcttaggatccacgcatagatcatgtggcactggtgtgttcttaccccaaagagcaggcacaaacttccaaccaagcaagaggccagcttgtgctcctatcctagttccagctggagttattcaagctctaaatcttaatgtgcgtgcattaggtctgcagatttcacccccgcaagttcagagttataacccaagatgcagggaagtatacaataataattcagaagaaaagaaaagtgatcagaaagattcgtccaagcaatgtcgttttatatctcagaatcaatgttctactccagagatatttctcccaaaggaatggacttactagctagcttttcattttcaaagagaaaatttaaatttgggaagcacacaaaggggagttaacatcggaccgtgtacatacaaataaaaaaaaaatgaaatcatgctttatgtagaatgctgggaaagtttaaagtgcaattaatttattgctagctgtactgttagattctttgatcatgtatagatgttagcttttgtaataatagattaatggcaacccaagtctcacgagggtcttgtttgtaattgcatgcttcagtattgatataattatattcagtggttctc

SEQ ID NO: 8567 - protein, 199 aa, Glycine max
  peptide (1)..(199): Ceres Seq. ID no. 12608164
  misc_feature (12)..(199): NCBI GI NO: 15235509 NR Description: hypothetical protein; protein id: At4g02830.1
  misc_feature (80)..(141): NCBI GI NO: 20160564 NR Description: P0414E03.8
MAAIHVHDDGEVGFEEGMLWLPSHVLNEACGTKVCLRNRHQKFQNHQQMHQQRHHKSPGEPKSQYSKSASRSSYQRPKLANGGPGMRAIFLGSTHRSCGTGVFLPQRAGTNFQPSKRPACAPILVPAGVIQALNLNVRALGLQISPPQVQSYNPRCREVYNNNSEEKKSDQKDSSKQCRFISQNQCSTPEIFLPKEWTY

SEQ ID NO: 8568 - protein, 182 aa, Glycine max
  peptide (1)..(182): Ceres Seq. ID no. 12608165
  misc_feature (1)..(182): NCBI GI NO: 15235509 NR Description: hypothetical protein; protein id: At4g02830.1
  misc_feature (63)..(124): NCBI GI NO: 20160564 NR Description: P0414E03.8
MLWLPSHVLNEACGTKVCLRNRHQKFQNHQQMHQQRHHKSPGEPKSQYSKSASRSSYQRPKLANGGPGMRAIFLGSTHRSCGTGVFLPQRAGTNFQPSKRPACAPILVPAGVIQALNLNVRALGLQISPPQVQSYNPRCREVYNNNSEEKKSDQKDSSKQCRFISQNQCSTPEIFLPKEWTY

SEQ ID NO: 8569 - protein, 151 aa, Glycine max
  peptide (1)..(151): Ceres Seq. ID no. 12608166
  misc_feature (1)..(151): NCBI GI NO: 15235509 NR Description: hypothetical protein; protein id: At4g02830.1
  misc_feature (32)..(93): NCBI GI NO: 20160564 NR Description: P0414E03.8
MHQQRHHKSPGEPKSQYSKSASRSSYQRPKLANGGPGMRAIFLGSTHRSCGTGVFLPQRAGTNFQPSKRPACAPILVPAGVIQALNLNVRALGLQISPPQVQSYNPRCREVYNNNSEEKKSDQKDSSKQCRFISQNQCSTPEIFLPKEWTY

SEQ ID NO: 8570 - DNA, 1230 bp, Glycine max
  misc_feature (1)..(1230): Ceres Seq. ID no. 15175591
atgaatgatgtgttctagcaattttcctgtgtcgtatcatcaaagcgacggattggtgggggtggcgccttcggccattggcacgtacacctcctaaaaacgacaactcgtttccacggcttggtattttagcaggcaaaacgcaaggacctgggcgagtggcgaaatggcagttccagcagagaggaaccacaaccatttctcagttttgatcgtactctttcttttcctcgtccacaatgctctctgcattaggttcccggatcggatcgcccaacccgccctcgacccgctcgaccaacaccgcctgcgggtcgccgtcttcgccctcggaagcttctggagatccgaagcggtgttcggttgtttaccgggcgttgttcgcaccaccgtcggctacgccggcggatccaagtccaaccccgaataccgaagcctcggtgaccacgccgagtccgttaaggttgagtatgatccgcagctgattagctttagggaactcctggatgtcttttggtcaagtcacgatcctaggcaagtgtatggccaaggtcctgatgtgggtagtcagtacagatctattatttttgttaatggaaccgaagaatcaagaatggctgctgtcagcaaagaacaggaacaaaccctgtcaagaagcagcattgtgactacacaaattctgcaacttggaacattttaccctgcagagccagagcaccagaaatttgaactcaagcaaaataccatccttcttcagttaattgggaaccttccggcagaggagcttgagaggtctagcctggcaacgaaattgaatggatatgttgcagagctttgccctccaaatatccaaaagcaaattgatgccaagatcaacaatattattaaaaagggttggccaattttgagagatttgtagttggcctcgtgggaagttactcagattgtcaacttgtcatttttcaactaacctgcttcgtttcagtacctataggttttattcaatagcttgtatcagttgccgggcttgatttaacgattgtgttgtaattattgtacttgtaaagtcttgagtctccctgtcatccttcaaaaaagaaaccctttgattttttttatttattttttgttttcattcatttaccttttttatttatgaggacaacagagaacctttattattattttattactattattcaaaagagggacaaagaaactagtaattcc

SEQ ID NO: 8571 - protein, 250 aa, Glycine max
  peptide (1)..(250): Ceres Seq. ID no. 15175592
  misc_feature (51)..(201): Pfam Name: Pfam Description:  Peptide methionine sulfoxide reductase
  misc_feature (1)..(250): NCBI GI NO: 15227955 NR Description: peptide methionine sulfoxide reductase -related
  misc_feature (51)..(221): NCBI GI NO: 7937 NR Description: Eip28/29 (ecdysone inducible)
  misc_feature (51)..(221): NCBI GI NO: 24664627 NR Description: Ecdysone-induced protein 28/29kD CG7266-PA
  misc_feature (51)..(221): NCBI GI NO: 119251 NR Description: Ecdysone-induced protein 28/29 kDa
  misc_feature (51)..(221): NCBI GI NO: 33089114 NR Description: methionine sulfoxide reductase
  misc_feature (51)..(221): NCBI GI NO: 311724 NR Description: EIP29 [Drosophila melanogaster]
  misc_feature (51)..(221): NCBI GI NO: 28557615 NR Description: RE51574p [Drosophila melanogaster]
  misc_feature (51)..(221): NCBI GI NO: 24664631 NR Description: Ecdysone-induced protein 28/29kD CG7266-PB
  misc_feature (34)..(191): NCBI GI NO: 22968448 NR Description: hypothetical protein [Rhodospirillum rubrum]
  misc_feature (51)..(187): NCBI GI NO: 28829944 NR Description: similar to Arabidopsis thaliana (Mouse-ear cress)
MAVPAERNHNHFSVLIVLFLFLVHNALCIRFPDRIAQPALDPLDQHRLRVAVFALGSFWRSEAVFGCLPGVVRTTVGYAGGSKSNPEYRSLGDHAESVKVEYDPQLISFRELLDVFWSSHDPRQVYGQGPDVGSQYRSIIFVNGTEESRMAAVSKEQEQTLSRSSIVTTQILQLGTFYPAEPEHQKFELKQNTILLQLIGNLPAEELERSSLATKLNGYVAELCPPNIQKQIDAKINNIIKKGWPILRDL

SEQ ID NO: 8572 - DNA, 540 bp, Glycine max
  misc_feature (1)..(540): Ceres Seq. ID no. 13582542
caatgaatttttgttatacaataaagaatatatatgatgatatacttatgtgttattgcgtgcatgtgtgtatggtattgataggagctagagaatccttccgttttcggagaaggtcaacatcagatgcgtacgagaagacaggccagaacagatcaagctcttcttctcctttcgatgtgtgagaaatgagcctgaccactatatatcctccatggatcgatgactgaaataaaatatatatagtagtttgtttttctctagcctttgcggatgatgctgtatccatttttgtttatgttaattttgtgcatatatatagtatatagtatatagcatatgtatgaatatgtttacgagttcatcagttgagcgattgaagtcctgaaacgatcgaggtagctgtgtgtggtttaacagcttggtcttgttttattgttgaactggtttatggttcggaagctgtaaataagtaataacgtagtataggtgtgtttttgttacgtgtactttgtatatatataaaagcctttccattcc

SEQ ID NO: 8573 - protein, 60 aa, Glycine max
  peptide (1)..(60): Ceres Seq. ID no. 13582543
  misc_feature (28)..(60): NCBI GI NO: 21553000 NR Description: Drm4 [Pisum sativum]
  misc_feature (28)..(60): NCBI GI NO: 21552998 NR Description: Drm3 [Pisum sativum]
  misc_feature (28)..(60): NCBI GI NO: 18476508 NR Description: ultraviolet-B-inducible auxin-related protein
MNFCYTIKNIYDDILMCYCVHVCMVLIGARESFRFRRRSTSDAYEKTGQNRSSSSSPFDV

SEQ ID NO: 8574 - protein, 45 aa, Glycine max
  peptide (1)..(45): Ceres Seq. ID no. 13582544
  misc_feature (13)..(45): NCBI GI NO: 21553000 NR Description: Drm4 [Pisum sativum]
  misc_feature (13)..(45): NCBI GI NO: 21552998 NR Description: Drm3 [Pisum sativum]
  misc_feature (13)..(45): NCBI GI NO: 18476508 NR Description: ultraviolet-B-inducible auxin-related protein
MCYCVHVCMVLIGARESFRFRRRSTSDAYEKTGQNRSSSSSPFDV

SEQ ID NO: 8575 - protein, 37 aa, Glycine max
  peptide (1)..(37): Ceres Seq. ID no. 13582545
  misc_feature (5)..(37): NCBI GI NO: 21553000 NR Description: Drm4 [Pisum sativum]
  misc_feature (5)..(37): NCBI GI NO: 21552998 NR Description: Drm3 [Pisum sativum]
  misc_feature (5)..(37): NCBI GI NO: 18476508 NR Description: ultraviolet-B-inducible auxin-related protein
MVLIGARESFRFRRRSTSDAYEKTGQNRSSSSSPFDV

SEQ ID NO: 8576 - DNA, 818 bp, Glycine max
  misc_feature (1)..(818): Ceres Seq. ID no. 15173764
gtagttctgttttgccagtgattgaagctagttagaacaagatgttgcagctactctacactgcgattttctccgaaatgcttttgattctcacgctcgtcttcaaaaccccactgagaaaactcgtcatcgtttccctcgatagtgtgaagcgcggtcgcggtcccgtggtggtttccaccgtgggcgccacattgatggtggttctcgcttcgagcctctacagcatggccaagatccagcaacgcaccctcgaggccggcatagtcaaccccaccgaccaagtcctcatgtccaagcacatgctcgaagcttctctcatggggtttctgctgttcctctctctgatgattgatagattgcaccattacataagagagcttcggtcactcaggaagaccatggaagctattaagaaacaaagccgaagttttgaagatggtaaaaatggaaattcagaggaacataaagcattgaatgaagaaattaccacattgaagtctaaaattaagaaactagaatctgaatgtgaggcaaaaggaagtcaagctaagactttggaaactgaagtagaggctcttaaaaagcaatccgaggggttccttatggaatatgatcgcctcttggaagacaatcagagtcttaggagtcagttgcaggccattgaccagagccctttgaattttgataataaaaagagtatgtgattgttgaaatatccagaaaacagtttttatcctttgttttaactcttgtttgagtgtcacatactttcttaatgaggttacagttgtaaataccaagtgtttacagacagg

SEQ ID NO: 8577 - protein, 221 aa, Glycine max
  peptide (1)..(221): Ceres Seq. ID no. 15173765
  misc_feature (4)..(192): Pfam Name: Pfam Description:  B-cell receptor-associated protein 31-like
  misc_feature (1)..(221): NCBI GI NO: 18422225 NR Description: expressed protein [Arabidopsis thaliana]
  misc_feature (1)..(221): NCBI GI NO: 21553655 NR Description: unknown [Arabidopsis thaliana]
  misc_feature (1)..(212): NCBI GI NO: 9759015 NR Description: gene_id:K16E1.4~unknown protein
  misc_feature (1)..(220): NCBI GI NO: 22655198 NR Description: unknown protein [Arabidopsis thaliana]
  misc_feature (1)..(205): NCBI GI NO: 34897474 NR Description: unknown protein
  misc_feature (1)..(205): NCBI GI NO: 15239667 NR Description: hypothetical protein [Arabidopsis thaliana]
  misc_feature (1)..(155): NCBI GI NO: 30682503 NR Description: expressed protein [Arabidopsis thaliana]
  misc_feature (1)..(205): NCBI GI NO: 15231412 NR Description: expressed protein [Arabidopsis thaliana]
  misc_feature (1)..(126): NCBI GI NO: 18402620 NR Description: expressed protein [Arabidopsis thaliana]
MLQLLYTAIFSEMLLILTLVFKTPLRKLVIVSLDSVKRGRGPVVVSTVGATLMVVLASSLYSMAKIQQRTLEAGIVNPTDQVLMSKHMLEASLMGFLLFLSLMIDRLHHYIRELRSLRKTMEAIKKQSRSFEDGKNGNSEEHKALNEEITTLKSKIKKLESECEAKGSQAKTLETEVEALKKQSEGFLMEYDRLLEDNQSLRSQLQAIDQSPLNFDNKKSM

SEQ ID NO: 8578 - protein, 209 aa, Glycine max
  peptide (1)..(209): Ceres Seq. ID no. 15173766
  misc_feature (1)..(180): Pfam Name: Pfam Description:  B-cell receptor-associated protein 31-like
  misc_feature (1)..(209): NCBI GI NO: 18422225 NR Description: expressed protein [Arabidopsis thaliana]
  misc_feature (1)..(209): NCBI GI NO: 21553655 NR Description: unknown [Arabidopsis thaliana]
  misc_feature (1)..(200): NCBI GI NO: 9759015 NR Description: gene_id:K16E1.4~unknown protein
  misc_feature (1)..(208): NCBI GI NO: 22655198 NR Description: unknown protein [Arabidopsis thaliana]
  misc_feature (1)..(193): NCBI GI NO: 34897474 NR Description: unknown protein
  misc_feature (1)..(193): NCBI GI NO: 15239667 NR Description: hypothetical protein [Arabidopsis thaliana]
  misc_feature (1)..(143): NCBI GI NO: 30682503 NR Description: expressed protein [Arabidopsis thaliana]
  misc_feature (1)..(193): NCBI GI NO: 15231412 NR Description: expressed protein [Arabidopsis thaliana]
  misc_feature (1)..(114): NCBI GI NO: 18402620 NR Description: expressed protein [Arabidopsis thaliana]
MLLILTLVFKTPLRKLVIVSLDSVKRGRGPVVVSTVGATLMVVLASSLYSMAKIQQRTLEAGIVNPTDQVLMSKHMLEASLMGFLLFLSLMIDRLHHYIRELRSLRKTMEAIKKQSRSFEDGKNGNSEEHKALNEEITTLKSKIKKLESECEAKGSQAKTLETEVEALKKQSEGFLMEYDRLLEDNQSLRSQLQAIDQSPLNFDNKKSM

SEQ ID NO: 8579 - protein, 169 aa, Glycine max
  peptide (1)..(169): Ceres Seq. ID no. 15173767
  misc_feature (1)..(140): Pfam Name: Pfam Description:  B-cell receptor-associated protein 31-like
  misc_feature (1)..(169): NCBI GI NO: 18422225 NR Description: expressed protein [Arabidopsis thaliana]
  misc_feature (1)..(169): NCBI GI NO: 21553655 NR Description: unknown [Arabidopsis thaliana]
  misc_feature (1)..(160): NCBI GI NO: 9759015 NR Description: gene_id:K16E1.4~unknown protein
  misc_feature (1)..(168): NCBI GI NO: 22655198 NR Description: unknown protein [Arabidopsis thaliana]
  misc_feature (1)..(153): NCBI GI NO: 34897474 NR Description: unknown protein
  misc_feature (1)..(153): NCBI GI NO: 15239667 NR Description: hypothetical protein [Arabidopsis thaliana]
  misc_feature (1)..(103): NCBI GI NO: 30682503 NR Description: expressed protein [Arabidopsis thaliana]
  misc_feature (1)..(153): NCBI GI NO: 15231412 NR Description: expressed protein [Arabidopsis thaliana]
  misc_feature (1)..(74): NCBI GI NO: 18402620 NR Description: expressed protein [Arabidopsis thaliana]
MVVLASSLYSMAKIQQRTLEAGIVNPTDQVLMSKHMLEASLMGFLLFLSLMIDRLHHYIRELRSLRKTMEAIKKQSRSFEDGKNGNSEEHKALNEEITTLKSKIKKLESECEAKGSQAKTLETEVEALKKQSEGFLMEYDRLLEDNQSLRSQLQAIDQSPLNFDNKKSM

SEQ ID NO: 8580 - DNA, 713 bp, Glycine max
  misc_feature (1)..(713): Ceres Seq. ID no. 15177004
acagctagaactttctactgtatccgatatactagtcttggtctttttcgctatatatactagtaagatgagacaaccctagtagtaacgtacagaaatgggtgctctggatcacatctctgagctctttgactgctcccataccagctccaagctcaagaagaagcgcaaacaattccagacggtggaggtgaaagtgaagatggactgcgaagggtgtgagagaaaggtgaagaaatcggtggagggaatgaaaggggtgacagaggtggaggtggatagaaaggccagcaaggtaactgtttccggctatgtggaaccctcaaaggtggtttctcgcatcgctcaccggactggtaagagagcggagctatggccatacttgccgtacgacgtcgttgcgcacccttacgcgccaggtgtctacgacaggaaagcgccatctggctacgtgcgaaacgctgatgtagaccctcggctcaccaacctcgcacgtgccagctccactgaggtcaagtacaccaccgctttcagcgacgacaaccccgccgcatgtgtcgttatgtgattattcattttctctcttgtatcatagtagcaaagaaaaacatcaaatgttcacgtggggaacgcttttggcacaatggacatgtatcctttaaagtgatgttcggaaatttgatatcttaagatggtaattaattaatgattcc

SEQ ID NO: 8581 - protein, 156 aa, Glycine max
  peptide (1)..(156): Ceres Seq. ID no. 15177005
  misc_feature (19)..(156): NCBI GI NO: 4097573 NR Description: GMFP7 [Glycine max]
  misc_feature (1)..(156): NCBI GI NO: 15233937 NR Description: copper chaperone (CCH)-related
  misc_feature (1)..(156): NCBI GI NO: 21536547 NR Description: farnesylated protein (ATFP6)
  misc_feature (1)..(156): NCBI GI NO: 18418567 NR Description: copper chaperone (CCH)-related
  misc_feature (1)..(156): NCBI GI NO: 38346843 NR Description: OSJNBa0091C12.3
  misc_feature (1)..(156): NCBI GI NO: 23304411 NR Description: farnesylated protein 1
  misc_feature (1)..(156): NCBI GI NO: 21397273 NR Description: Putative atfp6-like protein
  misc_feature (36)..(156): NCBI GI NO: 15239266 NR Description: heavy-metal-associated domain-containing protein
  misc_feature (40)..(156): NCBI GI NO: 4097553 NR Description: ATFP6 [Arabidopsis thaliana]
  misc_feature (26)..(99): NCBI GI NO: 15221451 NR Description: copper-binding protein family
MGALDHISELFDCSHTSSKLKKKRKQFQTVEVKVKMDCEGCERKVKKSVEGMKGVTEVEVDRKASKVTVSGYVEPSKVVSRIAHRTGKRAELWPYLPYDVVAHPYAPGVYDRKAPSGYVRNADVDPRLTNLARASSTEVKYTTAFSDDNPAACVVM

SEQ ID NO: 8582 - protein, 121 aa, Glycine max
  peptide (1)..(121): Ceres Seq. ID no. 15177006
  misc_feature (1)..(121): NCBI GI NO: 4097573 NR Description: GMFP7 [Glycine max]
  misc_feature (1)..(121): NCBI GI NO: 15233937 NR Description: copper chaperone (CCH)-related
  misc_feature (1)..(121): NCBI GI NO: 21536547 NR Description: farnesylated protein (ATFP6)
  misc_feature (1)..(121): NCBI GI NO: 18418567 NR Description: copper chaperone (CCH)-related
  misc_feature (1)..(121): NCBI GI NO: 38346843 NR Description: OSJNBa0091C12.3
  misc_feature (1)..(121): NCBI GI NO: 23304411 NR Description: farnesylated protein 1
  misc_feature (1)..(121): NCBI GI NO: 21397273 NR Description: Putative atfp6-like protein
  misc_feature (1)..(121): NCBI GI NO: 15239266 NR Description: heavy-metal-associated domain-containing protein
  misc_feature (5)..(121): NCBI GI NO: 4097553 NR Description: ATFP6 [Arabidopsis thaliana]
  misc_feature (1)..(64): NCBI GI NO: 15221451 NR Description: copper-binding protein family
MDCEGCERKVKKSVEGMKGVTEVEVDRKASKVTVSGYVEPSKVVSRIAHRTGKRAELWPYLPYDVVAHPYAPGVYDRKAPSGYVRNADVDPRLTNLARASSTEVKYTTAFSDDNPAACVVM

SEQ ID NO: 8583 - protein, 105 aa, Glycine max
  peptide (1)..(105): Ceres Seq. ID no. 15177007
  misc_feature (1)..(105): NCBI GI NO: 4097573 NR Description: GMFP7 [Glycine max]
  misc_feature (1)..(105): NCBI GI NO: 15233937 NR Description: copper chaperone (CCH)-related
  misc_feature (1)..(105): NCBI GI NO: 21536547 NR Description: farnesylated protein (ATFP6)
  misc_feature (1)..(105): NCBI GI NO: 18418567 NR Description: copper chaperone (CCH)-related
  misc_feature (1)..(105): NCBI GI NO: 38346843 NR Description: OSJNBa0091C12.3
  misc_feature (1)..(105): NCBI GI NO: 23304411 NR Description: farnesylated protein 1
  misc_feature (1)..(105): NCBI GI NO: 21397273 NR Description: Putative atfp6-like protein
  misc_feature (1)..(105): NCBI GI NO: 15239266 NR Description: heavy-metal-associated domain-containing protein
  misc_feature (1)..(105): NCBI GI NO: 4097553 NR Description: ATFP6 [Arabidopsis thaliana]
  misc_feature (1)..(48): NCBI GI NO: 15221451 NR Description: copper-binding protein family
MKGVTEVEVDRKASKVTVSGYVEPSKVVSRIAHRTGKRAELWPYLPYDVVAHPYAPGVYDRKAPSGYVRNADVDPRLTNLARASSTEVKYTTAFSDDNPAACVVM

SEQ ID NO: 8584 - DNA, 956 bp, Glycine max
  misc_feature (1)..(956): Ceres Seq. ID no. 13594260
attttagccgccaccatctccattgggaagattgaatttcacaaaccaatcatatctttgatcaccgcattgtcattttgcagatcccaagaagaagcataacaatcaacttcattcattctaatcttgcatttttacttgatgaaaccaaactgggaactcaaaaactgctgcaaccacgaccaggtggtgtttctggtcactgttgctgtctgcactgtcgttatacttgcactacggagaacagttttactcagaccctttaagcttgttgccgtatttcttcatgaggcaagccatgcaattgcttgtaaacttacttgcggtcatgtagaaggaatccaggttcatgcagatgaaggtggaacaacccaaacacgtggaggcatatactggttaatcttgccagctggatatcttggttcatctttctggggcatggtattgatacttgcatcaacaaatcttcttaccgctagaatagctgctggctgttttattgctgctctacttattgtcctcttcattgccaaaaattggactcttcggggactttgcattgtatatgatatttacgacgatctgatctcccgtagagtacattccagtgatgcagaaaaatttgcggaagtgtgcccctgtccttgtactggtgtaggatggggtgttatttgggggttaatatcttttgtgtttctttgcggagctgtgtatctgggtgctgtgatcttgtcataactgataaagaaagaagattgtaattcaagttctatgaccgctgagaagccatgtgattcaatccatctggctttactgcttttacagactaattctgaatattgtcgagtcaggtcctttggcagtttggcttcattcctaatcatattcagggtgatttataccagattaaaatgaaaaagtagttctgatataaatacccatttagtctagttttc

SEQ ID NO: 8585 - protein, 198 aa, Glycine max
  peptide (1)..(198): Ceres Seq. ID no. 15221328
  misc_feature (3)..(145): NCBI GI NO: 15219816 NR Description: expressed protein [Arabidopsis thaliana]
  misc_feature (4)..(142): NCBI GI NO: 23619420 NR Description: hypothetical protein, conserved
  misc_feature (3)..(64): NCBI GI NO: 26449599 NR Description: unknown protein [Arabidopsis thaliana]
  misc_feature (12)..(144): NCBI GI NO: 40740899 NR Description: hypothetical protein AN4854.2
  misc_feature (67)..(142): NCBI GI NO: 23485893 NR Description: hypothetical protein [Plasmodium yoelii yoelii]
MKPNWELKNCCNHDQVVFLVTVAVCTVVILALRRTVLLRPFKLVAVFLHEASHAIACKLTCGHVEGIQVHADEGGTTQTRGGIYWLILPAGYLGSSFWGMVLILASTNLLTARIAAGCFIAALLIVLFIAKNWTLRGLCIVYDIYDDLISRRVHSSDAEKFAEVCPCPCTGVGWGVIWGLISFVFLCGAVYLGAVILS

SEQ ID NO: 8586 - protein, 99 aa, Glycine max
  peptide (1)..(99): Ceres Seq. ID no. 15221329
  misc_feature (1)..(46): NCBI GI NO: 15219816 NR Description: expressed protein [Arabidopsis thaliana]
  misc_feature (1)..(43): NCBI GI NO: 23619420 NR Description: hypothetical protein, conserved
  misc_feature (1)..(45): NCBI GI NO: 40740899 NR Description: hypothetical protein AN4854.2
  misc_feature (1)..(43): NCBI GI NO: 23485893 NR Description: hypothetical protein [Plasmodium yoelii yoelii]
MVLILASTNLLTARIAAGCFIAALLIVLFIAKNWTLRGLCIVYDIYDDLISRRVHSSDAEKFAEVCPCPCTGVGWGVIWGLISFVFLCGAVYLGAVILS

SEQ ID NO: 8587 - DNA, 634 bp, Glycine max
  misc_feature (1)..(634): Ceres Seq. ID no. 12608143
atatgaacacgcaaggtaagttaaggagaccaaaggaagaagaagaagtagtggagtgatcctggttgggtgtgaaaaatgtcgcacagcgataccataccccttcacccatcttcccaatccgacattgacgagatcgagaacctcatcaatgccagcgttcaccaatcagtcccttcggcgagacctcccagtcccccacgcgcctccatccccgtctccgtctccgccgccccttcccccttcatctcctccaacctccctccaccgccacccctccctaaatcctccgtctccgccgtccctccgccccctcccccgccgcgcgccgacatctcctcctccgggttcggctccgcccccaacacgctcactgagcccgtctgggacaccgtgaagcgcgatctctcgagaatcgtgagcaatctgaagctcgttgtgttccccaaccctttccgcgaggaccccggtaaggccctcagggattgggatctgtggggccctttcttcttcattgtcttcctcggcctcaccctctcttggtctgcctctgtcaaaaagtctgaggtttttgctgttgcatttgctttacttgctgctggcgctgtaattttgacattgaacgtacttcttc

SEQ ID NO: 8588 - protein, 185 aa, Glycine max
  peptide (1)..(185): Ceres Seq. ID no. 12608144
  misc_feature (106)..(184): Pfam Name: Pfam Description:  Yip1 domain
  misc_feature (1)..(184): NCBI GI NO: 18398861 NR Description: Expressed protein; protein id: At2g18840
  misc_feature (1)..(184): NCBI GI NO: 7486761 NR Description: hypothetical protein F9N11
  misc_feature (1)..(184): NCBI GI NO: 21553537 NR Description: unknown [Arabidopsis thaliana]
  misc_feature (1)..(184): NCBI GI NO: 18417560 NR Description: hypothetical protein common family
  misc_feature (2)..(184): NCBI GI NO: 34908612 NR Description: P0677H08.6
  misc_feature (96)..(184): NCBI GI NO: 39580726 NR Description: Hypothetical protein CBG08721
  misc_feature (96)..(184): NCBI GI NO: 17509487 NR Description: Yeast YIP1 protein like [Caenorhabditis elegans]
  misc_feature (96)..(184): NCBI GI NO: 29374033 NR Description: terbinafine resistance locus protein YIP1
  misc_feature (130)..(184): NCBI GI NO: 32411483 NR Description: hypothetical protein [Neurospora crassa]
  misc_feature (94)..(123): NCBI GI NO: 32411483 NR Description: hypothetical protein [Neurospora crassa]
MSHSDTIPLHPSSQSDIDEIENLINASVHQSVPSARPPSPPRASIPVSVSAAPSPFISSNLPPPPPLPKSSVSAVPPPPPPPRADISSSGFGSAPNTLTEPVWDTVKRDLSRIVSNLKLVVFPNPFREDPGKALRDWDLWGPFFFIVFLGLTLSWSASVKKSEVFAVAFALLAAGAVILTLNVLL

SEQ ID NO: 8589 - DNA, 1346 bp, Glycine max
  misc_feature (1)..(1346): Ceres Seq. ID no. 15177764
aaaaaaatagaaaaaagtattttggtccaccttccttcttctatcgtcgttgtcttccttcctccatcgtgttagggtttccactttgcagagtttcaatttactctcattatcatatcgcaattcctccgtgtttctgttttgataactcgtaaaaatcctactccatagcaccatatctcgttccctgaatactgattttgaacttcccctgatttttttttcagggaaacaaattattgccccttcctctcttttccaatcatctccagtgaaaaaaaaaaacaatacaaaaactatatctgaaacttattggggatcaggtattgggagatgcctcgagacttgtcgcgatcccgatcacctccctataggcggaggcattcaccatctcctgtgggacacaggtatagcaggaggagcagaagagacagaagcagatctccttattcatcctactcttacaacaggcgaaaaagtcgttctatttcaccaagaggtcacagaagtccttctactactccaagacgtcgtagaagccgaactccatctgctaaacgatacagaagacatagaagtaggagttcctcgttgtctcctactcgtaaatcttccagtccaagtcttgggtcagtagagcacaaaagtgccactgaaaaactaaagaaagaagaagagaagaaaaggcgtcaactagaagcagagttgaaattaatagaagaagagactgcaaagagagttgaagaagcaatccgtaagagagttgaagaaagcttgaaatctgaggaggttcaggtggagattgaaaggcggttggaagagggacggaagagacttaatgatgaagttgcagctcaacttgaaaaagaaaaggaagctgctattattgaggctaaacagaaggaggagcaagcccgtaaagagaaagaagatcttgaaaggatgcttgaggagaaccggaggaaggttgaagaagctcagagaagggaagctttagagcagcaaagaagggaggaagaaagatataaagagctagaagagatgcaaagacagaaggaagaagccatgcgaaggaagaaacacgaggaggagcaagaacgtctaaaccaaataaagttgttgggtaaaaacaaatcccgaccaaaattgtcatttgctcttggatccaaatgaccatgggcttcggcaacatgtgtctatttatttagtctaaagtgtgtatgggcttaatttaattccctatttgtgtctgtaatttgaggaaattatacagccctcctcagctatagtgtgacagcgttgttactgtttccagtttgcattagatttcattgtttgtcattgcc

SEQ ID NO: 8590 - protein, 279 aa, Glycine max
  peptide (1)..(279): Ceres Seq. ID no. 15177765
  misc_feature (92)..(269): Pfam Name: Pfam Description:  Caldesmon
  misc_feature (46)..(279): NCBI GI NO: 15220234 NR Description: F-box protein family [Arabidopsis thaliana]
  misc_feature (30)..(277): NCBI GI NO: 15240607 NR Description: hypothetical protein [Arabidopsis thaliana]
  misc_feature (118)..(266): NCBI GI NO: 37532486 NR Description: hypothetical protein
  misc_feature (6)..(276): NCBI GI NO: 34879649 NR Description: similar to hypothetical protein FLJ10154
  misc_feature (6)..(276): NCBI GI NO: 8922259 NR Description: hypothetical protein FLJ10154 [Homo sapiens]
  misc_feature (32)..(276): NCBI GI NO: 31234644 NR Description: ENSANGP00000022336 [Anopheles gambiae]
  misc_feature (15)..(278): NCBI GI NO: 39795605 NR Description: Unknown (protein for MGC:76303)
  misc_feature (6)..(276): NCBI GI NO: 28278343 NR Description: Unknown (protein for MGC:55548) [Danio rerio]
  misc_feature (29)..(276): NCBI GI NO: 38541231 NR Description: Unknown (protein for MGC:77695) [Danio rerio]
  misc_feature (29)..(276): NCBI GI NO: 27881860 NR Description: Unknown (protein for MGC:55375) [Danio rerio]
MPRDLSRSRSPPYRRRHSPSPVGHRYSRRSRRDRSRSPYSSYSYNRRKSRSISPRGHRSPSTTPRRRRSRTPSAKRYRRHRSRSSSLSPTRKSSSPSLGSVEHKSATEKLKKEEEKKRRQLEAELKLIEEETAKRVEEAIRKRVEESLKSEEVQVEIERRLEEGRKRLNDEVAAQLEKEKEAAIIEAKQKEEQARKEKEDLERMLEENRRKVEEAQRREALEQQRREEERYKELEEMQRQKEEAMRRKKHEEEQERLNQIKLLGKNKSRPKLSFALGSK

SEQ ID NO: 8591 - DNA, 663 bp, Glycine max
  misc_feature (1)..(663): Ceres Seq. ID no. 13581656
atagtatatgatcctgatccaatccttgacagctaggaagcgtctgagtccgagggaagacatgttcccacaaaccctaatattgttctcagcactcataatcctcttccatggagatctcgtcttaagcacaacagcaccagatgatatccacgatgttctccctcagtacggtttcccaaagggtcttcttcccaacaacgcggtctcctacaccctctcccccgacgatggcttcttcaccgtccagctcgatgccccctgctacgtccactgggacgaccaattagtctactaccacagccaaatcagtggcactctcacctacggttccgtctcgcacgtgtcggggattcaggcccagaaactcttcctctggctccctgttaccggaattaaggtccaccaggattccggcatgttagagttcttcgttggagctttgtcccagacgctacccgccagcgacttccaggatgtgcctgggtgctcccgcagaggatcgctgctcgctacaaacctcattcttcctctctgaccgtattcatctctgtctattctctcctactcatcttgttcaacttcaaattaattgtttcatactcaaatactacctactagcctactaccatgttaatgttaattaaaattatagggattttc

SEQ ID NO: 8592 - protein, 176 aa, Glycine max
  peptide (1)..(176): Ceres Seq. ID no. 13581657
  misc_feature (44)..(163): Pfam Name: Pfam Description:  Protein of unknown function, DUF538
  misc_feature (2)..(167): NCBI GI NO: 18405296 NR Description: expressed protein [Arabidopsis thaliana]
  misc_feature (19)..(167): NCBI GI NO: 28273408 NR Description: unknown protein
  misc_feature (23)..(161): NCBI GI NO: 28273404 NR Description: unknown protein
  misc_feature (19)..(165): NCBI GI NO: 18420052 NR Description: expressed protein [Arabidopsis thaliana]
  misc_feature (44)..(166): NCBI GI NO: 34898576 NR Description: P0534A03.14
  misc_feature (26)..(168): NCBI GI NO: 9758945 NR Description: gb|AAF02153
  misc_feature (26)..(167): NCBI GI NO: 30696469 NR Description: expressed protein [Arabidopsis thaliana]
  misc_feature (24)..(168): NCBI GI NO: 21553956 NR Description: unknown [Arabidopsis thaliana]
  misc_feature (28)..(168): NCBI GI NO: 18407279 NR Description: expressed protein [Arabidopsis thaliana]
  misc_feature (39)..(172): NCBI GI NO: 34906900 NR Description: P0470A12.30
MILIQSLTARKRLSPREDMFPQTLILFSALIILFHGDLVLSTTAPDDIHDVLPQYGFPKGLLPNNAVSYTLSPDDGFFTVQLDAPCYVHWDDQLVYYHSQISGTLTYGSVSHVSGIQAQKLFLWLPVTGIKVHQDSGMLEFFVGALSQTLPASDFQDVPGCSRRGSLLATNLILPL

SEQ ID NO: 8593 - protein, 158 aa, Glycine max
  peptide (1)..(158): Ceres Seq. ID no. 13581658
  misc_feature (26)..(145): Pfam Name: Pfam Description:  Protein of unknown function, DUF538
  misc_feature (1)..(149): NCBI GI NO: 18405296 NR Description: expressed protein [Arabidopsis thaliana]
  misc_feature (1)..(149): NCBI GI NO: 28273408 NR Description: unknown protein
  misc_feature (5)..(143): NCBI GI NO: 28273404 NR Description: unknown protein
  misc_feature (1)..(147): NCBI GI NO: 18420052 NR Description: expressed protein [Arabidopsis thaliana]
  misc_feature (26)..(148): NCBI GI NO: 34898576 NR Description: P0534A03.14
  misc_feature (8)..(150): NCBI GI NO: 9758945 NR Description: gb|AAF02153
  misc_feature (8)..(149): NCBI GI NO: 30696469 NR Description: expressed protein [Arabidopsis thaliana]
  misc_feature (6)..(150): NCBI GI NO: 21553956 NR Description: unknown [Arabidopsis thaliana]
  misc_feature (10)..(150): NCBI GI NO: 18407279 NR Description: expressed protein [Arabidopsis thaliana]
  misc_feature (21)..(154): NCBI GI NO: 34906900 NR Description: P0470A12.30
MFPQTLILFSALIILFHGDLVLSTTAPDDIHDVLPQYGFPKGLLPNNAVSYTLSPDDGFFTVQLDAPCYVHWDDQLVYYHSQISGTLTYGSVSHVSGIQAQKLFLWLPVTGIKVHQDSGMLEFFVGALSQTLPASDFQDVPGCSRRGSLLATNLILPL

SEQ ID NO: 8594 - DNA, 923 bp, Glycine max
  misc_feature (1)..(923): Ceres Seq. ID no. 15175041
attttcaccagctaccatatttagttatcagcaatggacttctactttggaaaccctcatccttatcccaatattcatcaatatcatgctcataattctgtagtcagcatgactccatcttcccctgagatcgcactatctgattatctcatgctcgatgactatgttgatcatcaagattctcgatcatcacaaagcactgagtcatcagaaaaagcaaccttctgtgatcccactcacggattcagcactggtgcaacctctaagaacaataacatgaagtgcaaaaatgggattaatgaaaacaaaagaggagtgggtccaaggatcgcgttcagaaccaaatcagagcttgagatcatggatgatggatacaagtggaggaagtacggcaagaagtctgtgaagagcaatcccaatctaaggaactactacaaatgttcaagtggaggatgcagtgtgaagaaaagggtggaaagggatagagatgactccagctatgtgataacaacttatgaaggtgtgcacaatcatgagagcccatttaccacatactacagccccatctccttcgtacattctgatactactttcaaatgacaccatctccaaccccttttctgctcttacacctccctagcttaattatgtgccgagaaaaagcttggaagattcgatcgagcaagggaagctgtgtcaatgcattgtctaattaatcttaattattttcatgctgtaataggttgaagagagtttctttacccttctttttccattttgtttttagatgagtttaatatctcacttaatgaaaaatcaacctttgttagttcatgtgacaaagaacatgattttccatgtgtaaagttgttcaaatcttaaaatagaatggaatgcttcgtcttgttacagttaataaattc

SEQ ID NO: 8595 - protein, 188 aa, Glycine max
  peptide (1)..(188): Ceres Seq. ID no. 15175042
  misc_feature (110)..(169): Pfam Name: Pfam Description:  WRKY DNA -binding domain
  misc_feature (48)..(188): NCBI GI NO: 22328061 NR Description: WRKY family transcription factor
  misc_feature (31)..(169): NCBI GI NO: 22327079 NR Description: WRKY family transcription factor
  misc_feature (98)..(176): NCBI GI NO: 34910570 NR Description: B1131B07.13
  misc_feature (98)..(170): NCBI GI NO: 34906314 NR Description: unnamed protein product
  misc_feature (87)..(170): NCBI GI NO: 34912126 NR Description: OSJNBb0024F06.15
  misc_feature (26)..(179): NCBI GI NO: 15226550 NR Description: WRKY family transcription factor
  misc_feature (26)..(179): NCBI GI NO: 21536889 NR Description: putative WRKY-type DNA binding protein
  misc_feature (21)..(172): NCBI GI NO: 15239913 NR Description: WRKY family transcription factor
  misc_feature (97)..(188): NCBI GI NO: 7484759 NR Description: SP8 binding protein homolog - cucumber
  misc_feature (10)..(172): NCBI GI NO: 15220582 NR Description: WRKY family transcription factor
MDFYFGNPHPYPNIHQYHAHNSVVSMTPSSPEIALSDYLMLDDYVDHQDSRSSQSTESSEKATFCDPTHGFSTGATSKNNNMKCKNGINENKRGVGPRIAFRTKSELEIMDDGYKWRKYGKKSVKSNPNLRNYYKCSSGGCSVKKRVERDRDDSSYVITTYEGVHNHESPFTTYYSPISFVHSDTTFK

SEQ ID NO: 8596 - protein, 163 aa, Glycine max
  peptide (1)..(163): Ceres Seq. ID no. 15175043
  misc_feature (85)..(144): Pfam Name: Pfam Description:  WRKY DNA -binding domain
  misc_feature (23)..(163): NCBI GI NO: 22328061 NR Description: WRKY family transcription factor
  misc_feature (6)..(144): NCBI GI NO: 22327079 NR Description: WRKY family transcription factor
  misc_feature (73)..(151): NCBI GI NO: 34910570 NR Description: B1131B07.13
  misc_feature (73)..(145): NCBI GI NO: 34906314 NR Description: unnamed protein product
  misc_feature (62)..(145): NCBI GI NO: 34912126 NR Description: OSJNBb0024F06.15
  misc_feature (1)..(154): NCBI GI NO: 15226550 NR Description: WRKY family transcription factor
  misc_feature (1)..(154): NCBI GI NO: 21536889 NR Description: putative WRKY-type DNA binding protein
  misc_feature (1)..(147): NCBI GI NO: 15239913 NR Description: WRKY family transcription factor
  misc_feature (72)..(163): NCBI GI NO: 7484759 NR Description: SP8 binding protein homolog - cucumber
  misc_feature (1)..(147): NCBI GI NO: 15220582 NR Description: WRKY family transcription factor
MTPSSPEIALSDYLMLDDYVDHQDSRSSQSTESSEKATFCDPTHGFSTGATSKNNNMKCKNGINENKRGVGPRIAFRTKSELEIMDDGYKWRKYGKKSVKSNPNLRNYYKCSSGGCSVKKRVERDRDDSSYVITTYEGVHNHESPFTTYYSPISFVHSDTTFK

SEQ ID NO: 8597 - protein, 149 aa, Glycine max
  peptide (1)..(149): Ceres Seq. ID no. 15175044
  misc_feature (71)..(130): Pfam Name: Pfam Description:  WRKY DNA -binding domain
  misc_feature (9)..(149): NCBI GI NO: 22328061 NR Description: WRKY family transcription factor
  misc_feature (1)..(130): NCBI GI NO: 22327079 NR Description: WRKY family transcription factor
  misc_feature (59)..(137): NCBI GI NO: 34910570 NR Description: B1131B07.13
  misc_feature (59)..(131): NCBI GI NO: 34906314 NR Description: unnamed protein product
  misc_feature (48)..(131): NCBI GI NO: 34912126 NR Description: OSJNBb0024F06.15
  misc_feature (1)..(140): NCBI GI NO: 15226550 NR Description: WRKY family transcription factor
  misc_feature (1)..(140): NCBI GI NO: 21536889 NR Description: putative WRKY-type DNA binding protein
  misc_feature (1)..(133): NCBI GI NO: 15239913 NR Description: WRKY family transcription factor
  misc_feature (58)..(149): NCBI GI NO: 7484759 NR Description: SP8 binding protein homolog - cucumber
  misc_feature (1)..(133): NCBI GI NO: 15220582 NR Description: WRKY family transcription factor
MLDDYVDHQDSRSSQSTESSEKATFCDPTHGFSTGATSKNNNMKCKNGINENKRGVGPRIAFRTKSELEIMDDGYKWRKYGKKSVKSNPNLRNYYKCSSGGCSVKKRVERDRDDSSYVITTYEGVHNHESPFTTYYSPISFVHSDTTFK

SEQ ID NO: 8598 - DNA, 1007 bp, Glycine max
  misc_feature (1)..(1007): Ceres Seq. ID no. 14316539
aaaggagtccagagtttaggataagagatatgcgccagagttgaagcgagaaggaagggtccgcgcgccatggctggcatcaccacctcccccttcaaactctctcactttccgactctcttctcttcttctgattccaaactcttcggccttcccctctccaatccctattccctcaaattcgacccttcttctctctccactacctctctctcctacgtcaaagcccgctactacggcggcggcggcggccctccccgctcccccaacgactcccgcttccgcgagtcctccgattccgacgacgacgataaagctctcgacctctccactctcaggtcagataccgtgaggcttattgatcagagccagaatatggtcggagtagtgtcaattgatgacgccattcaaatggctgaagatgtcgaacttgacttggtaatattatccccagatgcagatcctcctgttgttagaataatggattacagcaaatatagatatgaacagcaaaagaagaaaagaggacagcagaagaaaagtgctgctaatcggatggatttgaaggagctcaaaatgggatacaacatagatgaacatgattattcagtgcgtttgaaagctgcacagaaatttttgaaagatggcaacaaggttaaggtcatagtaaacctcaagggtcgtgaaaatgaattccggaatatggctattgcgcttattacacgttttcagaatgatgttggggagcttggaatagaggagacaaaaaacttccgtgacagaaatatcttcataattttggttccaaataaagttgctgtgcagaaaactcaagaaccaccaaagaaaagagacaagtcagctgcagatgaagtctccgttagtgcccaagcataaccgcaaacttccacgctagtttctaattgtagaatggatattgtgagtaacttgtattggtccgagttggaaaattttccgagcattatataattgtataattcatgtgt

SEQ ID NO: 8599 - protein, 275 aa, Glycine max
  peptide (1)..(275): Ceres Seq. ID no. 14316540
  misc_feature (162)..(248): Pfam Name: Pfam Description:  Translation initiation factor IF-3
  misc_feature (1)..(272): NCBI GI NO: 18417644 NR Description: expressed protein [Arabidopsis thaliana]
  misc_feature (12)..(273): NCBI GI NO: 15224088 NR Description: chloroplast initiation factor 3 -related
  misc_feature (1)..(158): NCBI GI NO: 25407671 NR Description: hypothetical protein AT4g30690
  misc_feature (89)..(248): NCBI GI NO: 17232115 NR Description: translation initiation factor IF-3
  misc_feature (89)..(248): NCBI GI NO: 20138475 NR Description: Translation initiation factor IF-3
  misc_feature (89)..(248): NCBI GI NO: 23128110 NR Description: hypothetical protein [Nostoc punctiforme]
  misc_feature (89)..(249): NCBI GI NO: 16329482 NR Description: initiation factor IF-3
  misc_feature (94)..(256): NCBI GI NO: 33241247 NR Description: Translation initiation factor 3
  misc_feature (73)..(248): NCBI GI NO: 14194835 NR Description: Translation initiation factor IF-3, chloroplast
  misc_feature (89)..(248): NCBI GI NO: 20808119 NR Description: Translation initiation factor IF3
MAGITTSPFKLSHFPTLFSSSDSKLFGLPLSNPYSLKFDPSSLSTTSLSYVKARYYGGGGGPPRSPNDSRFRESSDSDDDDKALDLSTLRSDTVRLIDQSQNMVGVVSIDDAIQMAEDVELDLVILSPDADPPVVRIMDYSKYRYEQQKKKRGQQKKSAANRMDLKELKMGYNIDEHDYSVRLKAAQKFLKDGNKVKVIVNLKGRENEFRNMAIALITRFQNDVGELGIEETKNFRDRNIFIILVPNKVAVQKTQEPPKKRDKSAADEVSVSAQA

SEQ ID NO: 8600 - protein, 173 aa, Glycine max
  peptide (1)..(173): Ceres Seq. ID no. 14316541
  misc_feature (60)..(146): Pfam Name: Pfam Description:  Translation initiation factor IF-3
  misc_feature (1)..(170): NCBI GI NO: 18417644 NR Description: expressed protein [Arabidopsis thaliana]
  misc_feature (1)..(171): NCBI GI NO: 15224088 NR Description: chloroplast initiation factor 3 -related
  misc_feature (1)..(56): NCBI GI NO: 25407671 NR Description: hypothetical protein AT4g30690
  misc_feature (1)..(146): NCBI GI NO: 17232115 NR Description: translation initiation factor IF-3
  misc_feature (1)..(146): NCBI GI NO: 20138475 NR Description: Translation initiation factor IF-3
  misc_feature (1)..(146): NCBI GI NO: 23128110 NR Description: hypothetical protein [Nostoc punctiforme]
  misc_feature (1)..(147): NCBI GI NO: 16329482 NR Description: initiation factor IF-3
  misc_feature (1)..(154): NCBI GI NO: 33241247 NR Description: Translation initiation factor 3
  misc_feature (1)..(146): NCBI GI NO: 14194835 NR Description: Translation initiation factor IF-3, chloroplast
  misc_feature (1)..(146): NCBI GI NO: 20808119 NR Description: Translation initiation factor IF3
MVGVVSIDDAIQMAEDVELDLVILSPDADPPVVRIMDYSKYRYEQQKKKRGQQKKSAANRMDLKELKMGYNIDEHDYSVRLKAAQKFLKDGNKVKVIVNLKGRENEFRNMAIALITRFQNDVGELGIEETKNFRDRNIFIILVPNKVAVQKTQEPPKKRDKSAADEVSVSAQA

SEQ ID NO: 8601 - protein, 161 aa, Glycine max
  peptide (1)..(161): Ceres Seq. ID no. 14316542
  misc_feature (48)..(134): Pfam Name: Pfam Description:  Translation initiation factor IF-3
  misc_feature (1)..(158): NCBI GI NO: 18417644 NR Description: expressed protein [Arabidopsis thaliana]
  misc_feature (1)..(159): NCBI GI NO: 15224088 NR Description: chloroplast initiation factor 3 -related
  misc_feature (1)..(44): NCBI GI NO: 25407671 NR Description: hypothetical protein AT4g30690
  misc_feature (1)..(134): NCBI GI NO: 17232115 NR Description: translation initiation factor IF-3
  misc_feature (1)..(134): NCBI GI NO: 20138475 NR Description: Translation initiation factor IF-3
  misc_feature (1)..(134): NCBI GI NO: 23128110 NR Description: hypothetical protein [Nostoc punctiforme]
  misc_feature (1)..(135): NCBI GI NO: 16329482 NR Description: initiation factor IF-3
  misc_feature (1)..(142): NCBI GI NO: 33241247 NR Description: Translation initiation factor 3
  misc_feature (1)..(134): NCBI GI NO: 14194835 NR Description: Translation initiation factor IF-3, chloroplast
  misc_feature (1)..(134): NCBI GI NO: 20808119 NR Description: Translation initiation factor IF3
MAEDVELDLVILSPDADPPVVRIMDYSKYRYEQQKKKRGQQKKSAANRMDLKELKMGYNIDEHDYSVRLKAAQKFLKDGNKVKVIVNLKGRENEFRNMAIALITRFQNDVGELGIEETKNFRDRNIFIILVPNKVAVQKTQEPPKKRDKSAADEVSVSAQA

SEQ ID NO: 8602 - DNA, 1605 bp, Glycine max
  misc_feature (1)..(1605): Ceres Seq. ID no. 15171618
actcatttccacatctctgacagaaaatggagaactatcagtacccggcgtcgtaccctgactccggcgagtcgtcgccgcgctcccgcgagatcgacttcgagaacccgccgccgtgggacgagcagcagaaccaaaactacaaggccaagttcatgtgcagctacggcggcaagatccagccccgcacccacgacaaccagctctcctacgtcggcggcgacaccaagatcctcgccgtcgaccgctccgtcaagttccccgccttcctctccaagctcgccgccgtctgcgactccgccccgcaggacctcaccttcaagtaccagctccccggtgaggacctcgacgccctcatctccgtcaccaacgacgacgacctcgaacacatgatgcacgagtacgacagactctatcgccctaacctaaaacctgttagaatgagactcttcctcttcacgctctctagttcaaatcctaattcctctttctcctccgaacgcgaccatttcgtcgaggctcttaattcgggtccgattccttctcaacccgacccgatcaaaaccccgcccgttacgccttctaatgttgactatctcttcggtctcgataaagccgttgctcctcctccaaatcttcctccgaacttcgcagcggttaaattccacgatccggtgccggagcctgtcgcgccgccggtagagtatcaatcgagaggctccgatcgggttgttggatcggatccgaatgtgaatccgattgaaattcagagacagttgcagcaggagatggagcgattgcagattgcggagaatgaatatcgtagaaggagtgaggatggatttgcagccggttatgctgctgctgctgctgccggaggggattattatatgcagaaggtgcaggagaaggttccgccgcagaatgcggcggcgtactggtcggagaagcagttttccggggagggatatcagacgacggtgacgacggctccaggaggaggtgaccagccgatgtatgttatggcgccgccggggacgttctaccacgcgccagtggtgcggcctccggcggcggcgcaggggtactacgccgtgcagaggatgggttccgagggctaccgcgagcagcaggcggtttacggcggcgtggcgccgtcgaaagcggcgttttcttcggcggggatggctaaggggacggcgtattcggagggatatggtggcggcgtggtgaggcctgcgggggtgccggataatgcggcgtacgcgcaggtggcgtatgatagcgcgagtgggaggcaggtttactatactgcgcagggagggatggtgcacgcgccgccgccgccgcagtaccaaggggttccgcctcaggaatttaggccgggtggggtttcggtggggcaagatggtaaggtggttaacaaggttaaccaaggttctgcgtgattaagattgtgattatgttaattctgaaacaaataatacactaaatatgttttgcgtttttttttttttctcttcatggtttatatatatacactaaatattacgagtattgtttgctaataatttatgggtagtgcttaaacttccttctgtctgc

SEQ ID NO: 8603 - protein, 473 aa, Glycine max
  peptide (1)..(473): Ceres Seq. ID no. 15171619
  misc_feature (56)..(144): Pfam Name: Pfam Description:  PB1 domain
  misc_feature (1)..(353): NCBI GI NO: 15237703 NR Description: octicosapeptide/Phox/Bem1p
  misc_feature (323)..(465): NCBI GI NO: 15237703 NR Description: octicosapeptide/Phox/Bem1p
  misc_feature (1)..(447): NCBI GI NO: 15242462 NR Description: octicosapeptide/Phox/Bem1p
  misc_feature (8)..(207): NCBI GI NO: 18379168 NR Description: octicosapeptide/Phox/Bem1p
  misc_feature (8)..(207): NCBI GI NO: 21553908 NR Description: unknown [Arabidopsis thaliana]
  misc_feature (1)..(169): NCBI GI NO: 18412822 NR Description: octicosapeptide/Phox/Bem1p
  misc_feature (30)..(169): NCBI GI NO: 25407315 NR Description: hypothetical protein AT4g05150
  misc_feature (44)..(168): NCBI GI NO: 25410886 NR Description: hypothetical protein At2g01190
  misc_feature (8)..(207): NCBI GI NO: 34895646 NR Description: P0480E02.2
  misc_feature (38)..(211): NCBI GI NO: 9293928 NR Description: gb|AAF04880
MENYQYPASYPDSGESSPRSREIDFENPPPWDEQQNQNYKAKFMCSYGGKIQPRTHDNQLSYVGGDTKILAVDRSVKFPAFLSKLAAVCDSAPQDLTFKYQLPGEDLDALISVTNDDDLEHMMHEYDRLYRPNLKPVRMRLFLFTLSSSNPNSSFSSERDHFVEALNSGPIPSQPDPIKTPPVTPSNVDYLFGLDKAVAPPPNLPPNFAAVKFHDPVPEPVAPPVEYQSRGSDRVVGSDPNVNPIEIQRQLQQEMERLQIAENEYRRRSEDGFAAGYAAAAAAGGDYYMQKVQEKVPPQNAAAYWSEKQFSGEGYQTTVTTAPGGGDQPMYVMAPPGTFYHAPVVRPPAAAQGYYAVQRMGSEGYREQQAVYGGVAPSKAAFSSAGMAKGTAYSEGYGGGVVRPAGVPDNAAYAQVAYDSASGRQVYYTAQGGMVHAPPPPQYQGVPPQEFRPGGVSVGQDGKVVNKVNQGSA

SEQ ID NO: 8604 - protein, 430 aa, Glycine max
  peptide (1)..(430): Ceres Seq. ID no. 15171620
  misc_feature (13)..(101): Pfam Name: Pfam Description:  PB1 domain
  misc_feature (1)..(310): NCBI GI NO: 15237703 NR Description: octicosapeptide/Phox/Bem1p
  misc_feature (280)..(422): NCBI GI NO: 15237703 NR Description: octicosapeptide/Phox/Bem1p
  misc_feature (1)..(404): NCBI GI NO: 15242462 NR Description: octicosapeptide/Phox/Bem1p
  misc_feature (1)..(164): NCBI GI NO: 18379168 NR Description: octicosapeptide/Phox/Bem1p
  misc_feature (1)..(164): NCBI GI NO: 21553908 NR Description: unknown [Arabidopsis thaliana]
  misc_feature (1)..(126): NCBI GI NO: 18412822 NR Description: octicosapeptide/Phox/Bem1p
  misc_feature (1)..(126): NCBI GI NO: 25407315 NR Description: hypothetical protein AT4g05150
  misc_feature (1)..(125): NCBI GI NO: 25410886 NR Description: hypothetical protein At2g01190
  misc_feature (1)..(164): NCBI GI NO: 34895646 NR Description: P0480E02.2
  misc_feature (1)..(168): NCBI GI NO: 9293928 NR Description: gb|AAF04880
MCSYGGKIQPRTHDNQLSYVGGDTKILAVDRSVKFPAFLSKLAAVCDSAPQDLTFKYQLPGEDLDALISVTNDDDLEHMMHEYDRLYRPNLKPVRMRLFLFTLSSSNPNSSFSSERDHFVEALNSGPIPSQPDPIKTPPVTPSNVDYLFGLDKAVAPPPNLPPNFAAVKFHDPVPEPVAPPVEYQSRGSDRVVGSDPNVNPIEIQRQLQQEMERLQIAENEYRRRSEDGFAAGYAAAAAAGGDYYMQKVQEKVPPQNAAAYWSEKQFSGEGYQTTVTTAPGGGDQPMYVMAPPGTFYHAPVVRPPAAAQGYYAVQRMGSEGYREQQAVYGGVAPSKAAFSSAGMAKGTAYSEGYGGGVVRPAGVPDNAAYAQVAYDSASGRQVYYTAQGGMVHAPPPPQYQGVPPQEFRPGGVSVGQDGKVVNKVNQGSA

SEQ ID NO: 8605 - protein, 352 aa, Glycine max
  peptide (1)..(352): Ceres Seq. ID no. 15171621
  misc_feature (49)..(226): Pfam Name: Pfam Description:  Glycoprotein GG/GX
  misc_feature (1)..(232): NCBI GI NO: 15237703 NR Description: octicosapeptide/Phox/Bem1p
  misc_feature (202)..(344): NCBI GI NO: 15237703 NR Description: octicosapeptide/Phox/Bem1p
  misc_feature (1)..(326): NCBI GI NO: 15242462 NR Description: octicosapeptide/Phox/Bem1p
  misc_feature (1)..(86): NCBI GI NO: 18379168 NR Description: octicosapeptide/Phox/Bem1p
  misc_feature (1)..(86): NCBI GI NO: 21553908 NR Description: unknown [Arabidopsis thaliana]
  misc_feature (1)..(48): NCBI GI NO: 18412822 NR Description: octicosapeptide/Phox/Bem1p
  misc_feature (1)..(48): NCBI GI NO: 25407315 NR Description: hypothetical protein AT4g05150
  misc_feature (1)..(47): NCBI GI NO: 25410886 NR Description: hypothetical protein At2g01190
  misc_feature (1)..(86): NCBI GI NO: 34895646 NR Description: P0480E02.2
  misc_feature (1)..(90): NCBI GI NO: 9293928 NR Description: gb|AAF04880
MMHEYDRLYRPNLKPVRMRLFLFTLSSSNPNSSFSSERDHFVEALNSGPIPSQPDPIKTPPVTPSNVDYLFGLDKAVAPPPNLPPNFAAVKFHDPVPEPVAPPVEYQSRGSDRVVGSDPNVNPIEIQRQLQQEMERLQIAENEYRRRSEDGFAAGYAAAAAAGGDYYMQKVQEKVPPQNAAAYWSEKQFSGEGYQTTVTTAPGGGDQPMYVMAPPGTFYHAPVVRPPAAAQGYYAVQRMGSEGYREQQAVYGGVAPSKAAFSSAGMAKGTAYSEGYGGGVVRPAGVPDNAAYAQVAYDSASGRQVYYTAQGGMVHAPPPPQYQGVPPQEFRPGGVSVGQDGKVVNKVNQGSA

SEQ ID NO: 8606 - DNA, 1296 bp, Glycine max
  misc_feature (1)..(1296): Ceres Seq. ID no. 14315989
acaattccacgcatcaaccaaatctaactctctttctctgtcccccacacccctccctcctatgtcctatcccattctgaagaaacacaattacaggttagaaccccccatatcaaagctaaagtcttttggagccaaacttgaagttttattcatcatcttcacctcgaatcagatgagggagaagttcctattattcaacttttgttagcagtaaaagctctcttctttatttttttatttatttattttgtttctaataaggagttaaagacaatttgttgttggtgttgccatgagggagtttccttcttgttttggagaaaatggggttcagattgctgactcatcctcatcaagcaccacaagagcagctcaaaatgtggttacgtgtgtctatcagtgcaaattaagaggccgttcatgcctgattacagtctggtggacaaaaactctgatgggtcaaggcttgagtgtgggaatagatgacttgggaaaccattgcctctgcaaggtggagataaagccatggctcttctcgaagagaaaagggtcaaagaatttggaggtccaatctggtaaagttgacatcttttgggatttgagttgtgccaagtttggttcagggcctgagccattggaggggttctacttagcggttgtgttcaacaaggagatggtgttgctcctaggggatctgaaaaaggaggcatgcaagaagattgagagtgattgtgccttttctcactgtggtgctgtttgcattgcaaagagagagcacattattgggaagaagttttatggtgcaaaggctcagttttgtgacaaggggcaggtgcatgatgtcacaattgagtgtgacactttggggcccagcgatccctctcttgtgattcgaattgatagcaagacagtgatgcaggtgaagcgtctcaagtggaagttccgagggaatcacaccattttggtggatggtgttccggttgaagtgttttgggatgtgcacagttggctctttgggaatgctatgggcaatgcagtgttcatgttccaaacatgcatttcaaatgataagatgtgggaaggccaatcagtttctgatccctctgcattaacatgggcttcttctcagcagtttagggattctcaattgcaaggctttgggttctctctcattttttatgtttggaaacatgagtaatcaatagaggtgttaagtcttattcctcaatgttacatttatattgacagccacatttttcaacaatgaaactgatcaacttgcccctttttccc

SEQ ID NO: 8607 - protein, 301 aa, Glycine max
  peptide (1)..(301): Ceres Seq. ID no. 14315990
  misc_feature (27)..(299): Pfam Name: DUF868 Pfam Description: Plant protein of unknown function
  misc_feature (1)..(301): NCBI GI NO: 30102999 NR Description: hypothetical protein
  misc_feature (1)..(301): NCBI GI NO: 15241702 NR Description: expressed protein [Arabidopsis thaliana]
  misc_feature (1)..(301): NCBI GI NO: 18397034 NR Description: expressed protein [Arabidopsis thaliana]
  misc_feature (1)..(301): NCBI GI NO: 21593854 NR Description: unknown [Arabidopsis thaliana]
  misc_feature (1)..(301): NCBI GI NO: 34394221 NR Description: unknown protein
  misc_feature (67)..(301): NCBI GI NO: 20804936 NR Description: P0456E05.14
  misc_feature (5)..(68): NCBI GI NO: 20804936 NR Description: P0456E05.14
  misc_feature (23)..(264): NCBI GI NO: 15228105 NR Description: hypothetical protein [Arabidopsis thaliana]
  misc_feature (23)..(301): NCBI GI NO: 15235452 NR Description: expressed protein [Arabidopsis thaliana]
  misc_feature (16)..(299): NCBI GI NO: 14719318 NR Description: hypothetical protein [Oryza sativa]
MREFPSCFGENGVQIADSSSSSTTRAAQNVVTCVYQCKLRGRSCLITVWWTKTLMGQGLSVGIDDLGNHCLCKVEIKPWLFSKRKGSKNLEVQSGKVDIFWDLSCAKFGSGPEPLEGFYLAVVFNKEMVLLLGDLKKEACKKIESDCAFSHCGAVCIAKREHIIGKKFYGAKAQFCDKGQVHDVTIECDTLGPSDPSLVIRIDSKTVMQVKRLKWKFRGNHTILVDGVPVEVFWDVHSWLFGNAMGNAVFMFQTCISNDKMWEGQSVSDPSALTWASSQQFRDSQLQGFGFSLIFYVWKHE

SEQ ID NO: 8608 - protein, 247 aa, Glycine max
  peptide (1)..(247): Ceres Seq. ID no. 14315991
  misc_feature (1)..(245): Pfam Name: DUF868 Pfam Description: Plant protein of unknown function
  misc_feature (1)..(247): NCBI GI NO: 30102999 NR Description: hypothetical protein
  misc_feature (1)..(247): NCBI GI NO: 15241702 NR Description: expressed protein [Arabidopsis thaliana]
  misc_feature (1)..(247): NCBI GI NO: 18397034 NR Description: expressed protein [Arabidopsis thaliana]
  misc_feature (1)..(247): NCBI GI NO: 21593854 NR Description: unknown [Arabidopsis thaliana]
  misc_feature (1)..(247): NCBI GI NO: 34394221 NR Description: unknown protein
  misc_feature (13)..(247): NCBI GI NO: 20804936 NR Description: P0456E05.14
  misc_feature (1)..(14): NCBI GI NO: 20804936 NR Description: P0456E05.14
  misc_feature (1)..(210): NCBI GI NO: 15228105 NR Description: hypothetical protein [Arabidopsis thaliana]
  misc_feature (1)..(247): NCBI GI NO: 15235452 NR Description: expressed protein [Arabidopsis thaliana]
  misc_feature (1)..(245): NCBI GI NO: 14719318 NR Description: hypothetical protein [Oryza sativa]
MGQGLSVGIDDLGNHCLCKVEIKPWLFSKRKGSKNLEVQSGKVDIFWDLSCAKFGSGPEPLEGFYLAVVFNKEMVLLLGDLKKEACKKIESDCAFSHCGAVCIAKREHIIGKKFYGAKAQFCDKGQVHDVTIECDTLGPSDPSLVIRIDSKTVMQVKRLKWKFRGNHTILVDGVPVEVFWDVHSWLFGNAMGNAVFMFQTCISNDKMWEGQSVSDPSALTWASSQQFRDSQLQGFGFSLIFYVWKHE

SEQ ID NO: 8609 - protein, 174 aa, Glycine max
  peptide (1)..(174): Ceres Seq. ID no. 14315992
  misc_feature (1)..(172): Pfam Name: DUF868 Pfam Description: Plant protein of unknown function
  misc_feature (1)..(174): NCBI GI NO: 30102999 NR Description: hypothetical protein
  misc_feature (1)..(174): NCBI GI NO: 15241702 NR Description: expressed protein [Arabidopsis thaliana]
  misc_feature (1)..(174): NCBI GI NO: 18397034 NR Description: expressed protein [Arabidopsis thaliana]
  misc_feature (1)..(174): NCBI GI NO: 21593854 NR Description: unknown [Arabidopsis thaliana]
  misc_feature (1)..(174): NCBI GI NO: 34394221 NR Description: unknown protein
  misc_feature (1)..(174): NCBI GI NO: 20804936 NR Description: P0456E05.14
  misc_feature (1)..(137): NCBI GI NO: 15228105 NR Description: hypothetical protein [Arabidopsis thaliana]
  misc_feature (1)..(174): NCBI GI NO: 15235452 NR Description: expressed protein [Arabidopsis thaliana]
  misc_feature (1)..(172): NCBI GI NO: 14719318 NR Description: hypothetical protein [Oryza sativa]
  misc_feature (1)..(174): NCBI GI NO: 15238927 NR Description: hypothetical protein [Arabidopsis thaliana]
MVLLLGDLKKEACKKIESDCAFSHCGAVCIAKREHIIGKKFYGAKAQFCDKGQVHDVTIECDTLGPSDPSLVIRIDSKTVMQVKRLKWKFRGNHTILVDGVPVEVFWDVHSWLFGNAMGNAVFMFQTCISNDKMWEGQSVSDPSALTWASSQQFRDSQLQGFGFSLIFYVWKHE

SEQ ID NO: 8610 - DNA, 1112 bp, Glycine max
  misc_feature (1)..(1112): Ceres Seq. ID no. 15173696
atcgttattccttccaccctgcccggtggaaccaaacgaagaagacgttccgttttccctctgcttttccaagttttcatcgactcaaccatgctattcttacataactagggttaggagttagggcgttcttatcgttttcgctccgttaattacaacaacgggcaacatggttgttctttcgctttcacctcccagcctctctaccgctttcctcgcaaagaaactgtctccccaagaacacgcggtgaagctagcgacctttcgcaactattcatttcgcattagatgcgcggtggatacgccctatggagggaatgttcaaaaattccctcgaaccaatgtttgggatccttaccgacgccttggtattagccctgatgcctctgaagaagaaatctggggatcaagaaattttctgttgcaacaatactctgggcatgagaggagtgaagaatcaatagaagcagcttttgaaaaaatattgatggcaagtttcgtacagaggaggaaaacaaaaattaatttgaaaagcaagttgaaaaaaaaagtagaagagtctccaccatgggtgaagaacttgctaagctttgttgaacttccaccgactgaagttatccttagaagattgtttctctttggcttcatgggtggctggagtattatgaattctgctgaaactggacctgcttttcaggtggcaatctctttggctgcatgcatatattttcttaacgaaaagacaaagagcttggctagagcattcattattgggtttggagctctagtggctggatgggtctctggttcattgctggtacctaatattccatctatgttgctgcgcccaacttggacacttgaactcttaacgtcattggtagtttatttgttcttgttcgttgcctgtactttcctcaagtgaagtggagcctattctttcaacgttatagtcggtgatgagcttataggtgatcaaacaattttttttaagcgagccaaattgtttactgtcatctttttttatgaaacaaattgtttaagttggcaatgttcagctgagatattactgagccttaactccttgtctaaatttccgttggttacgaggc

SEQ ID NO: 8611 - protein, 251 aa, Glycine max
  peptide (1)..(251): Ceres Seq. ID no. 15173697
  misc_feature (61)..(118): Pfam Name: Pfam Description:  DnaJ domain
  misc_feature (4)..(251): NCBI GI NO: 15237199 NR Description: expressed protein [Arabidopsis thaliana]
  misc_feature (138)..(251): NCBI GI NO: 37573058 NR Description: unknown protein
  misc_feature (54)..(251): NCBI GI NO: 11357625 NR Description: hypothetical protein F24M12
  misc_feature (54)..(251): NCBI GI NO: 18409276 NR Description: expressed protein [Arabidopsis thaliana]
  misc_feature (62)..(251): NCBI GI NO: 17230751 NR Description: hypothetical protein [Nostoc sp. PCC 7120]
  misc_feature (63)..(251): NCBI GI NO: 23039527 NR Description: hypothetical protein
  misc_feature (61)..(251): NCBI GI NO: 23129945 NR Description: hypothetical protein [Nostoc punctiforme]
  misc_feature (50)..(251): NCBI GI NO: 16329734 NR Description: unknown protein [Synechocystis sp. PCC 6803]
  misc_feature (61)..(251): NCBI GI NO: 22299891 NR Description: ORF_ID:tlr2348~hypothetical protein
MVVLSLSPPSLSTAFLAKKLSPQEHAVKLATFRNYSFRIRCAVDTPYGGNVQKFPRTNVWDPYRRLGISPDASEEEIWGSRNFLLQQYSGHERSEESIEAAFEKILMASFVQRRKTKINLKSKLKKKVEESPPWVKNLLSFVELPPTEVILRRLFLFGFMGGWSIMNSAETGPAFQVAISLAACIYFLNEKTKSLARAFIIGFGALVAGWVSGSLLVPNIPSMLLRPTWTLELLTSLVVYLFLFVACTFLK

SEQ ID NO: 8612 - protein, 145 aa, Glycine max
  peptide (1)..(145): Ceres Seq. ID no. 15173698
  misc_feature (1)..(145): NCBI GI NO: 15237199 NR Description: expressed protein [Arabidopsis thaliana]
  misc_feature (32)..(145): NCBI GI NO: 37573058 NR Description: unknown protein
  misc_feature (1)..(145): NCBI GI NO: 11357625 NR Description: hypothetical protein F24M12
  misc_feature (1)..(145): NCBI GI NO: 18409276 NR Description: expressed protein [Arabidopsis thaliana]
  misc_feature (1)..(145): NCBI GI NO: 17230751 NR Description: hypothetical protein [Nostoc sp. PCC 7120]
  misc_feature (1)..(145): NCBI GI NO: 23039527 NR Description: hypothetical protein
  misc_feature (1)..(145): NCBI GI NO: 23129945 NR Description: hypothetical protein [Nostoc punctiforme]
  misc_feature (1)..(145): NCBI GI NO: 16329734 NR Description: unknown protein [Synechocystis sp. PCC 6803]
  misc_feature (1)..(145): NCBI GI NO: 22299891 NR Description: ORF_ID:tlr2348~hypothetical protein
MASFVQRRKTKINLKSKLKKKVEESPPWVKNLLSFVELPPTEVILRRLFLFGFMGGWSIMNSAETGPAFQVAISLAACIYFLNEKTKSLARAFIIGFGALVAGWVSGSLLVPNIPSMLLRPTWTLELLTSLVVYLFLFVACTFLK

SEQ ID NO: 8613 - DNA, 774 bp, Glycine max
  misc_feature (1)..(774): Ceres Seq. ID no. 12583650
gttctgccctggatcaacattaactgaaacagaaaacgtgttttttcctgtcatggatcatttgacttcgattgatttttaaatgggtattgctatgtcgttgttgaatgaatggggttgttgctagaagcagtcttccatgtgggttttgattgtcctgtactgaaagacttcataacatactgtgtgtgtgagggactcggtgctgctttaattactgctcttgtgaaggtgaactgtgaacttggttggtcagagcttgccaacaggcagaaagttgctgaagtccctcaattgtgcttccctgcctcctttcccaaagtctctgtctggtgcaatggtttatataactgagtgggacaagtttgtggagcaatccattgagctgttccgtgcagatcctgattctacaaggtatgtcatgaagtacaggcactgtgatggcaagttggtactcaaggtcactgataaccgacagtgtctaaagtataagacaggccaagcacaagaggctaagaagatggagaaactgaataatatgttctttgctttgatggctcgtggtcccgatgttgatctatcagaagtcccgggaaaagagcaaatggatgctcagcccaccaagaaaggaagaggaaggaagcaataacttacttggccttttgctagacaagatggttttatgaatccctggactaagaatttgaatagttatatttttttccctacctaatgattacttcagattcttatgatgtgagaggtttatatttg

SEQ ID NO: 8614 - protein, 103 aa, Glycine max
  peptide (1)..(103): Ceres Seq. ID no. 12583651
  misc_feature (2)..(78): Pfam Name: SRP9 Pfam Description: Signal recognition particle 9 kDa protein
  misc_feature (1)..(103): NCBI GI NO: 15229083 NR Description: signal recognition particle subunit 9 - like
  misc_feature (1)..(103): NCBI GI NO: 12230624 NR Description: Signal recognition particle 9 kDa protein (SRP9)
  misc_feature (1)..(73): NCBI GI NO: 29436534 NR Description: Similar to signal recognition particle 9kDa
  misc_feature (1)..(67): NCBI GI NO: 17556953 NR Description: Signal recognition particle (8.8 kD)
  misc_feature (1)..(73): NCBI GI NO: 5107800 NR Description: Signal Recognition Particle Alu Rna BindingHeterodimer
  misc_feature (7)..(73): NCBI GI NO: 4507217 NR Description: signal recognition particle 9kDa
  misc_feature (7)..(73): NCBI GI NO: 11513832 NR Description: Chain A
  misc_feature (1)..(67): NCBI GI NO: 39585011 NR Description: Hypothetical protein CBG06800
  misc_feature (1)..(73): NCBI GI NO: 134890 NR Description: SIGNAL RECOGNITION PARTICLE 9 KD PROTEIN (SRP9)
  misc_feature (7)..(73): NCBI GI NO: 6755662 NR Description: signal recognition particle
MVYITEWDKFVEQSIELFRADPDSTRYVMKYRHCDGKLVLKVTDNRQCLKYKTGQAQEAKKMEKLNNMFFALMARGPDVDLSEVPGKEQMDAQPTKKGRGRKQ

SEQ ID NO: 8615 - protein, 80 aa, Glycine max
  peptide (1)..(80): Ceres Seq. ID no. 12583652
MGLLLEAVFHVGFDCPVLKDFITYCVCEGLGAALITALVKVNCELGWSELANRQKVAEVPQLCFPASFPKVSVWCNGLYN

SEQ ID NO: 8616 - protein, 75 aa, Glycine max
  peptide (1)..(75): Ceres Seq. ID no. 12583653
  misc_feature (1)..(75): NCBI GI NO: 15229083 NR Description: signal recognition particle subunit 9 - like
  misc_feature (1)..(75): NCBI GI NO: 12230624 NR Description: Signal recognition particle 9 kDa protein (SRP9)
  misc_feature (1)..(45): NCBI GI NO: 29436534 NR Description: Similar to signal recognition particle 9kDa
  misc_feature (1)..(39): NCBI GI NO: 17556953 NR Description: Signal recognition particle (8.8 kD)
  misc_feature (1)..(45): NCBI GI NO: 5107800 NR Description: Signal Recognition Particle Alu Rna BindingHeterodimer
  misc_feature (1)..(45): NCBI GI NO: 4507217 NR Description: signal recognition particle 9kDa
  misc_feature (1)..(45): NCBI GI NO: 11513832 NR Description: Chain A
  misc_feature (1)..(39): NCBI GI NO: 39585011 NR Description: Hypothetical protein CBG06800
  misc_feature (1)..(45): NCBI GI NO: 134890 NR Description: SIGNAL RECOGNITION PARTICLE 9 KD PROTEIN (SRP9)
  misc_feature (1)..(45): NCBI GI NO: 6755662 NR Description: signal recognition particle
MKYRHCDGKLVLKVTDNRQCLKYKTGQAQEAKKMEKLNNMFFALMARGPDVDLSEVPGKEQMDAQPTKKGRGRKQ

SEQ ID NO: 8617 - DNA, 1004 bp, Glycine max
  misc_feature (1)..(1004): Ceres Seq. ID no. 12608127
actgttttctcttaccataatcatcaatggcttccttatccctctcctctcccccatctctctcttccgcacaccacaacgcctccacgcgccttattctacgcacccctaactcccttaaactgcgcactccaccccactccctccccgccatccgcgccatcaccctcacccaggacgacctcaagagactcgccgccgacaaggccgtggagtccgtcaagagcggcatggtcctcggcctaggcaccggctccactgctgccttcgtcgtcctgggtgagggtgatggcgcggaatgcacggagtacgtgaaggagtacatgaccgggaaggggtacgcggtcgacctcgaaatggtctccaaagaggcggaggagttcgcgaggagtgtgcctctcggcggcgacgggaaggacgcgtggattttcgacatcgacgagactctcctctccaatctcccctattatgccgcacacggatacgggcttgaggtctttgaccacgagaagtttaacaattgggtggagaagggtgtagctccagccattgaacccagtttaaagctctatgaagatgttttgaatctgggattcaaggttattctactgacaggacggagtgaaaggcacaggagtgtcactgttgataatttgatcaatgctgggtttaaggaatgggaccagctcatactaagaaactcagatgatcaagggaaacgagctgtactctacaaatcagagaagaggagtgagatggagaaagatggatacaggattcttggaaattctggtgaccagtggagcgatttattaggttcttcagtatctgttcggtccttcaagcttccaaatcccatgtattacattccatagtaaatgtctcattcatttgcaaataattgctgtttgaattgtacataacgaaagtggatcaattcgtatactgaatatcattgcaaataattcataaactgaatgtcattgaaattctaatacataccg

SEQ ID NO: 8618 - protein, 282 aa, Glycine max
  peptide (1)..(282): Ceres Seq. ID no. 12608128
  misc_feature (91)..(282): Pfam Name: Acid phosphatase Pfam Description: HAD superfamily, subfamily IIIB
  misc_feature (90)..(282): NCBI GI NO: 15234949 NR Description: acid phosphatase - like protein
  misc_feature (91)..(282): NCBI GI NO: 15241412 NR Description: acid phosphatase; protein id: At5g51260.1
  misc_feature (91)..(281): NCBI GI NO: 445113 NR Description: acid phosphatase 1
  misc_feature (91)..(281): NCBI GI NO: 130718 NR Description: Acid phosphatase precursor 1
  misc_feature (90)..(281): NCBI GI NO: 15233526 NR Description: acid phosphatase-like protein
  misc_feature (92)..(282): NCBI GI NO: 15233504 NR Description: acid phosphatase-like protein
  misc_feature (91)..(248): NCBI GI NO: 7705154 NR Description: acid phosphatase-1(1); Apase-1(1)
  misc_feature (91)..(281): NCBI GI NO: 7442053 NR Description: acid phosphatase (EC 3.1.3.-) - soybean
  misc_feature (163)..(282): NCBI GI NO: 28375522 NR Description: APS-AA2 [Lycopersicon esculentum]
  misc_feature (94)..(281): NCBI GI NO: 20218801 NR Description: putative acid phosphatase [Pinus pinaster]
MASLSLSSPPSLSSAHHNASTRLILRTPNSLKLRTPPHSLPAIRAITLTQDDLKRLAADKAVESVKSGMVLGLGTGSTAAFVVLGEGDGAECTEYVKEYMTGKGYAVDLEMVSKEAEEFARSVPLGGDGKDAWIFDIDETLLSNLPYYAAHGYGLEVFDHEKFNNWVEKGVAPAIEPSLKLYEDVLNLGFKVILLTGRSERHRSVTVDNLINAGFKEWDQLILRNSDDQGKRAVLYKSEKRSEMEKDGYRILGNSGDQWSDLLGSSVSVRSFKLPNPMYYIP

SEQ ID NO: 8619 - protein, 214 aa, Glycine max
  peptide (1)..(214): Ceres Seq. ID no. 12608129
  misc_feature (23)..(214): Pfam Name: Acid phosphatase Pfam Description: HAD superfamily, subfamily IIIB
  misc_feature (22)..(214): NCBI GI NO: 15234949 NR Description: acid phosphatase - like protein
  misc_feature (23)..(214): NCBI GI NO: 15241412 NR Description: acid phosphatase; protein id: At5g51260.1
  misc_feature (23)..(213): NCBI GI NO: 445113 NR Description: acid phosphatase 1
  misc_feature (23)..(213): NCBI GI NO: 130718 NR Description: Acid phosphatase precursor 1
  misc_feature (22)..(213): NCBI GI NO: 15233526 NR Description: acid phosphatase-like protein
  misc_feature (24)..(214): NCBI GI NO: 15233504 NR Description: acid phosphatase-like protein
  misc_feature (23)..(180): NCBI GI NO: 7705154 NR Description: acid phosphatase-1(1); Apase-1(1)
  misc_feature (23)..(213): NCBI GI NO: 7442053 NR Description: acid phosphatase (EC 3.1.3.-) - soybean
  misc_feature (95)..(214): NCBI GI NO: 28375522 NR Description: APS-AA2 [Lycopersicon esculentum]
  misc_feature (26)..(213): NCBI GI NO: 20218801 NR Description: putative acid phosphatase [Pinus pinaster]
MVLGLGTGSTAAFVVLGEGDGAECTEYVKEYMTGKGYAVDLEMVSKEAEEFARSVPLGGDGKDAWIFDIDETLLSNLPYYAAHGYGLEVFDHEKFNNWVEKGVAPAIEPSLKLYEDVLNLGFKVILLTGRSERHRSVTVDNLINAGFKEWDQLILRNSDDQGKRAVLYKSEKRSEMEKDGYRILGNSGDQWSDLLGSSVSVRSFKLPNPMYYIP

SEQ ID NO: 8620 - protein, 183 aa, Glycine max
  peptide (1)..(183): Ceres Seq. ID no. 12608130
  misc_feature (1)..(183): Pfam Name: Acid phosphatase Pfam Description: HAD superfamily, subfamily IIIB
  misc_feature (1)..(183): NCBI GI NO: 15234949 NR Description: acid phosphatase - like protein
  misc_feature (1)..(183): NCBI GI NO: 15241412 NR Description: acid phosphatase; protein id: At5g51260.1
  misc_feature (1)..(182): NCBI GI NO: 445113 NR Description: acid phosphatase 1
  misc_feature (1)..(182): NCBI GI NO: 130718 NR Description: Acid phosphatase precursor 1
  misc_feature (1)..(182): NCBI GI NO: 15233526 NR Description: acid phosphatase-like protein
  misc_feature (1)..(183): NCBI GI NO: 15233504 NR Description: acid phosphatase-like protein
  misc_feature (1)..(149): NCBI GI NO: 7705154 NR Description: acid phosphatase-1(1); Apase-1(1)
  misc_feature (1)..(182): NCBI GI NO: 7442053 NR Description: acid phosphatase (EC 3.1.3.-) - soybean
  misc_feature (64)..(183): NCBI GI NO: 28375522 NR Description: APS-AA2 [Lycopersicon esculentum]
  misc_feature (1)..(182): NCBI GI NO: 20218801 NR Description: putative acid phosphatase [Pinus pinaster]
MTGKGYAVDLEMVSKEAEEFARSVPLGGDGKDAWIFDIDETLLSNLPYYAAHGYGLEVFDHEKFNNWVEKGVAPAIEPSLKLYEDVLNLGFKVILLTGRSERHRSVTVDNLINAGFKEWDQLILRNSDDQGKRAVLYKSEKRSEMEKDGYRILGNSGDQWSDLLGSSVSVRSFKLPNPMYYIP

SEQ ID NO: 8621 - DNA, 1201 bp, Glycine max
  misc_feature (1)..(1201): Ceres Seq. ID no. 15175048
catgttatctacaataataaaccaagtgaagtcgtgcaagttccttcttcactttcacgacactcactcacacaccatggatttgctctcaatctctccctctcaccctttaccttcttccattcgaaccctttcctcaaaccctaagccacccatttcctcctccttcttcttcatccccaaaccccattcacgcttctccaaaaccccaccaaggtgcgtcttcacgccggcctcgccaatcccctccaaaaacacaaactttgggtcccagtttcggaaccctacgagcctcaccttcgagctctcctcgccccagactccctcgacggcggcgagaggcgcggagggcgacgtgatggggctgttgctgagagagaggattgtgttcctcgggagcagcatcgatgactttgtggccgatgctatcatgagccagttgctgctgttggatgcccaagaccccactaaggatatcaggctcttcattaattccactggtggctctctcagtgctacaatggctatctatgatgccgtacagcttgtgagggccgatgtttccacagttgcactcggcattgcagcatcaacagcttctgttatccttggtggtggcaccaaaggcaagcgctttgctatgccaaatacacgaattatgattcatcaacctctaggaggtgctagtggacaagctatagatgtagaaattcaggctaaagaagttatgcacaacaagaataatatcacaagaattatatcaagtttcactggacgctcatttgaacaagtgcaaaaagatattgatagggataaatatatgtctccaattgaagcagtggaatacggaattattgatggtgtaatcgatagagatagcattattcctctcatgccagtgccagaaagggtgaaatcaaccctaaactatgaagaaataagtaaagatcccaggaaattcctaaccccagatattcctgatgatgagatatactagctttaaatggttgatagggttataattaaccttgaatttaatgttacggtgataacagaacattttgggtaaagcttgaggatgctgtaacaaaccctgaaagatttaagattgtcttatatttttgtcttgcaattttaattttatttcgtgtgggtgagtgaaaaattatggttcagctattgagaattttgttggttatct

SEQ ID NO: 8622 - protein, 331 aa, Glycine max
  peptide (1)..(331): Ceres Seq. ID no. 15175049
  misc_feature (113)..(292): Pfam Name: Pfam Description:  Clp protease
  misc_feature (26)..(331): NCBI GI NO: 18422548 NR Description: ATP-dependent Clp protease proteolytic subunit
  misc_feature (26)..(331): NCBI GI NO: 25453516 NR Description: ATP-dependent Clp proteinase (EC 3
  misc_feature (26)..(331): NCBI GI NO: 21593305 NR Description: ATP-dependent Clp protease proteolytic subunit
  misc_feature (26)..(331): NCBI GI NO: 9758729 NR Description: ATP-dependent Clp protease-like protein
  misc_feature (106)..(331): NCBI GI NO: 4454056 NR Description: ClpP [Arabidopsis thaliana]
  misc_feature (74)..(331): NCBI GI NO: 37537218 NR Description: putative Clp protease
  misc_feature (44)..(329): NCBI GI NO: 34914540 NR Description: putative ATP-dependent Clp protease
  misc_feature (71)..(294): NCBI GI NO: 25019682 NR Description: ClpP2 [Synechococcus sp. PCC 7942]
  misc_feature (74)..(289): NCBI GI NO: 18378982 NR Description: ATP-dependent Clp protease proteolytic subunit
  misc_feature (103)..(289): NCBI GI NO: 15485610 NR Description: Clp protease 2 proteolytic subunit
MLSTIINQVKSCKFLLHFHDTHSHTMDLLSISPSHPLPSSIRTLSSNPKPPISSSFFFIPKPHSRFSKTPPRCVFTPASPIPSKNTNFGSQFRNPTSLTFELSSPQTPSTAARGAEGDVMGLLLRERIVFLGSSIDDFVADAIMSQLLLLDAQDPTKDIRLFINSTGGSLSATMAIYDAVQLVRADVSTVALGIAASTASVILGGGTKGKRFAMPNTRIMIHQPLGGASGQAIDVEIQAKEVMHNKNNITRIISSFTGRSFEQVQKDIDRDKYMSPIEAVEYGIIDGVIDRDSIIPLMPVPERVKSTLNYEEISKDPRKFLTPDIPDDEIY

SEQ ID NO: 8623 - protein, 306 aa, Glycine max
  peptide (1)..(306): Ceres Seq. ID no. 15175050
  misc_feature (88)..(267): Pfam Name: Pfam Description:  Clp protease
  misc_feature (1)..(306): NCBI GI NO: 18422548 NR Description: ATP-dependent Clp protease proteolytic subunit
  misc_feature (1)..(306): NCBI GI NO: 25453516 NR Description: ATP-dependent Clp proteinase (EC 3
  misc_feature (1)..(306): NCBI GI NO: 21593305 NR Description: ATP-dependent Clp protease proteolytic subunit
  misc_feature (1)..(306): NCBI GI NO: 9758729 NR Description: ATP-dependent Clp protease-like protein
  misc_feature (81)..(306): NCBI GI NO: 4454056 NR Description: ClpP [Arabidopsis thaliana]
  misc_feature (49)..(306): NCBI GI NO: 37537218 NR Description: putative Clp protease
  misc_feature (19)..(304): NCBI GI NO: 34914540 NR Description: putative ATP-dependent Clp protease
  misc_feature (46)..(269): NCBI GI NO: 25019682 NR Description: ClpP2 [Synechococcus sp. PCC 7942]
  misc_feature (49)..(264): NCBI GI NO: 18378982 NR Description: ATP-dependent Clp protease proteolytic subunit
  misc_feature (78)..(264): NCBI GI NO: 15485610 NR Description: Clp protease 2 proteolytic subunit
MDLLSISPSHPLPSSIRTLSSNPKPPISSSFFFIPKPHSRFSKTPPRCVFTPASPIPSKNTNFGSQFRNPTSLTFELSSPQTPSTAARGAEGDVMGLLLRERIVFLGSSIDDFVADAIMSQLLLLDAQDPTKDIRLFINSTGGSLSATMAIYDAVQLVRADVSTVALGIAASTASVILGGGTKGKRFAMPNTRIMIHQPLGGASGQAIDVEIQAKEVMHNKNNITRIISSFTGRSFEQVQKDIDRDKYMSPIEAVEYGIIDGVIDRDSIIPLMPVPERVKSTLNYEEISKDPRKFLTPDIPDDEIY

SEQ ID NO: 8624 - protein, 212 aa, Glycine max
  peptide (1)..(212): Ceres Seq. ID no. 15175051
  misc_feature (1)..(173): Pfam Name: Pfam Description:  Clp protease
  misc_feature (1)..(212): NCBI GI NO: 18422548 NR Description: ATP-dependent Clp protease proteolytic subunit
  misc_feature (1)..(212): NCBI GI NO: 25453516 NR Description: ATP-dependent Clp proteinase (EC 3
  misc_feature (1)..(212): NCBI GI NO: 21593305 NR Description: ATP-dependent Clp protease proteolytic subunit
  misc_feature (1)..(212): NCBI GI NO: 9758729 NR Description: ATP-dependent Clp protease-like protein
  misc_feature (1)..(212): NCBI GI NO: 4454056 NR Description: ClpP [Arabidopsis thaliana]
  misc_feature (1)..(212): NCBI GI NO: 37537218 NR Description: putative Clp protease
  misc_feature (1)..(210): NCBI GI NO: 34914540 NR Description: putative ATP-dependent Clp protease
  misc_feature (1)..(175): NCBI GI NO: 25019682 NR Description: ClpP2 [Synechococcus sp. PCC 7942]
  misc_feature (1)..(170): NCBI GI NO: 18378982 NR Description: ATP-dependent Clp protease proteolytic subunit
  misc_feature (1)..(170): NCBI GI NO: 15485610 NR Description: Clp protease 2 proteolytic subunit
MGLLLRERIVFLGSSIDDFVADAIMSQLLLLDAQDPTKDIRLFINSTGGSLSATMAIYDAVQLVRADVSTVALGIAASTASVILGGGTKGKRFAMPNTRIMIHQPLGGASGQAIDVEIQAKEVMHNKNNITRIISSFTGRSFEQVQKDIDRDKYMSPIEAVEYGIIDGVIDRDSIIPLMPVPERVKSTLNYEEISKDPRKFLTPDIPDDEIY

SEQ ID NO: 8625 - DNA, 1164 bp, Glycine max
  misc_feature (1)..(1164): Ceres Seq. ID no. 14315915
cacttcactcgccgccactctccactcacaatgcaaccccttcaccgtctcgcatcctgcacgcgccgcgtcgccacatcgtcgctccgtcacgacagcctccttccccgagccccttcaggaatcctctccttctccaccgacgcgcccgccggaggaggaggctccttcgacgcggcatgggagagcgcctcctcgtggtcgacgggcctcgccggcgaccacttcaacggccaggccccgtccgaggtcctcgcgtacctccaggacacggaggacaggctccgcgagctggaggcggagaaccgccgagggaaggcctactgtgacagctggaagagtcgcttggaggagacgacggtgcttctgaagcaggttcaggagcccggcgcgcgaggctcgtatctgaaggattccgagaaggcggagatgtaccggctgcacaagaagaaccctcaggtctacaccgtggagaagctcgctagggattacaggatcatgcggcagagggttcacgccatcctctggctcaaggagatcgaggaggaggaagagaagaggctcggccacccgctcgacgattccgtcgagcagttgctcgattcttgccctgagttttttaattcgcatgatagggagtttcatgtggcgtctctgccgtacaagccggacttcaaggttatgccggaggggtgggatggcattaccaaggatgtggatgaggtgcattatgagatctccatgaaggaggatgagatgctctatcgggagtttgtcgagaagatgaacttcaataaaaagaaaatggctggagaggtaaaatgccataagtatagtcgacgacgcccttcagatggatggacttttacagtagagaaattgggacatcagggaaagcgtggaggtggtggtggctggaagtttgctagcatgccagatggatcaagccgaccactgaatgatatggagaaaatgtatgtgaagcgagagacaccacgccggcgacgcaggattcttccttgattacttgatttttttttttggaagttttgattagctgttaaaattagattttttacccattgtattcaatggtttgggatgtgtagtgtcaattgttgtcttttttcttttggatgagttattgtattagaagatttactt

SEQ ID NO: 8626 - protein, 340 aa, Glycine max
  peptide (1)..(340): Ceres Seq. ID no. 14315916
  misc_feature (33)..(339): NCBI GI NO: 34908962 NR Description: P0003D09.18
  misc_feature (72)..(339): NCBI GI NO: 8809640 NR Description: gb|AAC32909
  misc_feature (72)..(327): NCBI GI NO: 15241764 NR Description: hypothetical protein [Arabidopsis thaliana]
  misc_feature (11)..(321): NCBI GI NO: 15227059 NR Description: mucin -related [Arabidopsis thaliana]
  misc_feature (161)..(337): NCBI GI NO: 18071389 NR Description: putative mucin [Oryza sativa]
HFTRRHSPLTMQPLHRLASCTRRVATSSLRHDSLLPRAPSGILSFSTDAPAGGGGSFDAAWESASSWSTGLAGDHFNGQAPSEVLAYLQDTEDRLRELEAENRRGKAYCDSWKSRLEETTVLLKQVQEPGARGSYLKDSEKAEMYRLHKKNPQVYTVEKLARDYRIMRQRVHAILWLKEIEEEEEKRLGHPLDDSVEQLLDSCPEFFNSHDREFHVASLPYKPDFKVMPEGWDGITKDVDEVHYEISMKEDEMLYREFVEKMNFNKKKMAGEVKCHKYSRRRPSDGWTFTVEKLGHQGKRGGGGGWKFASMPDGSSRPLNDMEKMYVKRETPRRRRRILP

SEQ ID NO: 8627 - protein, 330 aa, Glycine max
  peptide (1)..(330): Ceres Seq. ID no. 14315917
  misc_feature (23)..(329): NCBI GI NO: 34908962 NR Description: P0003D09.18
  misc_feature (62)..(329): NCBI GI NO: 8809640 NR Description: gb|AAC32909
  misc_feature (62)..(317): NCBI GI NO: 15241764 NR Description: hypothetical protein [Arabidopsis thaliana]
  misc_feature (1)..(311): NCBI GI NO: 15227059 NR Description: mucin -related [Arabidopsis thaliana]
  misc_feature (151)..(327): NCBI GI NO: 18071389 NR Description: putative mucin [Oryza sativa]
MQPLHRLASCTRRVATSSLRHDSLLPRAPSGILSFSTDAPAGGGGSFDAAWESASSWSTGLAGDHFNGQAPSEVLAYLQDTEDRLRELEAENRRGKAYCDSWKSRLEETTVLLKQVQEPGARGSYLKDSEKAEMYRLHKKNPQVYTVEKLARDYRIMRQRVHAILWLKEIEEEEEKRLGHPLDDSVEQLLDSCPEFFNSHDREFHVASLPYKPDFKVMPEGWDGITKDVDEVHYEISMKEDEMLYREFVEKMNFNKKKMAGEVKCHKYSRRRPSDGWTFTVEKLGHQGKRGGGGGWKFASMPDGSSRPLNDMEKMYVKRETPRRRRRILP

SEQ ID NO: 8628 - protein, 197 aa, Glycine max
  peptide (1)..(197): Ceres Seq. ID no. 14315918
  misc_feature (1)..(196): NCBI GI NO: 34908962 NR Description: P0003D09.18
  misc_feature (1)..(196): NCBI GI NO: 8809640 NR Description: gb|AAC32909
  misc_feature (1)..(184): NCBI GI NO: 15241764 NR Description: hypothetical protein [Arabidopsis thaliana]
  misc_feature (1)..(178): NCBI GI NO: 15227059 NR Description: mucin -related [Arabidopsis thaliana]
  misc_feature (18)..(194): NCBI GI NO: 18071389 NR Description: putative mucin [Oryza sativa]
MYRLHKKNPQVYTVEKLARDYRIMRQRVHAILWLKEIEEEEEKRLGHPLDDSVEQLLDSCPEFFNSHDREFHVASLPYKPDFKVMPEGWDGITKDVDEVHYEISMKEDEMLYREFVEKMNFNKKKMAGEVKCHKYSRRRPSDGWTFTVEKLGHQGKRGGGGGWKFASMPDGSSRPLNDMEKMYVKRETPRRRRRILP

SEQ ID NO: 8629 - DNA, 656 bp, Glycine max
  misc_feature (1)..(656): Ceres Seq. ID no. 13638232
ttcattcccttacccgagaaaatgaggtggagctcactctttgtgccctcttttctactccatattcttcttctatcttgcatttttttcacaccaactgattcctctgatggggatggggatggggatttggtagaccaaatatgcaaaaaaacacccttttatgacctttgcagctccatcttacactcaaatcccttagcccccaaaagtgatccaaagggtatggccctcataatggtcaatggaattctgacaaatgctactgacacactcagttacattgaagagcttatcaagcagacctcagatgaacaattagagcaacagttggctttctgtgctgagtcatacatcccagttgtgaagtacattctcccacaagcagctgatgccataaaccaaggtcgatttgggtttgccagttactgcatagttgatgctcagaaggaagtaaatgcttgcgacaagaaattctcgggctcaactcaagcacccttaagtgatagaaatgacattatgcagaagctggtggatgtggctgctgccataattaaactattattaaatggctgatttatttttctcttcctcctttccagcctcatttcttgtagaatatagcaattattagtgcccttatcttatccaataaa

SEQ ID NO: 8630 - protein, 191 aa, Glycine max
  peptide (1)..(191): Ceres Seq. ID no. 13638233
  misc_feature (20)..(191): NCBI GI NO: 15228972 NR Description: hypothetical protein [Arabidopsis thaliana]
  misc_feature (41)..(189): NCBI GI NO: 18401982 NR Description: invertase/pectin methylesterase inhibitor
  misc_feature (40)..(189): NCBI GI NO: 7489025 NR Description: invertase inhibitor precursor - tomato
  misc_feature (43)..(189): NCBI GI NO: 7489160 NR Description: invertase inhibitor precursor - common tobacco
  misc_feature (17)..(159): NCBI GI NO: 15237747 NR Description: invertase/pectin methylesterase inhibitor
  misc_feature (33)..(189): NCBI GI NO: 22212790 NR Description: invertase inhibitor-like protein [Ipomoea batatas]
  misc_feature (45)..(188): NCBI GI NO: 34894526 NR Description: B1011A07.9
  misc_feature (11)..(188): NCBI GI NO: 27544452 NR Description: pectinmethylesterase inhibitor
  misc_feature (11)..(188): NCBI GI NO: 27544454 NR Description: pectinmethylesterase inhibitor
  misc_feature (12)..(188): NCBI GI NO: 7670039 NR Description: invertase inhibitor-like protein
FIPLPEKMRWSSLFVPSFLLHILLLSCIFFTPTDSSDGDGDGDLVDQICKKTPFYDLCSSILHSNPLAPKSDPKGMALIMVNGILTNATDTLSYIEELIKQTSDEQLEQQLAFCAESYIPVVKYILPQAADAINQGRFGFASYCIVDAQKEVNACDKKFSGSTQAPLSDRNDIMQKLVDVAAAIIKLLLNG

SEQ ID NO: 8631 - protein, 184 aa, Glycine max
  peptide (1)..(184): Ceres Seq. ID no. 13638234
  misc_feature (13)..(184): NCBI GI NO: 15228972 NR Description: hypothetical protein [Arabidopsis thaliana]
  misc_feature (34)..(182): NCBI GI NO: 18401982 NR Description: invertase/pectin methylesterase inhibitor
  misc_feature (33)..(182): NCBI GI NO: 7489025 NR Description: invertase inhibitor precursor - tomato
  misc_feature (36)..(182): NCBI GI NO: 7489160 NR Description: invertase inhibitor precursor - common tobacco
  misc_feature (10)..(152): NCBI GI NO: 15237747 NR Description: invertase/pectin methylesterase inhibitor
  misc_feature (26)..(182): NCBI GI NO: 22212790 NR Description: invertase inhibitor-like protein [Ipomoea batatas]
  misc_feature (38)..(181): NCBI GI NO: 34894526 NR Description: B1011A07.9
  misc_feature (4)..(181): NCBI GI NO: 27544452 NR Description: pectinmethylesterase inhibitor
  misc_feature (4)..(181): NCBI GI NO: 27544454 NR Description: pectinmethylesterase inhibitor
  misc_feature (5)..(181): NCBI GI NO: 7670039 NR Description: invertase inhibitor-like protein
MRWSSLFVPSFLLHILLLSCIFFTPTDSSDGDGDGDLVDQICKKTPFYDLCSSILHSNPLAPKSDPKGMALIMVNGILTNATDTLSYIEELIKQTSDEQLEQQLAFCAESYIPVVKYILPQAADAINQGRFGFASYCIVDAQKEVNACDKKFSGSTQAPLSDRNDIMQKLVDVAAAIIKLLLNG

SEQ ID NO: 8632 - protein, 116 aa, Glycine max
  peptide (1)..(116): Ceres Seq. ID no. 13638235
  misc_feature (1)..(116): NCBI GI NO: 15228972 NR Description: hypothetical protein [Arabidopsis thaliana]
  misc_feature (1)..(114): NCBI GI NO: 18401982 NR Description: invertase/pectin methylesterase inhibitor
  misc_feature (1)..(114): NCBI GI NO: 7489025 NR Description: invertase inhibitor precursor - tomato
  misc_feature (1)..(114): NCBI GI NO: 7489160 NR Description: invertase inhibitor precursor - common tobacco
  misc_feature (1)..(84): NCBI GI NO: 15237747 NR Description: invertase/pectin methylesterase inhibitor
  misc_feature (1)..(114): NCBI GI NO: 22212790 NR Description: invertase inhibitor-like protein [Ipomoea batatas]
  misc_feature (1)..(113): NCBI GI NO: 34894526 NR Description: B1011A07.9
  misc_feature (1)..(113): NCBI GI NO: 27544452 NR Description: pectinmethylesterase inhibitor
  misc_feature (1)..(113): NCBI GI NO: 27544454 NR Description: pectinmethylesterase inhibitor
  misc_feature (1)..(113): NCBI GI NO: 7670039 NR Description: invertase inhibitor-like protein
MALIMVNGILTNATDTLSYIEELIKQTSDEQLEQQLAFCAESYIPVVKYILPQAADAINQGRFGFASYCIVDAQKEVNACDKKFSGSTQAPLSDRNDIMQKLVDVAAAIIKLLLNG

SEQ ID NO: 8633 - DNA, 1479 bp, Glycine max
  misc_feature (1)..(1479): Ceres Seq. ID no. 14315958
attgccttcactttcaacccgtactttctctgtttctaaacaccccccacaaaattttctcactcgagaattttcccggaaaatctcacctttttcgatttctcagtcaagacaaacaacaacaaaaactctaaattctttcttaattcttgccaaattcgaaggagagagaaagagaaaaagaaaaggaaaaaaggttaatggcatcactgggatctccgtcttctttctggtgctaccgctgcaaccgcatagttagggttccacaaaaccacgccgttctcctctgccccgattgcaactccggcttcctcgaagagctccaaacccctccccactcgcgccgatccacgcgcggcggcggtgggtcccccttcaacccggtaatcgtcctgcgcaacgcaaacgacgtcgtctcgcccgaaacgcggaacttcgaactctactacaacgacgccgtttcaggttcctccggcccaagcagtctccgtcctttaccacagggagtatccgagttcctcatgggctccggcttcgacaatgtactcgaccatctcgacgccgccgcggggggcgccggagcactgccccccacggcagcgtcgaaagcggcgatcgagtcgatgccggtggttaagatcctcgcgagccacacctacgcggaatcgcactgcgcggtctgcatggagaatttcgagatcaactgcgacgcacgtgagatgccgtgcggtcacgtgtaccattccgagtgcatcgtgccgtggctctcggtgagaaactcgtgccccgtgtgccgccacgaggttccttcggatgaagttgaagaaagtaataacaatactgtggggttgactatttggagacttcctgggggaggattcgctgtgggcaggttcatcggagggagggagctcccactggtgtatacggagatggacggcgggtttaacggcgctaacggcgttccaaggagagtcgcttgggatagctccgttgggaggtctagggagaatagaggcttcggtgctgctttcaggaatgttttttcgtatatcgggagggttaggagctcgttttctcgccgaacgagaaattcgcgtgccaacggaagatctcgttcttaaacaacggtctgcaattgcaatttcgatcgtaacgtcaaggttattagagctcactgactgtgacgcggtcgcaattgatgctgcgctgtcctcaacatttttctgcaattttctacgatatcaaaggctgcggtgatgagaccgcaatcgcagattcgcagtaaggttttaagaaaaaacgtgattgcaattgacgtcacatcagctgcatttgtctgcaatttttctgttgtattcggaaacaatgacgagactgcaacttttttttaccacagtgggatttttcgatttttgtgatgtttttagtttgctaagtattcgtttgaatttttagaggaaatgcatttttttttat

SEQ ID NO: 8634 - protein, 307 aa, Glycine max
  peptide (1)..(307): Ceres Seq. ID no. 14315959
  misc_feature (158)..(198): Pfam Name: RING finger Pfam Description: Zinc finger, C3HC4 type
  misc_feature (22)..(294): NCBI GI NO: 14719329 NR Description: putative RING-H2 finger protein [Oryza sativa]
  misc_feature (3)..(45): NCBI GI NO: 14719329 NR Description: putative RING-H2 finger protein [Oryza sativa]
  misc_feature (53)..(305): NCBI GI NO: 15232595 NR Description: expressed protein [Arabidopsis thaliana]
  misc_feature (40)..(307): NCBI GI NO: 8885559 NR Description: emb|CAB62332
  misc_feature (40)..(307): NCBI GI NO: 18424254 NR Description: expressed protein [Arabidopsis thaliana]
  misc_feature (52)..(305): NCBI GI NO: 34902106 NR Description: unknown protein
  misc_feature (57)..(235): NCBI GI NO: 18405141 NR Description: RING-H2 finger protein (RHC2a)
  misc_feature (112)..(232): NCBI GI NO: 34906008 NR Description: putative RING-H2 finger protein RHC2a
  misc_feature (45)..(256): NCBI GI NO: 15231003 NR Description: expressed protein [Arabidopsis thaliana]
  misc_feature (99)..(209): NCBI GI NO: 15231238 NR Description: expressed protein [Arabidopsis thaliana]
MASLGSPSSFWCYRCNRIVRVPQNHAVLLCPDCNSGFLEELQTPPHSRRSTRGGGGSPFNPVIVLRNANDVVSPETRNFELYYNDAVSGSSGPSSLRPLPQGVSEFLMGSGFDNVLDHLDAAAGGAGALPPTAASKAAIESMPVVKILASHTYAESHCAVCMENFEINCDAREMPCGHVYHSECIVPWLSVRNSCPVCRHEVPSDEVEESNNNTVGLTIWRLPGGGFAVGRFIGGRELPLVYTEMDGGFNGANGVPRRVAWDSSVGRSRENRGFGAAFRNVFSYIGRVRSSFSRRTRNSRANGRSRS

SEQ ID NO: 8635 - protein, 200 aa, Glycine max
  peptide (1)..(200): Ceres Seq. ID no. 14315960
  misc_feature (51)..(91): Pfam Name: RING finger Pfam Description: Zinc finger, C3HC4 type
  misc_feature (1)..(187): NCBI GI NO: 14719329 NR Description: putative RING-H2 finger protein [Oryza sativa]
  misc_feature (1)..(198): NCBI GI NO: 15232595 NR Description: expressed protein [Arabidopsis thaliana]
  misc_feature (1)..(200): NCBI GI NO: 8885559 NR Description: emb|CAB62332
  misc_feature (1)..(200): NCBI GI NO: 18424254 NR Description: expressed protein [Arabidopsis thaliana]
  misc_feature (1)..(198): NCBI GI NO: 34902106 NR Description: unknown protein
  misc_feature (1)..(128): NCBI GI NO: 18405141 NR Description: RING-H2 finger protein (RHC2a)
  misc_feature (5)..(125): NCBI GI NO: 34906008 NR Description: putative RING-H2 finger protein RHC2a
  misc_feature (1)..(149): NCBI GI NO: 15231003 NR Description: expressed protein [Arabidopsis thaliana]
  misc_feature (1)..(102): NCBI GI NO: 15231238 NR Description: expressed protein [Arabidopsis thaliana]
  misc_feature (1)..(102): NCBI GI NO: 38454178 NR Description: At3g13430 [Arabidopsis thaliana]
MGSGFDNVLDHLDAAAGGAGALPPTAASKAAIESMPVVKILASHTYAESHCAVCMENFEINCDAREMPCGHVYHSECIVPWLSVRNSCPVCRHEVPSDEVEESNNNTVGLTIWRLPGGGFAVGRFIGGRELPLVYTEMDGGFNGANGVPRRVAWDSSVGRSRENRGFGAAFRNVFSYIGRVRSSFSRRTRNSRANGRSRS

SEQ ID NO: 8636 - protein, 166 aa, Glycine max
  peptide (1)..(166): Ceres Seq. ID no. 14315961
  misc_feature (17)..(57): Pfam Name: RING finger Pfam Description: Zinc finger, C3HC4 type
  misc_feature (1)..(153): NCBI GI NO: 14719329 NR Description: putative RING-H2 finger protein [Oryza sativa]
  misc_feature (1)..(164): NCBI GI NO: 15232595 NR Description: expressed protein [Arabidopsis thaliana]
  misc_feature (1)..(166): NCBI GI NO: 8885559 NR Description: emb|CAB62332
  misc_feature (1)..(166): NCBI GI NO: 18424254 NR Description: expressed protein [Arabidopsis thaliana]
  misc_feature (1)..(164): NCBI GI NO: 34902106 NR Description: unknown protein
  misc_feature (1)..(94): NCBI GI NO: 18405141 NR Description: RING-H2 finger protein (RHC2a)
  misc_feature (1)..(91): NCBI GI NO: 34906008 NR Description: putative RING-H2 finger protein RHC2a
  misc_feature (1)..(115): NCBI GI NO: 15231003 NR Description: expressed protein [Arabidopsis thaliana]
  misc_feature (1)..(68): NCBI GI NO: 15231238 NR Description: expressed protein [Arabidopsis thaliana]
  misc_feature (1)..(68): NCBI GI NO: 38454178 NR Description: At3g13430 [Arabidopsis thaliana]
MPVVKILASHTYAESHCAVCMENFEINCDAREMPCGHVYHSECIVPWLSVRNSCPVCRHEVPSDEVEESNNNTVGLTIWRLPGGGFAVGRFIGGRELPLVYTEMDGGFNGANGVPRRVAWDSSVGRSRENRGFGAAFRNVFSYIGRVRSSFSRRTRNSRANGRSRS

SEQ ID NO: 8637 - DNA, 760 bp, Glycine max
  misc_feature (1)..(760): Ceres Seq. ID no. 15169960
acattcatcgtgaaccatcgcgaacatcccaatgaccaaaaatcctccaatatatatatataacttccccgttctctcacactcaacagaaaattgaaaaccaacataacaatgtcgttgattccaagtttcttcggcaccgggcgaagaaccaacgtcttcgaccccttctccctcgacgtgtgggacccattccatggcttccccggcaccaccgccctctccgctccgcgctccgagacggcggccttcgccaacacgcgtatcgactggaaggagacggcggaggcgcacgtgttcaaggcagacctgccggggctgaagaaggaagaggtgaaggtggagatcgaggaggagggaagggtgctgcagataagcggacagagaacaaaggagaaggaggacaagaacgacacgtggcaccgcctcgaacgctccagcggcagctttctccgccgcttccgcctgccggagaacgcgaaactcgatcaggtgaaggccggcatggagaacggagtgctcactgtcactgttcccaaggtggatgtcaagaagcccgatgtcaagcccgttcagatcactgaaggctaagttgtgttctcaatcaatcaaaattcatgtgtctcaataattgagtttgaggtgtgttgtgtgagatattattaccatgtattgttatagtgtggtgaactgttggtcgtgttgtgtaactttttttaataataaagaatattgatatatgaatatttttattttaaac

SEQ ID NO: 8638 - protein, 159 aa, Glycine max
  peptide (1)..(159): Ceres Seq. ID no. 15169961
  misc_feature (1)..(157): NCBI GI NO: 16930753 NR Description: small heat shock protein [Retama raetam]
  misc_feature (1)..(157): NCBI GI NO: 123556 NR Description: 18.2 KD CLASS I HEAT SHOCK PROTEIN
  misc_feature (3)..(157): NCBI GI NO: 7441300 NR Description: probable heat shock protein - garden pea
  misc_feature (1)..(157): NCBI GI NO: 71495 NR Description: heat shock protein (clone DChsp17.7) - carrot
  misc_feature (1)..(157): NCBI GI NO: 123548 NR Description: 17
  misc_feature (1)..(157): NCBI GI NO: 123538 NR Description: 17.5 KD CLASS I HEAT SHOCK PROTEIN (HSP 17.5-M)
  misc_feature (1)..(157): NCBI GI NO: 123534 NR Description: 17.3 KD CLASS I HEAT SHOCK PROTEIN (HSP 17.3)
  misc_feature (1)..(157): NCBI GI NO: 25809052 NR Description: heat shock protein [Pisum sativum]
  misc_feature (1)..(157): NCBI GI NO: 3341464 NR Description: Hsp20.1 protein [Lycopersicon peruvianum]
  misc_feature (1)..(157): NCBI GI NO: 123544 NR Description: 18.5 KD CLASS I HEAT SHOCK PROTEIN (HSP 18.5)
MSLIPSFFGTGRRTNVFDPFSLDVWDPFHGFPGTTALSAPRSETAAFANTRIDWKETAEAHVFKADLPGLKKEEVKVEIEEEGRVLQISGQRTKEKEDKNDTWHRLERSSGSFLRRFRLPENAKLDQVKAGMENGVLTVTVPKVDVKKPDVKPVQITEG

SEQ ID NO: 8639 - DNA, 974 bp, Glycine max
  misc_feature (1)..(974): Ceres Seq. ID no. 15171634
ccattgttcaaaaccttcattcatttcaagcaaataatagtttcacatgcatatgtacgtgccctaaacattcaaaaccctacgtacgtcaacatctccgaaaaataaaaatggcgaaaaggagcatgtgtgtttttttgtgcgtgactttgttcatggttgggttttcggagtgttcgagcacgagcacgttcctctacagcgggtgcacgcagcaacggtacactcccaactcgccctacgagtggaatatcaactcgctactcacctcgctggtgaactcagcgacgtactcggcttataacaacttcactgtggtggggtccactcagcaggacgcggtgtacgggctctaccagtgtcgcggcgacctcgccatgccggactgcgccgcgtgcgtggcgcgcgccgtcacccgcgccggcgacatctgccgcggcacgtgcggtggctcggtgcagctcgacggctgcttcgtgaagtacgacaacgcgacgttcctcggcgcgcaggacaaggcggtggtgctgaagaagtgcgggccgtcggtagggtacaaccccgatgccatggggagtcgcgacgccgtgctggccggactcgccgccgccggggggaactttcgcgtcggcgggtctggcggggttcacggcgtggcgcagtgcaccggcgatctcagctacggcgagtgccaggactgcgtggcggaggcgatctcgcggctgaagagcgattgcggcacggcggattacggggacatgtttctcgggaagtgctacgcgaggtactcagtgggtggggcccacgatgagtccaaggcccacggtaaggcccagcatcgtcgcatgcttcctcttctcttactacctctcatgggtttcaagttttaaattcgcttgtagattgaaattgatgtaaaaaaaatgaaaattgtaattttctttgtgaagttgtaagaatcaaaggtttaagag

SEQ ID NO: 8640 - protein, 295 aa, Glycine max
  peptide (1)..(295): Ceres Seq. ID no. 15171635
  misc_feature (116)..(168): Pfam Name: Pfam Description:  Domain of unknown function DUF26
  misc_feature (37)..(274): NCBI GI NO: 9757976 NR Description: contains similarity to secretoryprotein~gene_id:K12B20
  misc_feature (37)..(274): NCBI GI NO: 30693130 NR Description: expressed protein [Arabidopsis thaliana]
  misc_feature (44)..(275): NCBI GI NO: 18379273 NR Description: expressed protein [Arabidopsis thaliana]
  misc_feature (44)..(275): NCBI GI NO: 25410919 NR Description: hypothetical protein At2g01660
  misc_feature (44)..(275): NCBI GI NO: 21554153 NR Description: unknown [Arabidopsis thaliana]
  misc_feature (35)..(268): NCBI GI NO: 21593606 NR Description: unknown [Arabidopsis thaliana]
  misc_feature (35)..(286): NCBI GI NO: 25406066 NR Description: unknown protein F5A18.13
  misc_feature (35)..(268): NCBI GI NO: 18409653 NR Description: expressed protein [Arabidopsis thaliana]
  misc_feature (62)..(263): NCBI GI NO: 18403243 NR Description: expressed protein [Arabidopsis thaliana]
  misc_feature (62)..(263): NCBI GI NO: 25408259 NR Description: hypothetical protein At2g33330
IVQNLHSFQANNSFTCICTCPKHSKPYVRQHLRKIKMAKRSMCVFLCVTLFMVGFSECSSTSTFLYSGCTQQRYTPNSPYEWNINSLLTSLVNSATYSAYNNFTVVGSTQQDAVYGLYQCRGDLAMPDCAACVARAVTRAGDICRGTCGGSVQLDGCFVKYDNATFLGAQDKAVVLKKCGPSVGYNPDAMGSRDAVLAGLAAAGGNFRVGGSGGVHGVAQCTGDLSYGECQDCVAEAISRLKSDCGTADYGDMFLGKCYARYSVGGAHDESKAHGKAQHRRMLPLLLLPLMGFKF

SEQ ID NO: 8641 - protein, 259 aa, Glycine max
  peptide (1)..(259): Ceres Seq. ID no. 15171636
  misc_feature (80)..(132): Pfam Name: Pfam Description:  Domain of unknown function DUF26
  misc_feature (1)..(238): NCBI GI NO: 9757976 NR Description: contains similarity to secretoryprotein~gene_id:K12B20
  misc_feature (1)..(238): NCBI GI NO: 30693130 NR Description: expressed protein [Arabidopsis thaliana]
  misc_feature (8)..(239): NCBI GI NO: 18379273 NR Description: expressed protein [Arabidopsis thaliana]
  misc_feature (8)..(239): NCBI GI NO: 25410919 NR Description: hypothetical protein At2g01660
  misc_feature (8)..(239): NCBI GI NO: 21554153 NR Description: unknown [Arabidopsis thaliana]
  misc_feature (1)..(232): NCBI GI NO: 21593606 NR Description: unknown [Arabidopsis thaliana]
  misc_feature (1)..(250): NCBI GI NO: 25406066 NR Description: unknown protein F5A18.13
  misc_feature (1)..(232): NCBI GI NO: 18409653 NR Description: expressed protein [Arabidopsis thaliana]
  misc_feature (26)..(227): NCBI GI NO: 18403243 NR Description: expressed protein [Arabidopsis thaliana]
  misc_feature (26)..(227): NCBI GI NO: 25408259 NR Description: hypothetical protein At2g33330
MAKRSMCVFLCVTLFMVGFSECSSTSTFLYSGCTQQRYTPNSPYEWNINSLLTSLVNSATYSAYNNFTVVGSTQQDAVYGLYQCRGDLAMPDCAACVARAVTRAGDICRGTCGGSVQLDGCFVKYDNATFLGAQDKAVVLKKCGPSVGYNPDAMGSRDAVLAGLAAAGGNFRVGGSGGVHGVAQCTGDLSYGECQDCVAEAISRLKSDCGTADYGDMFLGKCYARYSVGGAHDESKAHGKAQHRRMLPLLLLPLMGFKF

SEQ ID NO: 8642 - protein, 254 aa, Glycine max
  peptide (1)..(254): Ceres Seq. ID no. 15171637
  misc_feature (75)..(127): Pfam Name: Pfam Description:  Domain of unknown function DUF26
  misc_feature (1)..(233): NCBI GI NO: 9757976 NR Description: contains similarity to secretoryprotein~gene_id:K12B20
  misc_feature (1)..(233): NCBI GI NO: 30693130 NR Description: expressed protein [Arabidopsis thaliana]
  misc_feature (3)..(234): NCBI GI NO: 18379273 NR Description: expressed protein [Arabidopsis thaliana]
  misc_feature (3)..(234): NCBI GI NO: 25410919 NR Description: hypothetical protein At2g01660
  misc_feature (3)..(234): NCBI GI NO: 21554153 NR Description: unknown [Arabidopsis thaliana]
  misc_feature (1)..(227): NCBI GI NO: 21593606 NR Description: unknown [Arabidopsis thaliana]
  misc_feature (1)..(245): NCBI GI NO: 25406066 NR Description: unknown protein F5A18.13
  misc_feature (1)..(227): NCBI GI NO: 18409653 NR Description: expressed protein [Arabidopsis thaliana]
  misc_feature (21)..(222): NCBI GI NO: 18403243 NR Description: expressed protein [Arabidopsis thaliana]
  misc_feature (21)..(222): NCBI GI NO: 25408259 NR Description: hypothetical protein At2g33330
MCVFLCVTLFMVGFSECSSTSTFLYSGCTQQRYTPNSPYEWNINSLLTSLVNSATYSAYNNFTVVGSTQQDAVYGLYQCRGDLAMPDCAACVARAVTRAGDICRGTCGGSVQLDGCFVKYDNATFLGAQDKAVVLKKCGPSVGYNPDAMGSRDAVLAGLAAAGGNFRVGGSGGVHGVAQCTGDLSYGECQDCVAEAISRLKSDCGTADYGDMFLGKCYARYSVGGAHDESKAHGKAQHRRMLPLLLLPLMGFKF

SEQ ID NO: 8643 - DNA, 1531 bp, Glycine max
  misc_feature (1)..(1531): Ceres Seq. ID no. 14315874
atcatatcatatattcatattcatctccccacgagattctggttctgtttaggccacccacacacctccatttccccaactcgctccgagtttactcactcctttccctttcgagatcaaccgccaccgctacgcctccgcgctccgccgccactgcaatccccgcctcccttctccgtcaatgcaaaattcggcgtcgattctcgccggaaccttctcccgctcttccttcccctccgggctttgacttttgctttcttgcgattgcgatgagtccctttcgccctttgttgctcttcgccgccgtattcttcctcctccgtcccctcgccgccaccgacggcgacgccgatccgctttacataggttgtgtggagcagtgtaagaaaactggatgtgtaggggatagatactttcaacattgtaaattttcatcagatggaaaaccaattgatggtccatggtatatgcatgaacccctctatctgaggtggaaacaatgggactgttgcactgactgtaggtattactgtatgctagctagagaggaagaacgaacaaaacttggcgacaagcctgtcaagtatcatggaaaatggccattccgtcgcgtttatggaattcaggaacctgtggctgttgctctgtctgccgtcaatcttgctatgcagtttcatggttgggtatcctttttcattcttgtgtactataagttgactttgaggccagataagaagacttactatgagtacactggattgtggcatatttatgggattttatccatgaacgcatggctgtggagtgctgttttccatagtagagccgtggaattaacagagaagctggatttttcttctgctgtggcattacttggattcagcctcattctagcaatattgcgagcttttaacgtgagggatgaggctacgcgagtcatgatttctgctcccttgattgcttttgtgacaactcatatcatgtatctgaatttctatgaacttgcttatggtttgaacagaatagtttgcacgggaatggttgttgtccagcttcttatttgggccatttgggctggtgcttcgaaccacccggcgcgatggaaattatgggcagtagtggttggaggaggcttagctatggtgttggagacatatgactttccaccttacatgggatatgtggatgctcatgctctatggcatgcaacaagcattcctctcacatttttttggtggggttttataagggatgatgctgagtttagaaccacagctatgctcaagaaggtaaaatagtgctgcagacacaatttggcagaggttggatctgatgaagaacatgtcatatatgttgctgcttactttgtttttgtacatcagaactttttttttttttttaatttgttttcctcgtgtaggcgtttatttgaaatgcttaacacgatggtttctgtgcttttgattttgtaactttttgttttcctcatgtatgaagcatactttcttagtggaattaattgcaatgcttt

SEQ ID NO: 8644 - protein, 431 aa, Glycine max
  peptide (1)..(431): Ceres Seq. ID no. 14315875
  misc_feature (158)..(427): Pfam Name: Pfam Description:  Per1-like
  misc_feature (99)..(431): NCBI GI NO: 15219283 NR Description: expressed protein [Arabidopsis thaliana]
  misc_feature (96)..(431): NCBI GI NO: 18424554 NR Description: expressed protein [Arabidopsis thaliana]
  misc_feature (86)..(431): NCBI GI NO: 37536224 NR Description: unknown protein
  misc_feature (156)..(431): NCBI GI NO: 10176931 NR Description: gene_id:MTG10.16~unknown protein
  misc_feature (124)..(274): NCBI GI NO: 20260110 NR Description: unknown protein [Arabidopsis thaliana]
  misc_feature (105)..(431): NCBI GI NO: 19114746 NR Description: similar to yeast protein involved in Mn2+homeostasis
  misc_feature (130)..(419): NCBI GI NO: 32949296 NR Description: CAB2 protein [Homo sapiens]
  misc_feature (130)..(418): NCBI GI NO: 19921698 NR Description: CG3271-PB [Drosophila melanogaster]
  misc_feature (77)..(420): NCBI GI NO: 32418510 NR Description: hypothetical protein [Neurospora crassa]
  misc_feature (130)..(412): NCBI GI NO: 24586036 NR Description: CG3271-PA [Drosophila melanogaster]
HIIYSYSSPHEILVLFRPPTHLHFPNSLRVYSLLSLSRSTATATPPRSAATAIPASLLRQCKIRRRFSPEPSPALPSPPGFDFCFLAIAMSPFRPLLLFAAVFFLLRPLAATDGDADPLYIGCVEQCKKTGCVGDRYFQHCKFSSDGKPIDGPWYMHEPLYLRWKQWDCCTDCRYYCMLAREEERTKLGDKPVKYHGKWPFRRVYGIQEPVAVALSAVNLAMQFHGWVSFFILVYYKLTLRPDKKTYYEYTGLWHIYGILSMNAWLWSAVFHSRAVELTEKLDFSSAVALLGFSLILAILRAFNVRDEATRVMISAPLIAFVTTHIMYLNFYELAYGLNRIVCTGMVVVQLLIWAIWAGASNHPARWKLWAVVVGGGLAMVLETYDFPPYMGYVDAHALWHATSIPLTFFWWGFIRDDAEFRTTAMLKKVK

SEQ ID NO: 8645 - protein, 342 aa, Glycine max
  peptide (1)..(342): Ceres Seq. ID no. 14315876
  misc_feature (69)..(338): Pfam Name: Pfam Description:  Per1-like
  misc_feature (10)..(342): NCBI GI NO: 15219283 NR Description: expressed protein [Arabidopsis thaliana]
  misc_feature (7)..(342): NCBI GI NO: 18424554 NR Description: expressed protein [Arabidopsis thaliana]
  misc_feature (1)..(342): NCBI GI NO: 37536224 NR Description: unknown protein
  misc_feature (67)..(342): NCBI GI NO: 10176931 NR Description: gene_id:MTG10.16~unknown protein
  misc_feature (35)..(185): NCBI GI NO: 20260110 NR Description: unknown protein [Arabidopsis thaliana]
  misc_feature (16)..(342): NCBI GI NO: 19114746 NR Description: similar to yeast protein involved in Mn2+homeostasis
  misc_feature (41)..(330): NCBI GI NO: 32949296 NR Description: CAB2 protein [Homo sapiens]
  misc_feature (41)..(329): NCBI GI NO: 19921698 NR Description: CG3271-PB [Drosophila melanogaster]
  misc_feature (1)..(331): NCBI GI NO: 32418510 NR Description: hypothetical protein [Neurospora crassa]
  misc_feature (41)..(323): NCBI GI NO: 24586036 NR Description: CG3271-PA [Drosophila melanogaster]
MSPFRPLLLFAAVFFLLRPLAATDGDADPLYIGCVEQCKKTGCVGDRYFQHCKFSSDGKPIDGPWYMHEPLYLRWKQWDCCTDCRYYCMLAREEERTKLGDKPVKYHGKWPFRRVYGIQEPVAVALSAVNLAMQFHGWVSFFILVYYKLTLRPDKKTYYEYTGLWHIYGILSMNAWLWSAVFHSRAVELTEKLDFSSAVALLGFSLILAILRAFNVRDEATRVMISAPLIAFVTTHIMYLNFYELAYGLNRIVCTGMVVVQLLIWAIWAGASNHPARWKLWAVVVGGGLAMVLETYDFPPYMGYVDAHALWHATSIPLTFFWWGFIRDDAEFRTTAMLKKVK

SEQ ID NO: 8646 - protein, 276 aa, Glycine max
  peptide (1)..(276): Ceres Seq. ID no. 14315877
  misc_feature (3)..(272): Pfam Name: Pfam Description:  Per1-like
  misc_feature (1)..(276): NCBI GI NO: 15219283 NR Description: expressed protein [Arabidopsis thaliana]
  misc_feature (1)..(276): NCBI GI NO: 18424554 NR Description: expressed protein [Arabidopsis thaliana]
  misc_feature (1)..(276): NCBI GI NO: 37536224 NR Description: unknown protein
  misc_feature (1)..(276): NCBI GI NO: 10176931 NR Description: gene_id:MTG10.16~unknown protein
  misc_feature (1)..(119): NCBI GI NO: 20260110 NR Description: unknown protein [Arabidopsis thaliana]
  misc_feature (1)..(276): NCBI GI NO: 19114746 NR Description: similar to yeast protein involved in Mn2+homeostasis
  misc_feature (1)..(264): NCBI GI NO: 32949296 NR Description: CAB2 protein [Homo sapiens]
  misc_feature (1)..(263): NCBI GI NO: 19921698 NR Description: CG3271-PB [Drosophila melanogaster]
  misc_feature (1)..(265): NCBI GI NO: 32418510 NR Description: hypothetical protein [Neurospora crassa]
  misc_feature (1)..(257): NCBI GI NO: 24586036 NR Description: CG3271-PA [Drosophila melanogaster]
MHEPLYLRWKQWDCCTDCRYYCMLAREEERTKLGDKPVKYHGKWPFRRVYGIQEPVAVALSAVNLAMQFHGWVSFFILVYYKLTLRPDKKTYYEYTGLWHIYGILSMNAWLWSAVFHSRAVELTEKLDFSSAVALLGFSLILAILRAFNVRDEATRVMISAPLIAFVTTHIMYLNFYELAYGLNRIVCTGMVVVQLLIWAIWAGASNHPARWKLWAVVVGGGLAMVLETYDFPPYMGYVDAHALWHATSIPLTFFWWGFIRDDAEFRTTAMLKKVK

SEQ ID NO: 8647 - DNA, 1138 bp, Glycine max
  misc_feature (1)..(1138): Ceres Seq. ID no. 14315896
ctgtccaacaaaaatctcgaccaatagctatattctctcatggctggagattaggtagagacaaaattgggcaagagatatggggtagtttttatgatgctttggggaatgaatttaatatccatctatcgagaatgagtttgatgtcagcactggaatggtggctggtataccatcccagcatccagaagttctcatggaagcctcctcacacccctttctcctcccctctcttccttagtctctccatcctcagctacctctccctcaccctcctcctcaccctcctccctctcccacccttcccacaccgcctcctgaagcccatcaccgccctccacaacctcctcctcctcctcctctccctcctcatgctcctgggctgctccctcaccctcctcatccacacccctcacctccgctgggccgtctgcttcccaccccacaccaatcccaccgggcccctcttcttctgggcctacatcttctacctctccaaaatcctcgaattcctcgacacgctcttcatcgtcctctcccgctccttccgacgcctctccttcctccacgtctaccaccacgccaccgtcctcctcatgtgctacctctggctccaaacctcccaatccctcttccccgtcgcgctcctcaccaatgcctccgtccacgtcatcatgtacggttactacttcctcagcgccctcggcatccgcccctcctggaagcgcgccgtcaccgactgccagatcatccagttcgtcttcagcttcgcaatttcgggtctcatgctccactaccacttctccggatccggatgctccgggatttggggctggtgcttcaatgcggtttttaatgcctctctcttggccctctttgttgattttcatctcaagagttatgctaagaaacgcactcttaataaggactcatgaattcctcgtccatttcattggtagcatactttatcttctgtaagacaagagaaaaaaaatattcattggaattcaatgacaatgttttttttttcctcctccttgttaaaggattattacaagataataatgccttacattacctgtcatctttattttctttcctttttccttaccattcaagggatgcaacttttaatccg

SEQ ID NO: 8648 - protein, 310 aa, Glycine max
  peptide (1)..(310): Ceres Seq. ID no. 14315897
  misc_feature (46)..(305): Pfam Name: Pfam Description:  GNS1/SUR4 family
  misc_feature (46)..(305): NCBI GI NO: 15230729 NR Description: expressed protein [Arabidopsis thaliana]
  misc_feature (46)..(305): NCBI GI NO: 15230725 NR Description: expressed protein [Arabidopsis thaliana]
  misc_feature (42)..(301): NCBI GI NO: 19033556 NR Description: putative long chain fatty acid elongation enzyme
  misc_feature (48)..(310): NCBI GI NO: 15222085 NR Description: hypothetical protein [Arabidopsis thaliana]
  misc_feature (52)..(308): NCBI GI NO: 19569971 NR Description: Hypothetical 36
  misc_feature (46)..(308): NCBI GI NO: 15234538 NR Description: expressed protein [Arabidopsis thaliana]
  misc_feature (41)..(310): NCBI GI NO: 28828933 NR Description: similar to GNS1/SUR4 family protein
  misc_feature (40)..(310): NCBI GI NO: 467698 NR Description: SUR4 [Saccharomyces cerevisiae]
  misc_feature (101)..(303): NCBI GI NO: 27948812 NR Description: FEN1 [Kluyveromyces delphensis]
  misc_feature (106)..(305): NCBI GI NO: 6319882 NR Description: Elongase II elongates palmitoyl-CoA and stearoyl-CoA up to C22 fatty acids
VQQKSRPIAIFSHGWRLGRDKIGQEIWGSFYDALGNEFNIHLSRMSLMSALEWWLVYHPSIQKFSWKPPHTPFSSPLFLSLSILSYLSLTLLLTLLPLPPFPHRLLKPITALHNLLLLLLSLLMLLGCSLTLLIHTPHLRWAVCFPPHTNPTGPLFFWAYIFYLSKILEFLDTLFIVLSRSFRRLSFLHVYHHATVLLMCYLWLQTSQSLFPVALLTNASVHVIMYGYYFLSALGIRPSWKRAVTDCQIIQFVFSFAISGLMLHYHFSGSGCSGIWGWCFNAVFNASLLALFVDFHLKSYAKKRTLNKDS

SEQ ID NO: 8649 - protein, 266 aa, Glycine max
  peptide (1)..(266): Ceres Seq. ID no. 14315898
  misc_feature (2)..(261): Pfam Name: Pfam Description:  GNS1/SUR4 family
  misc_feature (2)..(261): NCBI GI NO: 15230729 NR Description: expressed protein [Arabidopsis thaliana]
  misc_feature (2)..(261): NCBI GI NO: 15230725 NR Description: expressed protein [Arabidopsis thaliana]
  misc_feature (1)..(257): NCBI GI NO: 19033556 NR Description: putative long chain fatty acid elongation enzyme
  misc_feature (4)..(266): NCBI GI NO: 15222085 NR Description: hypothetical protein [Arabidopsis thaliana]
  misc_feature (8)..(264): NCBI GI NO: 19569971 NR Description: Hypothetical 36
  misc_feature (2)..(264): NCBI GI NO: 15234538 NR Description: expressed protein [Arabidopsis thaliana]
  misc_feature (1)..(266): NCBI GI NO: 28828933 NR Description: similar to GNS1/SUR4 family protein
  misc_feature (1)..(266): NCBI GI NO: 467698 NR Description: SUR4 [Saccharomyces cerevisiae]
  misc_feature (57)..(259): NCBI GI NO: 27948812 NR Description: FEN1 [Kluyveromyces delphensis]
  misc_feature (62)..(261): NCBI GI NO: 6319882 NR Description: Elongase II elongates palmitoyl-CoA and stearoyl-CoA up to C22 fatty acids
MSLMSALEWWLVYHPSIQKFSWKPPHTPFSSPLFLSLSILSYLSLTLLLTLLPLPPFPHRLLKPITALHNLLLLLLSLLMLLGCSLTLLIHTPHLRWAVCFPPHTNPTGPLFFWAYIFYLSKILEFLDTLFIVLSRSFRRLSFLHVYHHATVLLMCYLWLQTSQSLFPVALLTNASVHVIMYGYYFLSALGIRPSWKRAVTDCQIIQFVFSFAISGLMLHYHFSGSGCSGIWGWCFNAVFNASLLALFVDFHLKSYAKKRTLNKDS

SEQ ID NO: 8650 - protein, 263 aa, Glycine max
  peptide (1)..(263): Ceres Seq. ID no. 14315899
  misc_feature (1)..(258): Pfam Name: Pfam Description:  GNS1/SUR4 family
  misc_feature (1)..(258): NCBI GI NO: 15230729 NR Description: expressed protein [Arabidopsis thaliana]
  misc_feature (1)..(258): NCBI GI NO: 15230725 NR Description: expressed protein [Arabidopsis thaliana]
  misc_feature (1)..(254): NCBI GI NO: 19033556 NR Description: putative long chain fatty acid elongation enzyme
  misc_feature (1)..(263): NCBI GI NO: 15222085 NR Description: hypothetical protein [Arabidopsis thaliana]
  misc_feature (5)..(261): NCBI GI NO: 19569971 NR Description: Hypothetical 36
  misc_feature (1)..(261): NCBI GI NO: 15234538 NR Description: expressed protein [Arabidopsis thaliana]
  misc_feature (1)..(263): NCBI GI NO: 28828933 NR Description: similar to GNS1/SUR4 family protein
  misc_feature (1)..(263): NCBI GI NO: 467698 NR Description: SUR4 [Saccharomyces cerevisiae]
  misc_feature (54)..(256): NCBI GI NO: 27948812 NR Description: FEN1 [Kluyveromyces delphensis]
  misc_feature (59)..(258): NCBI GI NO: 6319882 NR Description: Elongase II elongates palmitoyl-CoA and stearoyl-CoA up to C22 fatty acids
MSALEWWLVYHPSIQKFSWKPPHTPFSSPLFLSLSILSYLSLTLLLTLLPLPPFPHRLLKPITALHNLLLLLLSLLMLLGCSLTLLIHTPHLRWAVCFPPHTNPTGPLFFWAYIFYLSKILEFLDTLFIVLSRSFRRLSFLHVYHHATVLLMCYLWLQTSQSLFPVALLTNASVHVIMYGYYFLSALGIRPSWKRAVTDCQIIQFVFSFAISGLMLHYHFSGSGCSGIWGWCFNAVFNASLLALFVDFHLKSYAKKRTLNKDS

SEQ ID NO: 8651 - DNA, 1312 bp, Glycine max
  misc_feature (1)..(1312): Ceres Seq. ID no. 14314378
aaggatcctccaaaacctcgtccaaggtttgtgttgtgttgggtgagattttattctaacatcgtttcatcaaatggcttttatgtctggagttcagcgtctgcttcgccgcactccacttgttcattcccactatgcttctattcgtctcagctcaactctcacttcccccaattttttttttttttttgtaacacaaattgaatttgctgctttattactaataattattgcaaacacaacaacagggtacaacacaaaaatgccacaataaatagaaaagcaatcatacacgaccatattaatctatgaacaaataaattaaagagatcactaaaaatggactgtacttttcacatttacttggcatttacatttcaaatctctctttcctgtttggatttgtccgtcacttgaacacaataagatcaggacgtgcaagatggccatcaaacaaatagaatcaacctgatctgaatcataaacattgtagcatagagatgacacattcagacttttattcaaagaacttggacaggaagatagatgtttcacttgactccaaatagagcttgcctttattcctcgataaaaactagaacatgatttatcgtgaatggtgcttccgcaattcgaacttacttgtagataggtggaggtggggaagcatatatgtaaactggaggtggaggtgatttgtaaatgtacttgggagcgggagctggggaaggaggaggtggtgatgtgtaatggtatggtggaggaggagatggagaaggtggtggagggctcacatagtggtaaggtggaggagcataagaagaaagtggaggccaaaaatgcattggaaaattatgcctataacatgaggaacacaatcaaggatgacaagattgcttccaaactgtcttctgatgataagaagaaaattgaagatgcgattgagcaggctatccaatggctagatggaaaccaacttgctgaggctgacgaatttgaggataagatgaaggagttggagagcatttgtaatcccatcatagcaaagatgtaccagggtgctggtggtgatgcgggtggagccatggatgaggatggtcctgcagctggcagtggaagcggtgctggacccaaaattgaggaagtcgattaagcagaagattctcatgggttgttcttgattttgtcaaagacccttttgaagtttagataacagcgtgtcattatgtttttattgcgattttatttttctcttttttttttaatgtacttttccccgtttctacttgaacaatgatataagtttttgctc

SEQ ID NO: 8652 - protein, 136 aa, Glycine max
  peptide (1)..(136): Ceres Seq. ID no. 14314379
  misc_feature (1)..(105): Pfam Name: Pfam Description:  Hsp70 protein
  misc_feature (1)..(136): NCBI GI NO: 7488736 NR Description: dnaK-type molecular chaperone hsp70 - alfalfa
  misc_feature (1)..(136): NCBI GI NO: 2119719 NR Description: dnaK-type molecular chaperone hsc70-3 - tomato
  misc_feature (1)..(136): NCBI GI NO: 30025966 NR Description: heat shock protein 70 [Nicotiana tabacum]
  misc_feature (1)..(136): NCBI GI NO: 6969976 NR Description: high molecular weight heat shock protein
  misc_feature (1)..(136): NCBI GI NO: 34908140 NR Description: putative HSP70
  misc_feature (1)..(136): NCBI GI NO: 1076746 NR Description: dnaK-type molecular chaperone hsp70 - rice
  misc_feature (1)..(136): NCBI GI NO: 21664287 NR Description: heat shock protein 70
  misc_feature (1)..(136): NCBI GI NO: 29124135 NR Description: heat shock protein cognate 70
  misc_feature (8)..(136): NCBI GI NO: 38488578 NR Description: heat shock protein 70 [Nicotiana benthamiana]
  misc_feature (1)..(136): NCBI GI NO: 3962377 NR Description: heat shock protein 70 [Arabidopsis thaliana]
MCNGMVEEEMEKVVEGSHSGKVEEHKKKVEAKNALENYAYNMRNTIKDDKIASKLSSDDKKKIEDAIEQAIQWLDGNQLAEADEFEDKMKELESICNPIIAKMYQGAGGDAGGAMDEDGPAAGSGSGAGPKIEEVD

SEQ ID NO: 8653 - protein, 132 aa, Glycine max
  peptide (1)..(132): Ceres Seq. ID no. 14314380
  misc_feature (1)..(101): Pfam Name: Pfam Description:  Hsp70 protein
  misc_feature (1)..(132): NCBI GI NO: 7488736 NR Description: dnaK-type molecular chaperone hsp70 - alfalfa
  misc_feature (1)..(132): NCBI GI NO: 2119719 NR Description: dnaK-type molecular chaperone hsc70-3 - tomato
  misc_feature (1)..(132): NCBI GI NO: 30025966 NR Description: heat shock protein 70 [Nicotiana tabacum]
  misc_feature (1)..(132): NCBI GI NO: 6969976 NR Description: high molecular weight heat shock protein
  misc_feature (1)..(132): NCBI GI NO: 34908140 NR Description: putative HSP70
  misc_feature (1)..(132): NCBI GI NO: 1076746 NR Description: dnaK-type molecular chaperone hsp70 - rice
  misc_feature (1)..(132): NCBI GI NO: 21664287 NR Description: heat shock protein 70
  misc_feature (1)..(132): NCBI GI NO: 29124135 NR Description: heat shock protein cognate 70
  misc_feature (4)..(132): NCBI GI NO: 38488578 NR Description: heat shock protein 70 [Nicotiana benthamiana]
  misc_feature (1)..(132): NCBI GI NO: 3962377 NR Description: heat shock protein 70 [Arabidopsis thaliana]
MVEEEMEKVVEGSHSGKVEEHKKKVEAKNALENYAYNMRNTIKDDKIASKLSSDDKKKIEDAIEQAIQWLDGNQLAEADEFEDKMKELESICNPIIAKMYQGAGGDAGGAMDEDGPAAGSGSGAGPKIEEVD

SEQ ID NO: 8654 - protein, 127 aa, Glycine max
  peptide (1)..(127): Ceres Seq. ID no. 14314381
  misc_feature (1)..(96): Pfam Name: Pfam Description:  Hsp70 protein
  misc_feature (1)..(127): NCBI GI NO: 7488736 NR Description: dnaK-type molecular chaperone hsp70 - alfalfa
  misc_feature (1)..(127): NCBI GI NO: 2119719 NR Description: dnaK-type molecular chaperone hsc70-3 - tomato
  misc_feature (1)..(127): NCBI GI NO: 30025966 NR Description: heat shock protein 70 [Nicotiana tabacum]
  misc_feature (1)..(127): NCBI GI NO: 6969976 NR Description: high molecular weight heat shock protein
  misc_feature (1)..(127): NCBI GI NO: 34908140 NR Description: putative HSP70
  misc_feature (1)..(127): NCBI GI NO: 1076746 NR Description: dnaK-type molecular chaperone hsp70 - rice
  misc_feature (1)..(127): NCBI GI NO: 21664287 NR Description: heat shock protein 70
  misc_feature (1)..(127): NCBI GI NO: 29124135 NR Description: heat shock protein cognate 70
  misc_feature (1)..(127): NCBI GI NO: 38488578 NR Description: heat shock protein 70 [Nicotiana benthamiana]
  misc_feature (1)..(127): NCBI GI NO: 3962377 NR Description: heat shock protein 70 [Arabidopsis thaliana]
MEKVVEGSHSGKVEEHKKKVEAKNALENYAYNMRNTIKDDKIASKLSSDDKKKIEDAIEQAIQWLDGNQLAEADEFEDKMKELESICNPIIAKMYQGAGGDAGGAMDEDGPAAGSGSGAGPKIEEVD

SEQ ID NO: 8655 - DNA, 789 bp, Glycine max
  misc_feature (1)..(789): Ceres Seq. ID no. 15173608
gaaaaatttctctcgtcaaatttatccattcaccacagagtttcttcaatggcccagcctcaaccagagtcccacgccaccaatggctcacacgagccattgctcaaaatcccaaagctccaccaaaacggcgacgtttccgcaaccgctccctttctccgcgtcaagaagctctccgacaaggccgttttgccctctagggcttcccctctctccgccggttacgatctctctagcgcggtggagacgaaggtcccggcgagagggaaggctctggtggccactgacatcagcatcgcgattccagagggcacatatgctcgcgttgcgccgcgttcggggttggcgtggaagcactcgatcgacgtgggtgcgggggtgatagatgcggattacaggggtccggttggggttatacttttcaaccattcggacacggattttgaggtgaaggttggggacagggttgcgcaacttatcattgagaagattgtgacaccgaatgttgttacagaggtcgaggatttggatgagactgttagaggtgaaggtgggtttggatccaccggtgtttgattttgttctgttctcttggtaattttgtagagcagttggtgggtgtaatcgaatgaagaacctgtctttatcttttggcttgttagtgttctgtgtgtgtccaagttatgatggtattgatttggtcatcggggaatggcagtaggtattaggtaaatgctttcaaagctagaaaactttattgaacaagataattaattttattattgtctt

SEQ ID NO: 8656 - protein, 191 aa, Glycine max
  peptide (1)..(191): Ceres Seq. ID no. 15173609
  misc_feature (60)..(190): Pfam Name: Pfam Description:  dUTPase
  misc_feature (31)..(191): NCBI GI NO: 15232681 NR Description: dUTP pyrophosphatase-related protein
  misc_feature (32)..(191): NCBI GI NO: 416922 NR Description: Deoxyuridine 5'-triphosphate nucleotidohydrolase
  misc_feature (46)..(191): NCBI GI NO: 31126720 NR Description: putative deoxyuridine triphosphatase
  misc_feature (50)..(191): NCBI GI NO: 38566986 NR Description: probable dUTP pyrophosphatase [Neurospora crassa]
  misc_feature (55)..(191): NCBI GI NO: 19114785 NR Description: deoxyuridine 5'-triphosphate nucleotidohydrolase
  misc_feature (11)..(190): NCBI GI NO: 40746988 NR Description: hypothetical protein AN0271.2
  misc_feature (53)..(191): NCBI GI NO: 19921126 NR Description: CG4584-PA [Drosophila melanogaster]
  misc_feature (53)..(191): NCBI GI NO: 38047903 NR Description: similar to Drosophila melanogaster BcDNA:LD08534
  misc_feature (53)..(191): NCBI GI NO: 24583610 NR Description: CG4584-PB [Drosophila melanogaster]
  misc_feature (53)..(190): NCBI GI NO: 1169437 NR Description: Deoxyuridine 5'-triphosphate nucleotidohydrolase
EKFLSSNLSIHHRVSSMAQPQPESHATNGSHEPLLKIPKLHQNGDVSATAPFLRVKKLSDKAVLPSRASPLSAGYDLSSAVETKVPARGKALVATDISIAIPEGTYARVAPRSGLAWKHSIDVGAGVIDADYRGPVGVILFNHSDTDFEVKVGDRVAQLIIEKIVTPNVVTEVEDLDETVRGEGGFGSTGV

SEQ ID NO: 8657 - protein, 175 aa, Glycine max
  peptide (1)..(175): Ceres Seq. ID no. 15173610
  misc_feature (44)..(174): Pfam Name: Pfam Description:  dUTPase
  misc_feature (15)..(175): NCBI GI NO: 15232681 NR Description: dUTP pyrophosphatase-related protein
  misc_feature (16)..(175): NCBI GI NO: 416922 NR Description: Deoxyuridine 5'-triphosphate nucleotidohydrolase
  misc_feature (30)..(175): NCBI GI NO: 31126720 NR Description: putative deoxyuridine triphosphatase
  misc_feature (34)..(175): NCBI GI NO: 38566986 NR Description: probable dUTP pyrophosphatase [Neurospora crassa]
  misc_feature (39)..(175): NCBI GI NO: 19114785 NR Description: deoxyuridine 5'-triphosphate nucleotidohydrolase
  misc_feature (1)..(174): NCBI GI NO: 40746988 NR Description: hypothetical protein AN0271.2
  misc_feature (37)..(175): NCBI GI NO: 19921126 NR Description: CG4584-PA [Drosophila melanogaster]
  misc_feature (37)..(175): NCBI GI NO: 38047903 NR Description: similar to Drosophila melanogaster BcDNA:LD08534
  misc_feature (37)..(175): NCBI GI NO: 24583610 NR Description: CG4584-PB [Drosophila melanogaster]
  misc_feature (37)..(174): NCBI GI NO: 1169437 NR Description: Deoxyuridine 5'-triphosphate nucleotidohydrolase
MAQPQPESHATNGSHEPLLKIPKLHQNGDVSATAPFLRVKKLSDKAVLPSRASPLSAGYDLSSAVETKVPARGKALVATDISIAIPEGTYARVAPRSGLAWKHSIDVGAGVIDADYRGPVGVILFNHSDTDFEVKVGDRVAQLIIEKIVTPNVVTEVEDLDETVRGEGGFGSTGV

SEQ ID NO: 8658 - protein, 126 aa, Glycine max
  peptide (1)..(126): Ceres Seq. ID no. 15173611
KNFSRQIYPFTTEFLQWPSLNQSPTPPMAHTSHCSKSQSSTKTATFPQPLPFSASRSSPTRPFCPLGLPLSPPVTISLARWRRRSRREGRLWWPLTSASRFQRAHMLALRRVRGWRGSTRSTWVRG

SEQ ID NO: 8659 - DNA, 631 bp, Glycine max
  misc_feature (1)..(631): Ceres Seq. ID no. 13594289
agttcagttcaccctaaatttcttccactatcatcttctctcagttcgacgtcagcgaagccttcattgtttgttgggggcaattcgattcgatttcgcagagtagaatgtttgggacggcgattcgatgtttggcgaagaaaccgaagccgaagatgggacccgtgatcctgaaaacgccgccggagcagaggcagacaatcacaagaaccctcttcgatataattaaggagcatggtcccatcactgttgctaacacctgggaacgtgtccaggaagttggattgaaagatttgacaagcaagaatcacatgaaaatagtgctgaaatggatgagagagaggcagaagattcggctcctttgcaaccacgttggagcacacaaacagtttctctacaccacttggtttaccaagccggttacccctcccaagaattcctcttgaaagttgaaacttcatcatcagttcgttgctgctgttttgtaccatgtcttgtcaagagtaataatttcattttagaaccgttaatcaatagagatcgaaatgttttgcccaaaaaaaaaaaaaaaaaagcttatcgataccgtcgacctcgagggggggcccggtacccaattcgccctatagtg

SEQ ID NO: 8660 - protein, 112 aa, Glycine max
  peptide (1)..(112): Ceres Seq. ID no. 13594290
  misc_feature (1)..(112): NCBI GI NO: 15239880 NR Description: expressed protein [Arabidopsis thaliana]
  misc_feature (1)..(112): NCBI GI NO: 21594042 NR Description: unknown [Arabidopsis thaliana]
  misc_feature (1)..(112): NCBI GI NO: 38637563 NR Description: unknown protein
  misc_feature (6)..(98): NCBI GI NO: 18410491 NR Description: expressed protein [Arabidopsis thaliana]
  misc_feature (23)..(100): NCBI GI NO: 27573361 NR Description: unknown protein
MFGTAIRCLAKKPKPKMGPVILKTPPEQRQTITRTLFDIIKEHGPITVANTWERVQEVGLKDLTSKNHMKIVLKWMRERQKIRLLCNHVGAHKQFLYTTWFTKPVTPPKNSS

SEQ ID NO: 8661 - protein, 101 aa, Glycine max
  peptide (1)..(101): Ceres Seq. ID no. 13594291
MDEREAEDSAPLQPRWSTQTVSLHHLVYQAGYPSQEFLLKVETSSSVRCCCFVPCLVKSNNFILEPLINRDRNVLPKKKKKKAYRYRRPRGGARYPIRPIV

SEQ ID NO: 8662 - protein, 96 aa, Glycine max
  peptide (1)..(96): Ceres Seq. ID no. 13594292
  misc_feature (1)..(96): NCBI GI NO: 15239880 NR Description: expressed protein [Arabidopsis thaliana]
  misc_feature (1)..(96): NCBI GI NO: 21594042 NR Description: unknown [Arabidopsis thaliana]
  misc_feature (1)..(96): NCBI GI NO: 38637563 NR Description: unknown protein
  misc_feature (1)..(82): NCBI GI NO: 18410491 NR Description: expressed protein [Arabidopsis thaliana]
  misc_feature (7)..(84): NCBI GI NO: 27573361 NR Description: unknown protein
MGPVILKTPPEQRQTITRTLFDIIKEHGPITVANTWERVQEVGLKDLTSKNHMKIVLKWMRERQKIRLLCNHVGAHKQFLYTTWFTKPVTPPKNSS

SEQ ID NO: 8663 - DNA, 1073 bp, Glycine max
  misc_feature (1)..(1073): Ceres Seq. ID no. 13504447
ttatcaggtaggactgtgttattgaagagtagagaccgaatccgtatcgtagcaaaacgcacacgttagggggcggcgatgggagggtcatcggaggatttctcggtggtggtgctggcgtcggacctcggcgtcgatgcacgacccttcctcgaacacgaccaacagcaacaagaagaagagaattggcacgactgttcccagtacctctcccccgacgaggacttctccgatctcgatcagttgcaattcctccgcctccaaggctccgacaaaaactccaatcgcattctccgcatcgtcggcaagtactttcccgcaaccgttgtgagtgcggagcggctgaagaggtatgtgttccacaaaatttgcagtgagttgccagaggggccattttgtattgtttacatgcacagcaccgttcagaaggaggacaattcccctggcatcaccatcttgaggtggatctatgaagaacttcctgctgatttcaaggacaggcttcagactgtgtatttcgtccaccctggctttcggtcccggctagtcatcgctactcttggccgctttttcttgagtggaggattatattggaagatcaagtatgtaagccggcttcagtacctttgggatgacataaagaaaggagagattgagataccggattttgtgaaaagtcatgatgatattctggagaatagaccactcactgattatggcattgaacctgacccctttcacttgactgggatgccttcaactacctactcatttggaaagtacgaggagagatgggcgggaaggaattatgtgtcttagtatgtgtattgtcttattacatgatgaacccaaaccttttgtacagaatgactctagtattgtatttgtatttcctatactctcatctttgagtttctttgtttgtttagttaaacttgactgtgtacgaataggaggactacatgttttctatgccataagaaacttttatgtaagttgtatgctgtgtactgcacgattatcaccttcctgtgagcttttgaaataagaaacatgcagcttgtttttactgt

SEQ ID NO: 8664 - protein, 246 aa, Glycine max
  peptide (1)..(246): Ceres Seq. ID no. 15223285
  misc_feature (5)..(239): NCBI GI NO: 18398797 NR Description: expressed protein [Arabidopsis thaliana]
  misc_feature (5)..(239): NCBI GI NO: 21593697 NR Description: unknown [Arabidopsis thaliana]
  misc_feature (80)..(240): NCBI GI NO: 22830926 NR Description: P0466H10.24
  misc_feature (1)..(80): NCBI GI NO: 22830926 NR Description: P0466H10.24
  misc_feature (41)..(218): NCBI GI NO: 15237117 NR Description: expressed protein [Arabidopsis thaliana]
  misc_feature (41)..(218): NCBI GI NO: 21553817 NR Description: unknown [Arabidopsis thaliana]
  misc_feature (53)..(216): NCBI GI NO: 38345848 NR Description: OSJNBa0084K11.12
  misc_feature (30)..(218): NCBI GI NO: 8923143 NR Description: ganglioside induced differentiation associated protein 2
  misc_feature (30)..(218): NCBI GI NO: 22094097 NR Description: ganglioside-induced differentiation-associated- protein 2
  misc_feature (2)..(202): NCBI GI NO: 24586357 NR Description: CG18812-PA [Drosophila melanogaster]
MGGSSEDFSVVVLASDLGVDARPFLEHDQQQQEEENWHDCSQYLSPDEDFSDLDQLQFLRLQGSDKNSNRILRIVGKYFPATVVSAERLKRYVFHKICSELPEGPFCIVYMHSTVQKEDNSPGITILRWIYEELPADFKDRLQTVYFVHPGFRSRLVIATLGRFFLSGGLYWKIKYVSRLQYLWDDIKKGEIEIPDFVKSHDDILENRPLTDYGIEPDPFHLTGMPSTTYSFGKYEERWAGRNYVS

SEQ ID NO: 8665 - protein, 136 aa, Glycine max
  peptide (1)..(136): Ceres Seq. ID no. 15223286
  misc_feature (1)..(129): NCBI GI NO: 18398797 NR Description: expressed protein [Arabidopsis thaliana]
  misc_feature (1)..(129): NCBI GI NO: 21593697 NR Description: unknown [Arabidopsis thaliana]
  misc_feature (1)..(130): NCBI GI NO: 22830926 NR Description: P0466H10.24
  misc_feature (1)..(108): NCBI GI NO: 15237117 NR Description: expressed protein [Arabidopsis thaliana]
  misc_feature (1)..(108): NCBI GI NO: 21553817 NR Description: unknown [Arabidopsis thaliana]
  misc_feature (1)..(106): NCBI GI NO: 38345848 NR Description: OSJNBa0084K11.12
  misc_feature (1)..(108): NCBI GI NO: 8923143 NR Description: ganglioside induced differentiation associated protein 2
  misc_feature (1)..(108): NCBI GI NO: 22094097 NR Description: ganglioside-induced differentiation-associated- protein 2
  misc_feature (1)..(92): NCBI GI NO: 24586357 NR Description: CG18812-PA [Drosophila melanogaster]
  misc_feature (1)..(92): NCBI GI NO: 24586355 NR Description: CG18812-PB [Drosophila melanogaster]
MHSTVQKEDNSPGITILRWIYEELPADFKDRLQTVYFVHPGFRSRLVIATLGRFFLSGGLYWKIKYVSRLQYLWDDIKKGEIEIPDFVKSHDDILENRPLTDYGIEPDPFHLTGMPSTTYSFGKYEERWAGRNYVS

SEQ ID NO: 8666 - DNA, 804 bp, Glycine max
  misc_feature (1)..(804): Ceres Seq. ID no. 15173567
cttccaaactctttaatctctcttctttcttgaatcaaactaaattcctttgttcagagacaaagaacaacaacaacaactgtaaccatgcttgtctaccaagatcttcttacaggtgacgagcttctctctgactcattcccgtacaaggaaactgagaatggaatgctgtgggaagtggaaggaaagtgggttgttcaaggagcagtcaatgtagatattggtgctaacccttctgcagaaggtggggatgaggacgagggagttgatgatcaagctgtcaaagtagttgatattgttgacacttttaggcttcaggaacaaccaccctttgataagaaacaatttattacttatatgaagagatatattaagttgctgacggccaaattagagggtgagcagcaagagttgttcaagaagcacatcgagggagcaactaagtccctcctatcaaagctcaaagacctccaattttttgtgggggagagtatgcacgatgatggaagccttgtctttgcttactacaaggaaggtgctactgatccaacttttatctactttgcctatggattgaaggaaatcaagtgctgagcacatgcaatgcatgccccttagttatcttttatctgagttgaaaaattgtctttaattttagttcttgtgttttgggttttggttatgttattaggacttaggaggttgtttcaagagtttaatttgtatgcgtttttatgttggttggtatgagaggaacatgttatcgtataatagtaatttaaaagagtatcatgtgttttagtc

SEQ ID NO: 8667 - protein, 168 aa, Glycine max
  peptide (1)..(168): Ceres Seq. ID no. 15173568
  misc_feature (1)..(165): Pfam Name: Pfam Description:  Translationally controlled tumour protein
  misc_feature (1)..(168): NCBI GI NO: 9979196 NR Description: Translationally controlled tumor protein homolog
  misc_feature (1)..(168): NCBI GI NO: 549063 NR Description: Translationally controlled tumor protein homolog
  misc_feature (1)..(168): NCBI GI NO: 20140683 NR Description: Translationally controlled tumor protein homolog
  misc_feature (1)..(168): NCBI GI NO: 20140865 NR Description: Translationally controlled tumor protein homolog
  misc_feature (1)..(168): NCBI GI NO: 6094439 NR Description: TRANSLATIONALLY CONTROLLED TUMOR PROTEIN HOMOLOG
  misc_feature (1)..(168): NCBI GI NO: 2507442 NR Description: TRANSLATIONALLY CONTROLLED TUMOR PROTEIN HOMOLOG
  misc_feature (1)..(168): NCBI GI NO: 2507443 NR Description: Translationally controlled tumor protein homolog
  misc_feature (1)..(168): NCBI GI NO: 21070379 NR Description: translationally controlled tumor protein
  misc_feature (1)..(168): NCBI GI NO: 1174626 NR Description: TRANSLATIONALLY CONTROLLED TUMOR PROTEIN HOMOLOG
  misc_feature (1)..(168): NCBI GI NO: 20140866 NR Description: Translationally controlled tumor protein homolog
MLVYQDLLTGDELLSDSFPYKETENGMLWEVEGKWVVQGAVNVDIGANPSAEGGDEDEGVDDQAVKVVDIVDTFRLQEQPPFDKKQFITYMKRYIKLLTAKLEGEQQELFKKHIEGATKSLLSKLKDLQFFVGESMHDDGSLVFAYYKEGATDPTFIYFAYGLKEIKC

SEQ ID NO: 8668 - protein, 142 aa, Glycine max
  peptide (1)..(142): Ceres Seq. ID no. 15173569
  misc_feature (1)..(139): Pfam Name: Pfam Description:  Translationally controlled tumour protein
  misc_feature (1)..(142): NCBI GI NO: 9979196 NR Description: Translationally controlled tumor protein homolog
  misc_feature (1)..(142): NCBI GI NO: 549063 NR Description: Translationally controlled tumor protein homolog
  misc_feature (1)..(142): NCBI GI NO: 20140683 NR Description: Translationally controlled tumor protein homolog
  misc_feature (1)..(142): NCBI GI NO: 20140865 NR Description: Translationally controlled tumor protein homolog
  misc_feature (1)..(142): NCBI GI NO: 6094439 NR Description: TRANSLATIONALLY CONTROLLED TUMOR PROTEIN HOMOLOG
  misc_feature (1)..(142): NCBI GI NO: 2507442 NR Description: TRANSLATIONALLY CONTROLLED TUMOR PROTEIN HOMOLOG
  misc_feature (1)..(142): NCBI GI NO: 2507443 NR Description: Translationally controlled tumor protein homolog
  misc_feature (1)..(142): NCBI GI NO: 21070379 NR Description: translationally controlled tumor protein
  misc_feature (1)..(142): NCBI GI NO: 1174626 NR Description: TRANSLATIONALLY CONTROLLED TUMOR PROTEIN HOMOLOG
  misc_feature (1)..(142): NCBI GI NO: 20140866 NR Description: Translationally controlled tumor protein homolog
MLWEVEGKWVVQGAVNVDIGANPSAEGGDEDEGVDDQAVKVVDIVDTFRLQEQPPFDKKQFITYMKRYIKLLTAKLEGEQQELFKKHIEGATKSLLSKLKDLQFFVGESMHDDGSLVFAYYKEGATDPTFIYFAYGLKEIKC

SEQ ID NO: 8669 - DNA, 1036 bp, Glycine max
  misc_feature (1)..(1036): Ceres Seq. ID no. 15175072
ctctctctttctcaaaggtcctgtgtcagggactctgaagagagagatcacaaacatcaagtacttactacttagcacaaaattcacacaactcgtgccggggttcagaaagactgaaactttctcctttaaaacttgctgggtattaatgatctttgcctccctgagtcattacatgaagattctcaacttgggtgttcaaaatgttggttactgaggacaagtctcatgttgctgttgctatagacaatgatggctgttgtcaccggagctctgccggcggtgaggggtgctccgacgctagcgaccggacagataaggagcaaaggaggtcctcccatgtttctggcactgagattgtgggagtgtgtgaggagagaggatcagagtgttcagtggaggtggatctggttcctgaggttaaggtgcatttggccaatgaggagagggattgtaggatttgccatctcagcatggatatgaccaaccatgaatctgggactcccattgagttgggatgttcttgcaaggatgatttggctgctgctcacaagcagtgtgccgaggcttggttcaagatcaagggaaacaaaacttgtgaaatctgtggatcagttgcacgcaatgtagccggagctattgaaattcaaatgacagaacagtggaatgaggcaaatgatgcttccacggcaccatcatctggaccggcaccacttgcagaaactcaaaatttctggcagggtcaccgttttttgaattttctgctagcctgtatggtgtttgcctttgtcatatcctggctttttcactttaatgtgccctcttgaattcccgtgtaacttgaggatgaagcaggttaagatgatggggggttaatgggttattagaccaatctatggctcttaacgcaggtatcaaactcaatacctgtgcctgcttagttagttggttgggatctgtgtatttctttccatatgatatgatgttcacagtgtatttgtatttgttgtattatatggttgttcttattttgctc

SEQ ID NO: 8670 - protein, 207 aa, Glycine max
  peptide (1)..(207): Ceres Seq. ID no. 15175073
  misc_feature (84)..(135): Pfam Name: RING finger Pfam Description: Zinc finger, C3HC4 type
  misc_feature (38)..(207): NCBI GI NO: 15239254 NR Description: zinc finger
  misc_feature (61)..(206): NCBI GI NO: 34908318 NR Description: P0529H11.12
  misc_feature (78)..(207): NCBI GI NO: 15224415 NR Description: zinc finger
  misc_feature (82)..(205): NCBI GI NO: 9759231 NR Description: gb|AAD32776
  misc_feature (99)..(205): NCBI GI NO: 15237796 NR Description: zinc finger
  misc_feature (99)..(205): NCBI GI NO: 21537129 NR Description: unknown [Arabidopsis thaliana]
  misc_feature (4)..(159): NCBI GI NO: 29725746 NR Description: hypothetical protein [Arabidopsis thaliana]
  misc_feature (81)..(130): NCBI GI NO: 15240886 NR Description: zinc finger
  misc_feature (23)..(154): NCBI GI NO: 18406816 NR Description: zinc finger
  misc_feature (35)..(154): NCBI GI NO: 21593046 NR Description: unknown [Arabidopsis thaliana]
MLVTEDKSHVAVAIDNDGCCHRSSAGGEGCSDASDRTDKEQRRSSHVSGTEIVGVCEERGSECSVEVDLVPEVKVHLANEERDCRICHLSMDMTNHESGTPIELGCSCKDDLAAAHKQCAEAWFKIKGNKTCEICGSVARNVAGAIEIQMTEQWNEANDASTAPSSGPAPLAETQNFWQGHRFLNFLLACMVFAFVISWLFHFNVPS

SEQ ID NO: 8671 - protein, 117 aa, Glycine max
  peptide (1)..(117): Ceres Seq. ID no. 15175074
  misc_feature (1)..(45): Pfam Name: RING finger Pfam Description: Zinc finger, C3HC4 type
  misc_feature (1)..(117): NCBI GI NO: 15239254 NR Description: zinc finger
  misc_feature (1)..(116): NCBI GI NO: 34908318 NR Description: P0529H11.12
  misc_feature (1)..(117): NCBI GI NO: 15224415 NR Description: zinc finger
  misc_feature (1)..(115): NCBI GI NO: 9759231 NR Description: gb|AAD32776
  misc_feature (9)..(115): NCBI GI NO: 15237796 NR Description: zinc finger
  misc_feature (9)..(115): NCBI GI NO: 21537129 NR Description: unknown [Arabidopsis thaliana]
  misc_feature (1)..(69): NCBI GI NO: 29725746 NR Description: hypothetical protein [Arabidopsis thaliana]
  misc_feature (1)..(40): NCBI GI NO: 15240886 NR Description: zinc finger
  misc_feature (1)..(64): NCBI GI NO: 18406816 NR Description: zinc finger
  misc_feature (1)..(64): NCBI GI NO: 21593046 NR Description: unknown [Arabidopsis thaliana]
MDMTNHESGTPIELGCSCKDDLAAAHKQCAEAWFKIKGNKTCEICGSVARNVAGAIEIQMTEQWNEANDASTAPSSGPAPLAETQNFWQGHRFLNFLLACMVFAFVISWLFHFNVPS

SEQ ID NO: 8672 - protein, 115 aa, Glycine max
  peptide (1)..(115): Ceres Seq. ID no. 15175075
  misc_feature (1)..(43): Pfam Name: RING finger Pfam Description: Zinc finger, C3HC4 type
  misc_feature (1)..(115): NCBI GI NO: 15239254 NR Description: zinc finger
  misc_feature (1)..(114): NCBI GI NO: 34908318 NR Description: P0529H11.12
  misc_feature (1)..(115): NCBI GI NO: 15224415 NR Description: zinc finger
  misc_feature (1)..(113): NCBI GI NO: 9759231 NR Description: gb|AAD32776
  misc_feature (7)..(113): NCBI GI NO: 15237796 NR Description: zinc finger
  misc_feature (7)..(113): NCBI GI NO: 21537129 NR Description: unknown [Arabidopsis thaliana]
  misc_feature (1)..(67): NCBI GI NO: 29725746 NR Description: hypothetical protein [Arabidopsis thaliana]
  misc_feature (1)..(38): NCBI GI NO: 15240886 NR Description: zinc finger
  misc_feature (1)..(62): NCBI GI NO: 18406816 NR Description: zinc finger
  misc_feature (1)..(62): NCBI GI NO: 21593046 NR Description: unknown [Arabidopsis thaliana]
MTNHESGTPIELGCSCKDDLAAAHKQCAEAWFKIKGNKTCEICGSVARNVAGAIEIQMTEQWNEANDASTAPSSGPAPLAETQNFWQGHRFLNFLLACMVFAFVISWLFHFNVPS

SEQ ID NO: 8673 - DNA, 649 bp, Glycine max
  misc_feature (1)..(649): Ceres Seq. ID no. 13532783
gtttatattgtgtgctagttctttgaagaataagcagtgccacaagttcacacaccccataccacctgccaatttcagaagaattcctgacccaaccacagcacaactagagagagtgagagggatggaggcgtttccaagagaccaacgaggttcgctcgaagtgttcaacccttcttcttcttactccaccgagaagtcggtgaactcgcctgtgcgtgttcaatccacgtggaagacgtggattgacgagttaccggaacaacaacaacaacaacaatgtggtggtactaacgaggtgaccgccacgtcatggatggcgcttaaggactccgctcctccaccgccgacgctcgccgcagtgctgggcgagtctctgtcagcggcggtgggggaggttggcaacgccgcgaagcgcgcggcggagtggggcctggtgctgaagacggacacggagaccgggaagccgcagggagtgaaggttcggacctccggcggggaggagctgggctttgtcccaaacatctttattttttcattcttctgagtcgcatgagtaacctgtacgttgacttaaggacaagttactccttcctttgaattcgatgtttcttaactgtgaaagtagaatatcgaagtcttgtgtgtt

SEQ ID NO: 8674 - protein, 181 aa, Glycine max
  peptide (1)..(181): Ceres Seq. ID no. 13532784
  misc_feature (42)..(166): NCBI GI NO: 34224025 NR Description: phototropin-like protein [Pisum sativum]
  misc_feature (42)..(166): NCBI GI NO: 24899168 NR Description: phototropin [Vicia faba]
  misc_feature (46)..(168): NCBI GI NO: 15231245 NR Description: nonphototropic hypocotyl 1 [Arabidopsis thaliana]
  misc_feature (86)..(166): NCBI GI NO: 7489362 NR Description: serine/threonine protein kinase (EC 2
  misc_feature (31)..(176): NCBI GI NO: 12040650 NR Description: phototropin-like protein PsPK4 [Pisum sativum]
  misc_feature (31)..(176): NCBI GI NO: 20338415 NR Description: phototropin 1 [Pisum sativum]
  misc_feature (131)..(168): NCBI GI NO: 24899170 NR Description: phototropin [Vicia faba]
FILCASSLKNKQCHKFTHPIPPANFRRIPDPTTAQLERVRGMEAFPRDQRGSLEVFNPSSSYSTEKSVNSPVRVQSTWKTWIDELPEQQQQQQCGGTNEVTATSWMALKDSAPPPPTLAAVLGESLSAAVGEVGNAAKRAAEWGLVLKTDTETGKPQGVKVRTSGGEELGFVPNIFIFSFF

SEQ ID NO: 8675 - protein, 140 aa, Glycine max
  peptide (1)..(140): Ceres Seq. ID no. 13532785
  misc_feature (1)..(125): NCBI GI NO: 34224025 NR Description: phototropin-like protein [Pisum sativum]
  misc_feature (1)..(125): NCBI GI NO: 24899168 NR Description: phototropin [Vicia faba]
  misc_feature (5)..(127): NCBI GI NO: 15231245 NR Description: nonphototropic hypocotyl 1 [Arabidopsis thaliana]
  misc_feature (45)..(125): NCBI GI NO: 7489362 NR Description: serine/threonine protein kinase (EC 2
  misc_feature (1)..(135): NCBI GI NO: 12040650 NR Description: phototropin-like protein PsPK4 [Pisum sativum]
  misc_feature (1)..(135): NCBI GI NO: 20338415 NR Description: phototropin 1 [Pisum sativum]
  misc_feature (90)..(127): NCBI GI NO: 24899170 NR Description: phototropin [Vicia faba]
MEAFPRDQRGSLEVFNPSSSYSTEKSVNSPVRVQSTWKTWIDELPEQQQQQQCGGTNEVTATSWMALKDSAPPPPTLAAVLGESLSAAVGEVGNAAKRAAEWGLVLKTDTETGKPQGVKVRTSGGEELGFVPNIFIFSFF

SEQ ID NO: 8676 - DNA, 1412 bp, Glycine max
  misc_feature (1)..(1412): Ceres Seq. ID no. 14315430
atcccttcttttcaaaaccctaattcctcttttctctcttccaatctcatttctcaagatcgctttcgctgcttcctcaggaattatgtcttttgtgcggaattatcaagcagaagatcgtagtttacatagtggttactggtccacctttgatggaaacaactatggtaacaacaataggaaaagaagcaggaacaattattataacaggaattgtaacatttacaatgataaccggacaaaatttggggaccattttaatttttacaatgctgatcatgctaattatgctagatatgatgctgttcgatcatctttgaaaaggagaaaatattcagcccctgtttggcaagaaagccagcagtactatgttccacccatggtccatgacaatatcccttcagcctataatttccaaggtcctccgacaagatctgatggtgatgcctctacatcagctagctgcaagcgtgattgctctatttttgaagatgataaacctgtcttcatgtcaagggacgaaattgatagacactctccatcaagaaaagatggtattgatgtacatcatgagacacacttgcggtactcctattgtgccttccttcagaatcttggaatgcgtcttgagctgcctcaaaacatcattgggacagctatggttctgtgccaccgtttctttgttcgacgatcacatgcttgccatgatagatttttgattgctactgctgctctttttcttactgcaaagtcagaggaagctccacgtcatttgaataacgtattgagaacatccagtgaaattttatataaacaagattttgctttgttatcctaccggtttcctgttgattggtttgaacagtatcgggagcgggtgcttgaggctgaacaactgatacttactactctaaattttgaactcaatgtgcaacatccatatgtacctcttacatctgttcttaacaagttgggtctatcaaagactgttttggtgaatctggcattaaacttggtcagtgaagggcttcggagttctctgtggcttcaatttaaaccccatcatattgctgctggagctgcatatcttgctgccaagtttctgaacatggatctcgcagcttatcagaacatctggcaagagttccagacaacaccatccatacttcaagatgtctcgcagcaattaatggagctcttttaaaagtatggaagaactggattacagcgttcttcttagtagagtaggttttgagtatataattcaaaatgttatttactttggagggagacattaggaactatgacatatttggtgagttacaggattagtggttgtgtgacctacggatttttaagttttaccaacttctctgaatcttctgctaacatgtcgagcatgccttgcgttc

SEQ ID NO: 8677 - protein, 400 aa, Glycine max
  peptide (1)..(400): Ceres Seq. ID no. 14315431
  misc_feature (169)..(309): Pfam Name: Pfam Description:  Cyclin, N-terminal domain
  misc_feature (145)..(400): NCBI GI NO: 30684822 NR Description: cyclin family [Arabidopsis thaliana]
  misc_feature (169)..(400): NCBI GI NO: 30694715 NR Description: cyclin family [Arabidopsis thaliana]
  misc_feature (169)..(400): NCBI GI NO: 9759604 NR Description: contains similarity to cyclin~gene_id:K18C1.7
  misc_feature (157)..(399): NCBI GI NO: 15217663 NR Description: cyclin family [Arabidopsis thaliana]
  misc_feature (157)..(399): NCBI GI NO: 21618277 NR Description: putative cyclin [Arabidopsis thaliana]
  misc_feature (145)..(400): NCBI GI NO: 7486085 NR Description: hypothetical protein F24J7
  misc_feature (145)..(392): NCBI GI NO: 15235087 NR Description: cyclin family [Arabidopsis thaliana]
  misc_feature (164)..(400): NCBI GI NO: 15219592 NR Description: cyclin family [Arabidopsis thaliana]
  misc_feature (220)..(399): NCBI GI NO: 6693016 NR Description: T22C5.8 [Arabidopsis thaliana]
  misc_feature (179)..(400): NCBI GI NO: 26374818 NR Description: unnamed protein product [Mus musculus]
SLLFKTLIPLFSLPISFLKIAFAASSGIMSFVRNYQAEDRSLHSGYWSTFDGNNYGNNNRKRSRNNYYNRNCNIYNDNRTKFGDHFNFYNADHANYARYDAVRSSLKRRKYSAPVWQESQQYYVPPMVHDNIPSAYNFQGPPTRSDGDASTSASCKRDCSIFEDDKPVFMSRDEIDRHSPSRKDGIDVHHETHLRYSYCAFLQNLGMRLELPQNIIGTAMVLCHRFFVRRSHACHDRFLIATAALFLTAKSEEAPRHLNNVLRTSSEILYKQDFALLSYRFPVDWFEQYRERVLEAEQLILTTLNFELNVQHPYVPLTSVLNKLGLSKTVLVNLALNLVSEGLRSSLWLQFKPHHIAAGAAYLAAKFLNMDLAAYQNIWQEFQTTPSILQDVSQQLMELF

SEQ ID NO: 8678 - protein, 372 aa, Glycine max
  peptide (1)..(372): Ceres Seq. ID no. 14315432
  misc_feature (141)..(281): Pfam Name: Pfam Description:  Cyclin, N-terminal domain
  misc_feature (117)..(372): NCBI GI NO: 30684822 NR Description: cyclin family [Arabidopsis thaliana]
  misc_feature (141)..(372): NCBI GI NO: 30694715 NR Description: cyclin family [Arabidopsis thaliana]
  misc_feature (141)..(372): NCBI GI NO: 9759604 NR Description: contains similarity to cyclin~gene_id:K18C1.7
  misc_feature (129)..(371): NCBI GI NO: 15217663 NR Description: cyclin family [Arabidopsis thaliana]
  misc_feature (129)..(371): NCBI GI NO: 21618277 NR Description: putative cyclin [Arabidopsis thaliana]
  misc_feature (117)..(372): NCBI GI NO: 7486085 NR Description: hypothetical protein F24J7
  misc_feature (117)..(364): NCBI GI NO: 15235087 NR Description: cyclin family [Arabidopsis thaliana]
  misc_feature (136)..(372): NCBI GI NO: 15219592 NR Description: cyclin family [Arabidopsis thaliana]
  misc_feature (192)..(371): NCBI GI NO: 6693016 NR Description: T22C5.8 [Arabidopsis thaliana]
  misc_feature (151)..(372): NCBI GI NO: 26374818 NR Description: unnamed protein product [Mus musculus]
MSFVRNYQAEDRSLHSGYWSTFDGNNYGNNNRKRSRNNYYNRNCNIYNDNRTKFGDHFNFYNADHANYARYDAVRSSLKRRKYSAPVWQESQQYYVPPMVHDNIPSAYNFQGPPTRSDGDASTSASCKRDCSIFEDDKPVFMSRDEIDRHSPSRKDGIDVHHETHLRYSYCAFLQNLGMRLELPQNIIGTAMVLCHRFFVRRSHACHDRFLIATAALFLTAKSEEAPRHLNNVLRTSSEILYKQDFALLSYRFPVDWFEQYRERVLEAEQLILTTLNFELNVQHPYVPLTSVLNKLGLSKTVLVNLALNLVSEGLRSSLWLQFKPHHIAAGAAYLAAKFLNMDLAAYQNIWQEFQTTPSILQDVSQQLMELF

SEQ ID NO: 8679 - protein, 274 aa, Glycine max
  peptide (1)..(274): Ceres Seq. ID no. 14315433
  misc_feature (43)..(183): Pfam Name: Pfam Description:  Cyclin, N-terminal domain
  misc_feature (19)..(274): NCBI GI NO: 30684822 NR Description: cyclin family [Arabidopsis thaliana]
  misc_feature (43)..(274): NCBI GI NO: 30694715 NR Description: cyclin family [Arabidopsis thaliana]
  misc_feature (43)..(274): NCBI GI NO: 9759604 NR Description: contains similarity to cyclin~gene_id:K18C1.7
  misc_feature (31)..(273): NCBI GI NO: 15217663 NR Description: cyclin family [Arabidopsis thaliana]
  misc_feature (31)..(273): NCBI GI NO: 21618277 NR Description: putative cyclin [Arabidopsis thaliana]
  misc_feature (19)..(274): NCBI GI NO: 7486085 NR Description: hypothetical protein F24J7
  misc_feature (19)..(266): NCBI GI NO: 15235087 NR Description: cyclin family [Arabidopsis thaliana]
  misc_feature (38)..(274): NCBI GI NO: 15219592 NR Description: cyclin family [Arabidopsis thaliana]
  misc_feature (94)..(273): NCBI GI NO: 6693016 NR Description: T22C5.8 [Arabidopsis thaliana]
  misc_feature (53)..(274): NCBI GI NO: 26374818 NR Description: unnamed protein product [Mus musculus]
MVHDNIPSAYNFQGPPTRSDGDASTSASCKRDCSIFEDDKPVFMSRDEIDRHSPSRKDGIDVHHETHLRYSYCAFLQNLGMRLELPQNIIGTAMVLCHRFFVRRSHACHDRFLIATAALFLTAKSEEAPRHLNNVLRTSSEILYKQDFALLSYRFPVDWFEQYRERVLEAEQLILTTLNFELNVQHPYVPLTSVLNKLGLSKTVLVNLALNLVSEGLRSSLWLQFKPHHIAAGAAYLAAKFLNMDLAAYQNIWQEFQTTPSILQDVSQQLMELF

SEQ ID NO: 8680 - DNA, 1108 bp, Glycine max
  misc_feature (1)..(1108): Ceres Seq. ID no. 14316300
attcggcctccagccctttaaaccccacaaaaccctagacttcgcagcgagcagccgtcgtccgatccccacagaaacaccaaagcccgagccatgtcgtcggcgtccctcgccgccaggctcctccgccgcgccgcctcttcgtcgcgggcctccaccctatcccgacgctgcgcccactcctccgcgacgtcccgcgcgcccgtttcgcttgcccgtttccaccccgccgccgcctccccttcagggaccactgcccgccgcttcctgtcgtcgcagtccccggcgtcttcctccaagatctccccggacgagaacctgaggcgggtcatcgactccgagatcgagtgcgtcgtcgaatcggaggagggctccgcgcagcaaattgatccaccagaagacttcccctttgagataattgataaccctggtgatcagtccatcgttctcaaaagagagcttgcaggagagactattaaagctactgtctacacaaattttgatactgaggaagatttgaacaatgaggactctggtgctgagaatgatgatgactcatttaagccagcacttcagatggttgtcactgttgagaaaccaggaggctcaatcctggaatttgagtgcaactttaatgatgatgaactggcaattgaaaatatgaggttgctgaatcgcgatgccaagtttactgagaatgcatatgaggggccacaattctctgatctggacgagagcttgcagaagtcctttcacaggtatcttgaggtgagggggatcaagcactcgctgcatgactggctgcacgagtacatgatgagcaaggatgagaaggagtacgtggtttggttgaagaacatgagagagttcatcgagaaatgagtgccactgcccgtcattctcttttaatagaaagaacatgcctggtgctctatgtcaaacctgtctgatcataattgtgccttgctttctggcacaccaagtctcggtggacgctgagctggatttatattttgctggacctgtttagctgtagaaaagtttcggcatcttatctttcgatgtttaacctgtgatccgttcagatatgatcagttcatgtattttc

SEQ ID NO: 8681 - protein, 262 aa, Glycine max
  peptide (1)..(262): Ceres Seq. ID no. 14316301
  misc_feature (80)..(260): Pfam Name: Pfam Description:  Mitochondrial glycoprotein
  misc_feature (10)..(262): NCBI GI NO: 15241669 NR Description: expressed protein [Arabidopsis thaliana]
  misc_feature (10)..(262): NCBI GI NO: 21592321 NR Description: unknown [Arabidopsis thaliana]
  misc_feature (1)..(262): NCBI GI NO: 11357566 NR Description: hypothetical protein F1I16
  misc_feature (20)..(262): NCBI GI NO: 18410318 NR Description: expressed protein [Arabidopsis thaliana]
  misc_feature (5)..(262): NCBI GI NO: 18405164 NR Description: expressed protein [Arabidopsis thaliana]
  misc_feature (5)..(262): NCBI GI NO: 21593469 NR Description: unknown [Arabidopsis thaliana]
  misc_feature (13)..(262): NCBI GI NO: 7487698 NR Description: hypothetical protein At2g39790
  misc_feature (8)..(261): NCBI GI NO: 15239320 NR Description: expressed protein [Arabidopsis thaliana]
  misc_feature (12)..(260): NCBI GI NO: 34895730 NR Description: P0019D06.23
  misc_feature (1)..(262): NCBI GI NO: 34895742 NR Description: P0019D06.29
MSSASLAARLLRRAASSSRASTLSRRCAHSSATSRAPVSLARFHPAAASPSGTTARRFLSSQSPASSSKISPDENLRRVIDSEIECVVESEEGSAQQIDPPEDFPFEIIDNPGDQSIVLKRELAGETIKATVYTNFDTEEDLNNEDSGAENDDDSFKPALQMVVTVEKPGGSILEFECNFNDDELAIENMRLLNRDAKFTENAYEGPQFSDLDESLQKSFHRYLEVRGIKHSLHDWLHEYMMSKDEKEYVVWLKNMREFIEK

SEQ ID NO: 8682 - DNA, 1292 bp, Glycine max
  misc_feature (1)..(1292): Ceres Seq. ID no. 14316091
aaaaaaaacacaacacaacgagtagatccagaaagagcgttgaaacattgaaccttttgaatgagttggacggtttcgcagaaattgacgtttgaattgtagtcgcacgcacgtttcatcatcctctcgcaatcgccaatactccgatccccaaccagagaaaacctaagcgaacaacaacatgagtgctgacgccccaccccaaacccaagccaccaacaccaaaccggaagaatctcaatctcaatctcagtctcagcctcagcgtcactccggcgattatgctccataccctaaactggaccccaccgatgttgcgccaccacaacaaccactgaacactgaatctcgcgctcccatttccgaagatgctgccactactatgcccaaagactccaatccctatgtcactcctgctcccgtcactgcttcttctactaagactactttagattcggtgaaagacgttctcgggaaatgggggaagaaagccgccgaggccaccaagaaggccgaggatctcgccggcaacatgtggcagcacttgaaaacgggaccgagttttgctgatgctgccgtggggaggattgctcagggaactaaggttcttgcagaaggagggtatgaaaagatctttaggcaaacatttgagacagttccggaggagcagcttctcaaaacttatgcatgctacttgtctacctcggctggacctgtgatgggagtcttatatttgtcaacggctaagctggcattttgtagtgataacccactttcttaccaagtgggtgaccagactcaatggagctattataaggtggtcattccattgcaccagctgagagctgtaaacgcatccacaagcaaaaccaaccaatctgaaaaatatatacagattatctctgttgacaaccatgaattttggtttatgggctttgtgcactatgacagcgctgttaaaaatattcaaggagcattgcagcctcattgacaaacaagggattgaaaagcaccatgtattgtttataccagagatgaggtttgtgttgataaattatccatccatcaaagaaacatttatatgtttatctttacgtggttagttcgctagtctagtttgtggagctgttattattgtattaaaattgaaactcattcagtgttcacatgatatatttgctttaccttgttgctttctgaaagcgagagtcaattgatttgttgtaagttgaattgatatatagacggtggatttacatttaaatctattaaaatatcttttttttttgtat

SEQ ID NO: 8683 - protein, 269 aa, Glycine max
  peptide (1)..(269): Ceres Seq. ID no. 14316092
  misc_feature (150)..(226): Pfam Name: Pfam Description:  GRAM domain
  misc_feature (19)..(269): NCBI GI NO: 15217869 NR Description: GRAM domain-containing protein
  misc_feature (31)..(267): NCBI GI NO: 34902414 NR Description: Putative FH protein interacting protein FIP1
  misc_feature (56)..(267): NCBI GI NO: 18399985 NR Description: GRAM domain-containing protein
  misc_feature (56)..(267): NCBI GI NO: 21592789 NR Description: unknown [Arabidopsis thaliana]
  misc_feature (56)..(267): NCBI GI NO: 26452129 NR Description: unknown protein [Arabidopsis thaliana]
  misc_feature (47)..(267): NCBI GI NO: 29788871 NR Description: putative ABA-responsive protein
  misc_feature (52)..(197): NCBI GI NO: 15236123 NR Description: GRAM domain-containing protein
  misc_feature (213)..(267): NCBI GI NO: 15236123 NR Description: GRAM domain-containing protein
  misc_feature (91)..(267): NCBI GI NO: 34906818 NR Description: contains EST C91668
  misc_feature (2)..(262): NCBI GI NO: 15240044 NR Description: GRAM domain-containing protein
MSADAPPQTQATNTKPEESQSQSQSQPQRHSGDYAPYPKLDPTDVAPPQQPLNTESRAPISEDAATTMPKDSNPYVTPAPVTASSTKTTLDSVKDVLGKWGKKAAEATKKAEDLAGNMWQHLKTGPSFADAAVGRIAQGTKVLAEGGYEKIFRQTFETVPEEQLLKTYACYLSTSAGPVMGVLYLSTAKLAFCSDNPLSYQVGDQTQWSYYKVVIPLHQLRAVNASTSKTNQSEKYIQIISVDNHEFWFMGFVHYDSAVKNIQGALQPH

SEQ ID NO: 8684 - protein, 202 aa, Glycine max
  peptide (1)..(202): Ceres Seq. ID no. 14316093
  misc_feature (83)..(159): Pfam Name: Pfam Description:  GRAM domain
  misc_feature (1)..(202): NCBI GI NO: 15217869 NR Description: GRAM domain-containing protein
  misc_feature (1)..(200): NCBI GI NO: 34902414 NR Description: Putative FH protein interacting protein FIP1
  misc_feature (1)..(200): NCBI GI NO: 18399985 NR Description: GRAM domain-containing protein
  misc_feature (1)..(200): NCBI GI NO: 21592789 NR Description: unknown [Arabidopsis thaliana]
  misc_feature (1)..(200): NCBI GI NO: 26452129 NR Description: unknown protein [Arabidopsis thaliana]
  misc_feature (1)..(200): NCBI GI NO: 29788871 NR Description: putative ABA-responsive protein
  misc_feature (1)..(130): NCBI GI NO: 15236123 NR Description: GRAM domain-containing protein
  misc_feature (146)..(200): NCBI GI NO: 15236123 NR Description: GRAM domain-containing protein
  misc_feature (24)..(200): NCBI GI NO: 34906818 NR Description: contains EST C91668
  misc_feature (1)..(195): NCBI GI NO: 15240044 NR Description: GRAM domain-containing protein
MPKDSNPYVTPAPVTASSTKTTLDSVKDVLGKWGKKAAEATKKAEDLAGNMWQHLKTGPSFADAAVGRIAQGTKVLAEGGYEKIFRQTFETVPEEQLLKTYACYLSTSAGPVMGVLYLSTAKLAFCSDNPLSYQVGDQTQWSYYKVVIPLHQLRAVNASTSKTNQSEKYIQIISVDNHEFWFMGFVHYDSAVKNIQGALQPH

SEQ ID NO: 8685 - protein, 152 aa, Glycine max
  peptide (1)..(152): Ceres Seq. ID no. 14316094
  misc_feature (33)..(109): Pfam Name: Pfam Description:  GRAM domain
  misc_feature (1)..(152): NCBI GI NO: 15217869 NR Description: GRAM domain-containing protein
  misc_feature (1)..(150): NCBI GI NO: 34902414 NR Description: Putative FH protein interacting protein FIP1
  misc_feature (1)..(150): NCBI GI NO: 18399985 NR Description: GRAM domain-containing protein
  misc_feature (1)..(150): NCBI GI NO: 21592789 NR Description: unknown [Arabidopsis thaliana]
  misc_feature (1)..(150): NCBI GI NO: 26452129 NR Description: unknown protein [Arabidopsis thaliana]
  misc_feature (1)..(150): NCBI GI NO: 29788871 NR Description: putative ABA-responsive protein
  misc_feature (1)..(80): NCBI GI NO: 15236123 NR Description: GRAM domain-containing protein
  misc_feature (96)..(150): NCBI GI NO: 15236123 NR Description: GRAM domain-containing protein
  misc_feature (1)..(150): NCBI GI NO: 34906818 NR Description: contains EST C91668
  misc_feature (1)..(145): NCBI GI NO: 15240044 NR Description: GRAM domain-containing protein
MWQHLKTGPSFADAAVGRIAQGTKVLAEGGYEKIFRQTFETVPEEQLLKTYACYLSTSAGPVMGVLYLSTAKLAFCSDNPLSYQVGDQTQWSYYKVVIPLHQLRAVNASTSKTNQSEKYIQIISVDNHEFWFMGFVHYDSAVKNIQGALQPH

SEQ ID NO: 8686 - DNA, 985 bp, Glycine max
  misc_feature (1)..(985): Ceres Seq. ID no. 14316367
tttttctttcgctcttcttccattccacactaaaaagtaacagtttcggagggaaacacaatacaacacaaaaagccccccccacaaagcaaatcacctttttttcctttcaaaatgttcgccgaagagaatggcctcaagggagaccccagactccaagccatttcccaagccatcagagtcgtccctcacttccccaaacatggaataatgttccaagacataacgacattgctgttggatcacaaggcgtttaaagacaccgtcgacatttttgtcgatcgttacagagacatgcacatttccgtagttgctggaattgaggcaagggggttcatgtttggtccctcaattgcgttgggcattggtgcaaagtttgttcctttacgcaaaccacggaagctgccaggtgaagtaatttcagaaaaatatgctctagaatatggaactgattgcttggagttgcatgttggtgctgcccagcccggtgaacgggccataataattgatgacttggtggccacaggtggaactctgtcagcaggagtaaaacttctagaacgtgttggggctgaagtggtggaatgtgcttgtgtcattggtgtgcctgatgtcaaggggcagtgcaggagtattggaaagccactttatgttcttgttgagccacgtaaagcagataaatgtcaagctcaagcagataaatgttactgagatgtgatgttggttcgatcttgaactgacatacaaaaaggacgcttagtgtgagaaacacaggccataatgtgatccttaagttttcggctgatggagagttgtgttcatggcaattgccaaatatcatcctgggaaatgttcccccttttcatatctttttatctttgtacatgttagccatcatgttatgtggccagcagtttagaacaataacaatcattaaagaagggatggattttatggcattttataaaatgtcaatttaaggtcc

SEQ ID NO: 8687 - protein, 198 aa, Glycine max
  peptide (1)..(198): Ceres Seq. ID no. 14316368
  misc_feature (1)..(189): NCBI GI NO: 15238973 NR Description: adenine phosphoribosyltransferase - like protein
  misc_feature (1)..(189): NCBI GI NO: 15220047 NR Description: adenine phosphoribosyltransferase
  misc_feature (1)..(189): NCBI GI NO: 1402894 NR Description: adenine phosphoribosyltransferase
  misc_feature (4)..(186): NCBI GI NO: 29826070 NR Description: adenine phosphoribosyltransferase form 2
  misc_feature (3)..(183): NCBI GI NO: 33354190 NR Description: putative adenine phosphoribosyl transferase
  misc_feature (5)..(185): NCBI GI NO: 15234553 NR Description: adenine phosphoribosyltransferase -related
  misc_feature (11)..(186): NCBI GI NO: 40019121 NR Description: adenine phosphoribosyltransferase [Zea mays]
  misc_feature (11)..(185): NCBI GI NO: 15235709 NR Description: adenine phosphoribosyltransferase (EC 2
  misc_feature (11)..(185): NCBI GI NO: 21536749 NR Description: adenine phosphoribosyltransferase (EC 2
  misc_feature (3)..(182): NCBI GI NO: 32492063 NR Description: adenine phosphoribosyltransferase [Brassica napus]
MFAEENGLKGDPRLQAISQAIRVVPHFPKHGIMFQDITTLLLDHKAFKDTVDIFVDRYRDMHISVVAGIEARGFMFGPSIALGIGAKFVPLRKPRKLPGEVISEKYALEYGTDCLELHVGAAQPGERAIIIDDLVATGGTLSAGVKLLERVGAEVVECACVIGVPDVKGQCRSIGKPLYVLVEPRKADKCQAQADKCY

SEQ ID NO: 8688 - protein, 166 aa, Glycine max
  peptide (1)..(166): Ceres Seq. ID no. 14316369
  misc_feature (1)..(157): NCBI GI NO: 15238973 NR Description: adenine phosphoribosyltransferase - like protein
  misc_feature (1)..(157): NCBI GI NO: 15220047 NR Description: adenine phosphoribosyltransferase
  misc_feature (1)..(157): NCBI GI NO: 1402894 NR Description: adenine phosphoribosyltransferase
  misc_feature (1)..(154): NCBI GI NO: 29826070 NR Description: adenine phosphoribosyltransferase form 2
  misc_feature (1)..(151): NCBI GI NO: 33354190 NR Description: putative adenine phosphoribosyl transferase
  misc_feature (1)..(153): NCBI GI NO: 15234553 NR Description: adenine phosphoribosyltransferase -related
  misc_feature (1)..(154): NCBI GI NO: 40019121 NR Description: adenine phosphoribosyltransferase [Zea mays]
  misc_feature (1)..(153): NCBI GI NO: 15235709 NR Description: adenine phosphoribosyltransferase (EC 2
  misc_feature (1)..(153): NCBI GI NO: 21536749 NR Description: adenine phosphoribosyltransferase (EC 2
  misc_feature (1)..(150): NCBI GI NO: 32492063 NR Description: adenine phosphoribosyltransferase [Brassica napus]
MFQDITTLLLDHKAFKDTVDIFVDRYRDMHISVVAGIEARGFMFGPSIALGIGAKFVPLRKPRKLPGEVISEKYALEYGTDCLELHVGAAQPGERAIIIDDLVATGGTLSAGVKLLERVGAEVVECACVIGVPDVKGQCRSIGKPLYVLVEPRKADKCQAQADKCY

SEQ ID NO: 8689 - protein, 138 aa, Glycine max
  peptide (1)..(138): Ceres Seq. ID no. 14316370
  misc_feature (1)..(129): NCBI GI NO: 15238973 NR Description: adenine phosphoribosyltransferase - like protein
  misc_feature (1)..(129): NCBI GI NO: 15220047 NR Description: adenine phosphoribosyltransferase
  misc_feature (1)..(129): NCBI GI NO: 1402894 NR Description: adenine phosphoribosyltransferase
  misc_feature (1)..(126): NCBI GI NO: 29826070 NR Description: adenine phosphoribosyltransferase form 2
  misc_feature (1)..(123): NCBI GI NO: 33354190 NR Description: putative adenine phosphoribosyl transferase
  misc_feature (1)..(125): NCBI GI NO: 15234553 NR Description: adenine phosphoribosyltransferase -related
  misc_feature (1)..(126): NCBI GI NO: 40019121 NR Description: adenine phosphoribosyltransferase [Zea mays]
  misc_feature (1)..(125): NCBI GI NO: 15235709 NR Description: adenine phosphoribosyltransferase (EC 2
  misc_feature (1)..(125): NCBI GI NO: 21536749 NR Description: adenine phosphoribosyltransferase (EC 2
  misc_feature (1)..(122): NCBI GI NO: 32492063 NR Description: adenine phosphoribosyltransferase [Brassica napus]
MHISVVAGIEARGFMFGPSIALGIGAKFVPLRKPRKLPGEVISEKYALEYGTDCLELHVGAAQPGERAIIIDDLVATGGTLSAGVKLLERVGAEVVECACVIGVPDVKGQCRSIGKPLYVLVEPRKADKCQAQADKCY

SEQ ID NO: 8690 - DNA, 1766 bp, Glycine max
  misc_feature (1)..(1766): Ceres Seq. ID no. 15171696
aaagcagaaaaaaaagtgggtcactttagcaacaaaaccttcacatcccatctctcatcaatggtgtttccaattgctgggtggagctttacgcaatcccattacactctctttctctccatttccttctattctctattattatatccttttctatttttatttttctcattgcattctctaatctttaatctctattctctacccattcatattcatccccgtttttctctgtcactgtcgcataacactctttgaaccaccgcaactaaagtaacaaccccatgtcctgaacctcacttttcttctcgccaaagcttccaattttcgatttttcccttgttttcagagaaatatcaacaccccagaaaataaaattgagagaatagaagaaaaccttttctgggttaatttggtaatttcctttttcttctttcatgggtaacataggaagcagcggctccaacagccgccggagacacggcggcggcggcggcagcggtaggcggattcacccgcctccgccgcaggtgatgccgccgccggaggtcacggccaaccaattcgtgtatcctccggccgccacgccgtatcacaactaccccgggtactacccggcgccgaccaccatgccggcgccgttgccggcgccgtacgaccaccaccaccgtacggcggtagacccgatgtgggggcggtatccggtggcggcaccgccggcaccggcgccgtacgtggaacaccagaaggcggttactattaagaacgatgtcaacatcaagaaggagacgcttaggattgagcctgatgacgagaatcctggccgtttccttgtgtcatttacgtttgatgccaccgtttcggggagcatcaccatacttttctttgcaaaagaaggggaaggttgcacactaactccaatgaaagaaaatgttcttccacccgtgactgtaaatttccagcaaggacttggccagaagtttaaacagccagctggaactggtattgatttttcaacatttgaggagtctgagttattgaaagtaggggacatggatgtctatcctgttgcaattaaagcagatgcatcctccagcgaccatgatgaatcaaaatcaaatgaaactccatcatccggtagctcaaactctcagataactcaagcagtgtttgagaaggagaaaggagaattccaggtgaaggttgtgaagcagatcttatgggtaaatggaatgaggtatgaactgcaggagatatatggtattggaaattcagtggagagtgatgtggatgggaatgacccaggaaaagagtgtgttatatgcttgtcagagcctcgggacacaactgtccttccatgccgccacatgtgtatgtgtagcggatgtgcgaaggttttgaggttccagacaaatagatgtccaatctgcagacaaccagttgagaggctattggagatcaaagtcgggcctgagcctgaggaatgaagattcaatgttagtgacacaacaagcttcctgtacagtccaactgttatagctaatacttttctcttactttatcaggtttttccaataatcccacaaaatagaaattggaatttatgtatgacattatgtttgacatgtacagcaggctggcattgcacctgacttgtattattgtataagccaatgcctccgccatgcttgtttggttttacttctaatttttatgtggctttcccttctgaatcatatttagatgtgtttctcaccttcgcttcg

SEQ ID NO: 8691 - protein, 349 aa, Glycine max
  peptide (1)..(349): Ceres Seq. ID no. 15171697
  misc_feature (293)..(331): Pfam Name: RING finger Pfam Description: Zinc finger, C3HC4 type
  misc_feature (27)..(343): NCBI GI NO: 18398633 NR Description: putative RING zinc finger protein
  misc_feature (26)..(349): NCBI GI NO: 37532246 NR Description: putative hydroxyproline-rich glycoprotein
  misc_feature (20)..(341): NCBI GI NO: 15242675 NR Description: expressed protein [Arabidopsis thaliana]
  misc_feature (20)..(341): NCBI GI NO: 21618140 NR Description: putative RING zinc finger protein
  misc_feature (20)..(341): NCBI GI NO: 26449588 NR Description: unknown protein [Arabidopsis thaliana]
  misc_feature (27)..(311): NCBI GI NO: 30681003 NR Description: putative RING zinc finger protein
  misc_feature (63)..(343): NCBI GI NO: 15231808 NR Description: expressed protein [Arabidopsis thaliana]
  misc_feature (28)..(349): NCBI GI NO: 15239642 NR Description: expressed protein [Arabidopsis thaliana]
  misc_feature (28)..(349): NCBI GI NO: 21928149 NR Description: AT5g19080/T16G12_120 [Arabidopsis thaliana]
  misc_feature (1)..(349): NCBI GI NO: 6862918 NR Description: putative RING zinc finger protein
MGNIGSSGSNSRRRHGGGGGSGRRIHPPPPQVMPPPEVTANQFVYPPAATPYHNYPGYYPAPTTMPAPLPAPYDHHHRTAVDPMWGRYPVAAPPAPAPYVEHQKAVTIKNDVNIKKETLRIEPDDENPGRFLVSFTFDATVSGSITILFFAKEGEGCTLTPMKENVLPPVTVNFQQGLGQKFKQPAGTGIDFSTFEESELLKVGDMDVYPVAIKADASSSDHDESKSNETPSSGSSNSQITQAVFEKEKGEFQVKVVKQILWVNGMRYELQEIYGIGNSVESDVDGNDPGKECVICLSEPRDTTVLPCRHMCMCSGCAKVLRFQTNRCPICRQPVERLLEIKVGPEPEE

SEQ ID NO: 8692 - protein, 317 aa, Glycine max
  peptide (1)..(317): Ceres Seq. ID no. 15171698
  misc_feature (261)..(299): Pfam Name: RING finger Pfam Description: Zinc finger, C3HC4 type
  misc_feature (1)..(311): NCBI GI NO: 18398633 NR Description: putative RING zinc finger protein
  misc_feature (1)..(317): NCBI GI NO: 37532246 NR Description: putative hydroxyproline-rich glycoprotein
  misc_feature (1)..(309): NCBI GI NO: 15242675 NR Description: expressed protein [Arabidopsis thaliana]
  misc_feature (1)..(309): NCBI GI NO: 21618140 NR Description: putative RING zinc finger protein
  misc_feature (1)..(309): NCBI GI NO: 26449588 NR Description: unknown protein [Arabidopsis thaliana]
  misc_feature (1)..(279): NCBI GI NO: 30681003 NR Description: putative RING zinc finger protein
  misc_feature (31)..(311): NCBI GI NO: 15231808 NR Description: expressed protein [Arabidopsis thaliana]
  misc_feature (1)..(317): NCBI GI NO: 15239642 NR Description: expressed protein [Arabidopsis thaliana]
  misc_feature (1)..(317): NCBI GI NO: 21928149 NR Description: AT5g19080/T16G12_120 [Arabidopsis thaliana]
  misc_feature (1)..(317): NCBI GI NO: 6862918 NR Description: putative RING zinc finger protein
MPPPEVTANQFVYPPAATPYHNYPGYYPAPTTMPAPLPAPYDHHHRTAVDPMWGRYPVAAPPAPAPYVEHQKAVTIKNDVNIKKETLRIEPDDENPGRFLVSFTFDATVSGSITILFFAKEGEGCTLTPMKENVLPPVTVNFQQGLGQKFKQPAGTGIDFSTFEESELLKVGDMDVYPVAIKADASSSDHDESKSNETPSSGSSNSQITQAVFEKEKGEFQVKVVKQILWVNGMRYELQEIYGIGNSVESDVDGNDPGKECVICLSEPRDTTVLPCRHMCMCSGCAKVLRFQTNRCPICRQPVERLLEIKVGPEPEE

SEQ ID NO: 8693 - protein, 285 aa, Glycine max
  peptide (1)..(285): Ceres Seq. ID no. 15171699
  misc_feature (229)..(267): Pfam Name: RING finger Pfam Description: Zinc finger, C3HC4 type
  misc_feature (1)..(279): NCBI GI NO: 18398633 NR Description: putative RING zinc finger protein
  misc_feature (1)..(285): NCBI GI NO: 37532246 NR Description: putative hydroxyproline-rich glycoprotein
  misc_feature (1)..(277): NCBI GI NO: 15242675 NR Description: expressed protein [Arabidopsis thaliana]
  misc_feature (1)..(277): NCBI GI NO: 21618140 NR Description: putative RING zinc finger protein
  misc_feature (1)..(277): NCBI GI NO: 26449588 NR Description: unknown protein [Arabidopsis thaliana]
  misc_feature (1)..(247): NCBI GI NO: 30681003 NR Description: putative RING zinc finger protein
  misc_feature (1)..(279): NCBI GI NO: 15231808 NR Description: expressed protein [Arabidopsis thaliana]
  misc_feature (1)..(285): NCBI GI NO: 15239642 NR Description: expressed protein [Arabidopsis thaliana]
  misc_feature (1)..(285): NCBI GI NO: 21928149 NR Description: AT5g19080/T16G12_120 [Arabidopsis thaliana]
  misc_feature (1)..(285): NCBI GI NO: 6862918 NR Description: putative RING zinc finger protein
MPAPLPAPYDHHHRTAVDPMWGRYPVAAPPAPAPYVEHQKAVTIKNDVNIKKETLRIEPDDENPGRFLVSFTFDATVSGSITILFFAKEGEGCTLTPMKENVLPPVTVNFQQGLGQKFKQPAGTGIDFSTFEESELLKVGDMDVYPVAIKADASSSDHDESKSNETPSSGSSNSQITQAVFEKEKGEFQVKVVKQILWVNGMRYELQEIYGIGNSVESDVDGNDPGKECVICLSEPRDTTVLPCRHMCMCSGCAKVLRFQTNRCPICRQPVERLLEIKVGPEPEE

SEQ ID NO: 8694 - DNA, 1974 bp, Glycine max
  misc_feature (1)..(1974): Ceres Seq. ID no. 14315204
aaattttacgtatttataagcgctcgcaaagcagtgaagacttgagagagggagagagagaatccaaattcggatttttgaaacgggatcgactccattcctcttcttcttcactgtcacacacactcacacactcctgtccatcgtttctccccactgattcacgaaaccctaatttttcgtggttcctcttctggggagcgaagatttagggttagattgagctgaggtggcagatgcagcagcatctcctctgagaaaaaaaatggaaggtggcaagagaattacggtgagccctcgaccttgctgcggccgcagaatcgttgccgcgaagaagagaccgcgtgcgaacgatggcttcgtcaacagcgtcaagaaactacagagacgcgaaatcagctccaagcgtgatcgcgctttcaccatgagcgacgctcaagagagattccggaatattcgcttgcaggaagaatatgatacgcatgatccgaaaggtccttcatctatggtgttgccgtttctgagaaaaagatcaaagattattgagattgtagcagcacgcgatattgtttttgctcttgcacaatcgggtgtttgtgcggcatttagccgagagaccaatcaacggatatgctttttgaatgttagtcctgatgaagttataagaagtctgttttataacaaaaataacgactcacttatcacagtttctgtatatgcttcagacagttacagttctttgaagtgcagaagcacaaggattgaatatataaggaggggtacaccagatgctggctttgctctttttgaatccgagtctctgaagtggccaggttttgttgagtttgatgatgtaaatgggaaggtattaacgtactctgctcaagacagcatatacaaggtatttgacctgaaaaactatacgatgctgtactctatttcggataaaaatgtccaagagattaagatcagcccgggaatcatgttgttgatttatgctaaagcaagtagccatgtcccccttaaaatcctttcaatagaagatggtactattttgaagtcattcagtcatctcctttatcggaataagaaggtagattttattgaacagttcaacgaaaagctacttgtaaagcaagaaaacgagaacctccaaattcttgatgtgcggacttttgaacatacggaagtttgcagaagtgaatttatgacaccgtctgcatttatttttctatatgagaaccaattgttcctaacatttcgaaatcgtactgtggctgtgtggaacttccgtggagagctggtaacttcttttgaggatcacctcttgtggcatcctgactgcaacaccaacaatatatatataaccagtgaccaggatcttatcatatcctactgtaaagctgattctgatgattcgttgtctgaaggaaatgcaggttccatcaacgtcagcaacatcttaactggcaagtgtctggccaaaataagagcaagtaacagctttccagtggataacagttgcagtgacaatccttcaggtagctgttgttgtaattcaaagaagcgaaaacatggatccaagacgaggagcactgttgcagaagccttggaagacattactgctctcttctatgatgaagagcgcaatgaaatctatacaggcaacaggcatggactagttcatgtctggtccaactaatggatatattattgaatgttctgttgcactttgtttttcttagtgggtacattgattattctgatctgctattgagaacttttggggggatgtaactataagtgcctttgaatcattcatttttttttctcttgacatttacgccttaggcgagtttgttcggtagttgtaagaggtgtatgaagatgctgttaactcaccggatgttgcttctgctgtaatctatatttttacattaatggagcggcttcgatggaatttagcatgtgaat

SEQ ID NO: 8695 - protein, 478 aa, Glycine max
  peptide (1)..(478): Ceres Seq. ID no. 14315205
  misc_feature (1)..(478): NCBI GI NO: 18410015 NR Description: expressed protein [Arabidopsis thaliana]
  misc_feature (1)..(478): NCBI GI NO: 25344227 NR Description: hypothetical protein At2g38630
  misc_feature (1)..(478): NCBI GI NO: 30687585 NR Description: expressed protein [Arabidopsis thaliana]
  misc_feature (1)..(478): NCBI GI NO: 11281174 NR Description: hypothetical protein F24B22
  misc_feature (1)..(412): NCBI GI NO: 15128395 NR Description: P0454H12.13
  misc_feature (1)..(412): NCBI GI NO: 34909262 NR Description: B1148D12.19
  misc_feature (390)..(478): NCBI GI NO: 15128395 NR Description: P0454H12.13
  misc_feature (390)..(478): NCBI GI NO: 34909262 NR Description: B1148D12.19
MEGGKRITVSPRPCCGRRIVAAKKRPRANDGFVNSVKKLQRREISSKRDRAFTMSDAQERFRNIRLQEEYDTHDPKGPSSMVLPFLRKRSKIIEIVAARDIVFALAQSGVCAAFSRETNQRICFLNVSPDEVIRSLFYNKNNDSLITVSVYASDSYSSLKCRSTRIEYIRRGTPDAGFALFESESLKWPGFVEFDDVNGKVLTYSAQDSIYKVFDLKNYTMLYSISDKNVQEIKISPGIMLLIYAKASSHVPLKILSIEDGTILKSFSHLLYRNKKVDFIEQFNEKLLVKQENENLQILDVRTFEHTEVCRSEFMTPSAFIFLYENQLFLTFRNRTVAVWNFRGELVTSFEDHLLWHPDCNTNNIYITSDQDLIISYCKADSDDSLSEGNAGSINVSNILTGKCLAKIRASNSFPVDNSCSDNPSGSCCCNSKKRKHGSKTRSTVAEALEDITALFYDEERNEIYTGNRHGLVHVWSN

SEQ ID NO: 8696 - protein, 425 aa, Glycine max
  peptide (1)..(425): Ceres Seq. ID no. 14315206
  misc_feature (1)..(425): NCBI GI NO: 18410015 NR Description: expressed protein [Arabidopsis thaliana]
  misc_feature (1)..(425): NCBI GI NO: 25344227 NR Description: hypothetical protein At2g38630
  misc_feature (1)..(425): NCBI GI NO: 30687585 NR Description: expressed protein [Arabidopsis thaliana]
  misc_feature (1)..(425): NCBI GI NO: 11281174 NR Description: hypothetical protein F24B22
  misc_feature (1)..(359): NCBI GI NO: 15128395 NR Description: P0454H12.13
  misc_feature (1)..(359): NCBI GI NO: 34909262 NR Description: B1148D12.19
  misc_feature (337)..(425): NCBI GI NO: 15128395 NR Description: P0454H12.13
  misc_feature (337)..(425): NCBI GI NO: 34909262 NR Description: B1148D12.19
MSDAQERFRNIRLQEEYDTHDPKGPSSMVLPFLRKRSKIIEIVAARDIVFALAQSGVCAAFSRETNQRICFLNVSPDEVIRSLFYNKNNDSLITVSVYASDSYSSLKCRSTRIEYIRRGTPDAGFALFESESLKWPGFVEFDDVNGKVLTYSAQDSIYKVFDLKNYTMLYSISDKNVQEIKISPGIMLLIYAKASSHVPLKILSIEDGTILKSFSHLLYRNKKVDFIEQFNEKLLVKQENENLQILDVRTFEHTEVCRSEFMTPSAFIFLYENQLFLTFRNRTVAVWNFRGELVTSFEDHLLWHPDCNTNNIYITSDQDLIISYCKADSDDSLSEGNAGSINVSNILTGKCLAKIRASNSFPVDNSCSDNPSGSCCCNSKKRKHGSKTRSTVAEALEDITALFYDEERNEIYTGNRHGLVHVWSN

SEQ ID NO: 8697 - protein, 398 aa, Glycine max
  peptide (1)..(398): Ceres Seq. ID no. 14315207
  misc_feature (1)..(398): NCBI GI NO: 18410015 NR Description: expressed protein [Arabidopsis thaliana]
  misc_feature (1)..(398): NCBI GI NO: 25344227 NR Description: hypothetical protein At2g38630
  misc_feature (1)..(398): NCBI GI NO: 30687585 NR Description: expressed protein [Arabidopsis thaliana]
  misc_feature (1)..(398): NCBI GI NO: 11281174 NR Description: hypothetical protein F24B22
  misc_feature (1)..(332): NCBI GI NO: 15128395 NR Description: P0454H12.13
  misc_feature (1)..(332): NCBI GI NO: 34909262 NR Description: B1148D12.19
  misc_feature (310)..(398): NCBI GI NO: 15128395 NR Description: P0454H12.13
  misc_feature (310)..(398): NCBI GI NO: 34909262 NR Description: B1148D12.19
MVLPFLRKRSKIIEIVAARDIVFALAQSGVCAAFSRETNQRICFLNVSPDEVIRSLFYNKNNDSLITVSVYASDSYSSLKCRSTRIEYIRRGTPDAGFALFESESLKWPGFVEFDDVNGKVLTYSAQDSIYKVFDLKNYTMLYSISDKNVQEIKISPGIMLLIYAKASSHVPLKILSIEDGTILKSFSHLLYRNKKVDFIEQFNEKLLVKQENENLQILDVRTFEHTEVCRSEFMTPSAFIFLYENQLFLTFRNRTVAVWNFRGELVTSFEDHLLWHPDCNTNNIYITSDQDLIISYCKADSDDSLSEGNAGSINVSNILTGKCLAKIRASNSFPVDNSCSDNPSGSCCCNSKKRKHGSKTRSTVAEALEDITALFYDEERNEIYTGNRHGLVHVWSN

SEQ ID NO: 8698 - DNA, 1263 bp, Glycine max
  misc_feature (1)..(1263): Ceres Seq. ID no. 14315951
ttttgttctctgttctcgcgatttcggaagggtcgtgtttccctgcttcagtttcagcttcggcttcgagaagcgtcgattgggtccttaagctgttccttctctgtttctgctttggagcatcttggagcaaatgagcaatggagcttgtggagcacggctcacctcaaggattgctctcttgacaaactgtataactcctatcaaacatgagcggtcgcttttctcgcacaatttatgtcggcaacctgccctctgatataagagagtcagaaattgaagatctattctacaagtatggccgtataatggatattgaattgaaggttcctccccgccctccatgttattgctttgttgagtttgataatgctcgagatgccgaagatgcaattcggggtcgagatggatacaactttgatggttgtcggttaagagtggagcttgctcatggtggtagagggccatcatcaagtgatcgacgtggatatggaggaggaggtggtaatggtggagcaggcgggggtcgttttggcatctcacgccattctgaatttcgagttattgttcgtggactcccatcttctgcatcttggcaagatttgaaggatcatatgcgaaaagctggggacgtgtgttttgctgaggtttcccgtgatagtgaagggacttttggcattgttgattacactaattatgatgacatgaagtatgccattcggaaattggatgacactgagtttagaaatccctgggcgagagcttatattcgggtgaggaagtatgagagtagtcgttctaggagccgcagcaggagccccagcaggagccccagcaggagcagaagtccaaaaagagttagaagatctctggagcgttctgtgtctaggtcacgatctagatctcaatcagcatcaccaatcaaatcttctaggccaagatcacgatcccgatcacgatcacgatctggatctggatctcctcatcaggtcctgtcaggtagtggttgaatttctgacaaagctggtggttctctggtgatattgttccattctggtgggcagtatcggaattatattggagttggactaaattgttttaagggaaaattattgatgtgcctaggctgtttggtgattgtcttatttcttttaaattaaaatgttggacattggccttgccctttgtaccttagcaaacacaagaatatctttagtcctcgcaaactgtgaatccaatttgaatggttttaaacagatttat

SEQ ID NO: 8699 - protein, 266 aa, Glycine max
  peptide (1)..(266): Ceres Seq. ID no. 14315952
  misc_feature (9)..(77): Pfam Name: a.k.a. RRM, RBD, or RNP domain Pfam Description: RNA recognition motif.
  misc_feature (1)..(258): NCBI GI NO: 12324445 NR Description: putative splicing factor; 53460-55514
  misc_feature (1)..(258): NCBI GI NO: 22331714 NR Description: arginine/serine-rich splicing factor
  misc_feature (1)..(258): NCBI GI NO: 33146854 NR Description: putative pre-mRNA splicing factor SF2
  misc_feature (1)..(258): NCBI GI NO: 30678391 NR Description: pre-mRNA splicing factor SF2 (SR1 protein)
  misc_feature (1)..(258): NCBI GI NO: 2443473 NR Description: ASF/SF2 homolog [Arabidopsis thaliana]
  misc_feature (1)..(258): NCBI GI NO: 30678395 NR Description: pre-mRNA splicing factor SF2 (SR1 protein)
  misc_feature (1)..(265): NCBI GI NO: 5815235 NR Description: splicing factor SR1 [Arabidopsis thaliana]
  misc_feature (1)..(258): NCBI GI NO: 5815236 NR Description: splicing factor SR1B [Arabidopsis thaliana]
  misc_feature (1)..(258): NCBI GI NO: 5815237 NR Description: splicing factor SR1C [Arabidopsis thaliana]
  misc_feature (1)..(258): NCBI GI NO: 5815239 NR Description: splicing factor SR1E [Arabidopsis thaliana]
MSGRFSRTIYVGNLPSDIRESEIEDLFYKYGRIMDIELKVPPRPPCYCFVEFDNARDAEDAIRGRDGYNFDGCRLRVELAHGGRGPSSSDRRGYGGGGGNGGAGGGRFGISRHSEFRVIVRGLPSSASWQDLKDHMRKAGDVCFAEVSRDSEGTFGIVDYTNYDDMKYAIRKLDDTEFRNPWARAYIRVRKYESSRSRSRSRSPSRSPSRSRSPKRVRRSLERSVSRSRSRSQSASPIKSSRPRSRSRSRSRSGSGSPHQVLSGSG

SEQ ID NO: 8700 - protein, 233 aa, Glycine max
  peptide (1)..(233): Ceres Seq. ID no. 14315953
  misc_feature (1)..(225): NCBI GI NO: 12324445 NR Description: putative splicing factor; 53460-55514
  misc_feature (1)..(225): NCBI GI NO: 22331714 NR Description: arginine/serine-rich splicing factor
  misc_feature (1)..(225): NCBI GI NO: 33146854 NR Description: putative pre-mRNA splicing factor SF2
  misc_feature (1)..(225): NCBI GI NO: 30678391 NR Description: pre-mRNA splicing factor SF2 (SR1 protein)
  misc_feature (1)..(225): NCBI GI NO: 2443473 NR Description: ASF/SF2 homolog [Arabidopsis thaliana]
  misc_feature (1)..(225): NCBI GI NO: 30678395 NR Description: pre-mRNA splicing factor SF2 (SR1 protein)
  misc_feature (1)..(232): NCBI GI NO: 5815235 NR Description: splicing factor SR1 [Arabidopsis thaliana]
  misc_feature (1)..(225): NCBI GI NO: 5815236 NR Description: splicing factor SR1B [Arabidopsis thaliana]
  misc_feature (1)..(225): NCBI GI NO: 5815237 NR Description: splicing factor SR1C [Arabidopsis thaliana]
  misc_feature (1)..(225): NCBI GI NO: 5815239 NR Description: splicing factor SR1E [Arabidopsis thaliana]
MDIELKVPPRPPCYCFVEFDNARDAEDAIRGRDGYNFDGCRLRVELAHGGRGPSSSDRRGYGGGGGNGGAGGGRFGISRHSEFRVIVRGLPSSASWQDLKDHMRKAGDVCFAEVSRDSEGTFGIVDYTNYDDMKYAIRKLDDTEFRNPWARAYIRVRKYESSRSRSRSRSPSRSPSRSRSPKRVRRSLERSVSRSRSRSQSASPIKSSRPRSRSRSRSRSGSGSPHQVLSGSG

SEQ ID NO: 8701 - DNA, 1656 bp, Glycine max
  misc_feature (1)..(1656): Ceres Seq. ID no. 14316111
aaaagactatccctggttttcaatctggctccttcctctctgtccatgacgacgtcgtccggttccctaaagaacacgattcccccaggcctccaagaagtgcttctcaacagaaaacgcccccaacaagaacccaacaacaatgccggaccctcttcctccaccgaggacgctgccatcgccgacgattgctccagctccaactccaagctcatcgtgctggtcaccaacagtgacagcattgagtcaccgggccttacattcctcgtcgaagccctcgtgcgtcagggcctctacgacgtccatgtctgcgttcctcaatcggacaaatcggcttcgggccactctgtcactcgcggagaaaccgtcgaagcttgttcggtacaaattaatggcgccaccgcctttgaagtttcaggaactcctgtggattgcgtttcactagcgttatctggggccttgttttcatggtcaaagcctgtgctggttattagcggaattaaccagggatcaagctgtggtcatcacatgttttactcaggtgctgttgctggagctagagaggcgttattatgtggtgtaccttcattgtcaatatcattaaatcggaagaaggatgaaagtcaagagactgatttcaaggatgcagtagtactctgtttacctttaataaatgctgctatcagggatgttgtaaacggaactttcctcaaaaactgctttctgaatatagaaattcctaaatcacctttaaccagcaagggcttcaaattgaccaagcaaagtatgtggagatccactccaaactggcaggcagtttcaactagccggtatcctcctggtcatttcttggccagtaaacaaggctttggtcttcagtttgcacagattggccgagatgcctctgctgctggtgcagctcggagattaactacacagaaaaagaatttggagattgttgaatcaattggagctgccggaaaagctgattccaacagggtgaagaagtacttcaggctagagtttttggataaacagcaggaagatatagatgatgatctagattacatggcacttgaaaatggatttgttgcagttactccactctctctttctcttcatactgagaccgatattcaaatggcagcttctgattggatttcatctgtgctttctggtgaacaatagcctcaagcagagttcagcttcagcgtaattatgtacatttgagatttctgatgattctttcttttctatgttcttgaaagcaaaggtcgagcagaagcggcagtcacacctattctatagttgatatcatcaatctgcactctttttttttttgtatgcgtgtaagatattttgtattcctctcttcattgtttcatttcttttggtcgctagttatttctgatgtgtgcttcctgtaatctcctaggcatattttaaaaatgccatttcgtctgtttgtaacttaaaaaactactagcaaaacgctggtgcacgtgtcattgtaatttttcgctaaattgttgtttgaaagatagttttaagcttggtttgatggtttgtagcctctggtcagatatctagcagccttgtatggattttgacctttcaaaatatttttttttcaatgttaaaatgtttaacgaaaac

SEQ ID NO: 8702 - protein, 395 aa, Glycine max
  peptide (1)..(395): Ceres Seq. ID no. 14316112
  misc_feature (72)..(270): Pfam Name: Pfam Description:  Survival protein SurE
  misc_feature (16)..(395): NCBI GI NO: 15218620 NR Description: expressed protein [Arabidopsis thaliana]
  misc_feature (123)..(395): NCBI GI NO: 25406225 NR Description: hypothetical protein F3N23.8
  misc_feature (67)..(338): NCBI GI NO: 18414342 NR Description: expressed protein [Arabidopsis thaliana]
  misc_feature (57)..(271): NCBI GI NO: 33146601 NR Description: putative stationary phase survival protein SurE
  misc_feature (16)..(177): NCBI GI NO: 25406225 NR Description: hypothetical protein F3N23.8
  misc_feature (67)..(177): NCBI GI NO: 7485145 NR Description: hypothetical protein - Arabidopsis thaliana
  misc_feature (179)..(247): NCBI GI NO: 7485145 NR Description: hypothetical protein - Arabidopsis thaliana
  misc_feature (73)..(260): NCBI GI NO: 23112477 NR Description: hypothetical protein
  misc_feature (54)..(213): NCBI GI NO: 29840278 NR Description: phosphatase, SurE family
  misc_feature (73)..(260): NCBI GI NO: 15791661 NR Description: SurE protein homolog [Campylobacter jejuni]
KRLSLVFNLAPSSLSMTTSSGSLKNTIPPGLQEVLLNRKRPQQEPNNNAGPSSSTEDAAIADDCSSSNSKLIVLVTNSDSIESPGLTFLVEALVRQGLYDVHVCVPQSDKSASGHSVTRGETVEACSVQINGATAFEVSGTPVDCVSLALSGALFSWSKPVLVISGINQGSSCGHHMFYSGAVAGAREALLCGVPSLSISLNRKKDESQETDFKDAVVLCLPLINAAIRDVVNGTFLKNCFLNIEIPKSPLTSKGFKLTKQSMWRSTPNWQAVSTSRYPPGHFLASKQGFGLQFAQIGRDASAAGAARRLTTQKKNLEIVESIGAAGKADSNRVKKYFRLEFLDKQQEDIDDDLDYMALENGFVAVTPLSLSLHTETDIQMAASDWISSVLSGEQ

SEQ ID NO: 8703 - protein, 380 aa, Glycine max
  peptide (1)..(380): Ceres Seq. ID no. 14316113
  misc_feature (57)..(255): Pfam Name: Pfam Description:  Survival protein SurE
  misc_feature (1)..(380): NCBI GI NO: 15218620 NR Description: expressed protein [Arabidopsis thaliana]
  misc_feature (108)..(380): NCBI GI NO: 25406225 NR Description: hypothetical protein F3N23.8
  misc_feature (52)..(323): NCBI GI NO: 18414342 NR Description: expressed protein [Arabidopsis thaliana]
  misc_feature (42)..(256): NCBI GI NO: 33146601 NR Description: putative stationary phase survival protein SurE
  misc_feature (1)..(162): NCBI GI NO: 25406225 NR Description: hypothetical protein F3N23.8
  misc_feature (52)..(162): NCBI GI NO: 7485145 NR Description: hypothetical protein - Arabidopsis thaliana
  misc_feature (164)..(232): NCBI GI NO: 7485145 NR Description: hypothetical protein - Arabidopsis thaliana
  misc_feature (58)..(245): NCBI GI NO: 23112477 NR Description: hypothetical protein
  misc_feature (39)..(198): NCBI GI NO: 29840278 NR Description: phosphatase, SurE family
  misc_feature (58)..(245): NCBI GI NO: 15791661 NR Description: SurE protein homolog [Campylobacter jejuni]
MTTSSGSLKNTIPPGLQEVLLNRKRPQQEPNNNAGPSSSTEDAAIADDCSSSNSKLIVLVTNSDSIESPGLTFLVEALVRQGLYDVHVCVPQSDKSASGHSVTRGETVEACSVQINGATAFEVSGTPVDCVSLALSGALFSWSKPVLVISGINQGSSCGHHMFYSGAVAGAREALLCGVPSLSISLNRKKDESQETDFKDAVVLCLPLINAAIRDVVNGTFLKNCFLNIEIPKSPLTSKGFKLTKQSMWRSTPNWQAVSTSRYPPGHFLASKQGFGLQFAQIGRDASAAGAARRLTTQKKNLEIVESIGAAGKADSNRVKKYFRLEFLDKQQEDIDDDLDYMALENGFVAVTPLSLSLHTETDIQMAASDWISSVLSGEQ

SEQ ID NO: 8704 - protein, 219 aa, Glycine max
  peptide (1)..(219): Ceres Seq. ID no. 14316114
  misc_feature (1)..(94): Pfam Name: Pfam Description:  Survival protein SurE
  misc_feature (1)..(219): NCBI GI NO: 15218620 NR Description: expressed protein [Arabidopsis thaliana]
  misc_feature (1)..(219): NCBI GI NO: 25406225 NR Description: hypothetical protein F3N23.8
  misc_feature (1)..(162): NCBI GI NO: 18414342 NR Description: expressed protein [Arabidopsis thaliana]
  misc_feature (1)..(95): NCBI GI NO: 33146601 NR Description: putative stationary phase survival protein SurE
  misc_feature (3)..(71): NCBI GI NO: 7485145 NR Description: hypothetical protein - Arabidopsis thaliana
  misc_feature (1)..(84): NCBI GI NO: 23112477 NR Description: hypothetical protein
  misc_feature (1)..(37): NCBI GI NO: 29840278 NR Description: phosphatase, SurE family
  misc_feature (1)..(84): NCBI GI NO: 15791661 NR Description: SurE protein homolog [Campylobacter jejuni]
  misc_feature (1)..(37): NCBI GI NO: 39932349 NR Description: Acid phosphatase surE 2
  misc_feature (1)..(104): NCBI GI NO: 23136015 NR Description: hypothetical protein [Cytophaga hutchinsonii]
MFYSGAVAGAREALLCGVPSLSISLNRKKDESQETDFKDAVVLCLPLINAAIRDVVNGTFLKNCFLNIEIPKSPLTSKGFKLTKQSMWRSTPNWQAVSTSRYPPGHFLASKQGFGLQFAQIGRDASAAGAARRLTTQKKNLEIVESIGAAGKADSNRVKKYFRLEFLDKQQEDIDDDLDYMALENGFVAVTPLSLSLHTETDIQMAASDWISSVLSGEQ

SEQ ID NO: 8705 - DNA, 1220 bp, Glycine max
  misc_feature (1)..(1220): Ceres Seq. ID no. 14315973
atgcatccaacgtgacatccacactcaactcaaaaaccaattccaataatggcgaccttatctatgtcatcttgatcgtaatccccgtcatcaaactctttctttattctacgattcacaatcaaaacccaacaacttcaactctccaatctctatcctcaattcaacccttttggtggcaacttctatttatgctacaaaaaatgctgcgattgcacttcaccaccgcactctctcactttgcttccaaggcctcaccttttcctctcacacccgtttccgttaccgtttccagagctattgtttgcaacaaccccaccaggttcagatcgcaaatgggttctttctccacttcctcttcctcttcctccaaactcttgttccgccagctttttgagaaggaatcttccacctacacttaccttctcgctgatgcctcgcacccagaaaaacctgcacttctgattgacccagttgataggacagtagacagggacttgtcgatcattgagcaactggggttgaagcttgtgtatgccatgaacacacatgtgcatgcggatcatgtcactgggactggccttatcaagagcaaagttccttctgtaaaatctgttatttcaaaagcaagtggtgcaacggcagatctttatgtggagccaggtgataaggtccaaattggtgatctttttctagagggtgggagttcagagcagctttacaaatcaatccattcacagattttaacactgcccaagagtacgttaatctatccagctcatgactacaaaggattcactgtgagcactgttggagaggagctgcaaaacaatccacgcataacaaaggatgaggaaactttcaagaacatcatgggaaatcttaacctgtcatatcctaaaatgattgacatagctgtcccagctaatatggtttgcggaatccaatccaatccaaagcaagctgaggcttcataagccttatctgagagtcacacactgatgttatttgacacaaagaccttgcaagcaaaagggggaaaaattgttatagccctttgaattgaagagaaaaatggaaattgtaaataaataaaatggtatttgtgttgtggcccaatataattagaattaggttccagtgattatgctgtgtttctgttgtatctgattgtttatgttaaaacttcctaatcctatacttcaaagccaaattttcag

SEQ ID NO: 8706 - protein, 324 aa, Glycine max
  peptide (1)..(324): Ceres Seq. ID no. 14315974
  misc_feature (136)..(232): Pfam Name: Pfam Description:  Metallo-beta-lactamase superfamily
  misc_feature (77)..(232): NCBI GI NO: 25405648 NR Description: probable glyoxalase II, 78941-80643
  misc_feature (221)..(321): NCBI GI NO: 25405648 NR Description: probable glyoxalase II, 78941-80643
  misc_feature (112)..(232): NCBI GI NO: 1644427 NR Description: glyoxalase II [Arabidopsis thaliana]
  misc_feature (221)..(321): NCBI GI NO: 1644427 NR Description: glyoxalase II [Arabidopsis thaliana]
  misc_feature (112)..(232): NCBI GI NO: 18404530 NR Description: glyoxalase II, putative
  misc_feature (221)..(321): NCBI GI NO: 18404530 NR Description: glyoxalase II, putative
  misc_feature (77)..(232): NCBI GI NO: 8671869 NR Description: Contains similarity to an unknown glyoxalase IIfrom Arabidopsis thaliana gb|U74610 and a Metallo-beta-lactamase PF|00753 domain
  misc_feature (267)..(321): NCBI GI NO: 8671869 NR Description: Contains similarity to an unknown glyoxalase IIfrom Arabidopsis thaliana gb|U74610 and a Metallo-beta-lactamase PF|00753 domain
  misc_feature (246)..(267): NCBI GI NO: 8671869 NR Description: Contains similarity to an unknown glyoxalase IIfrom Arabidopsis thaliana gb|U74610 and a Metallo-beta-lactamase PF|00753 domain
  misc_feature (50)..(232): NCBI GI NO: 34910930 NR Description: putative glyoxalase II
ASNVTSTLNSKTNSNNGDLIYVILIVIPVIKLFLYSTIHNQNPTTSTLQSLSSIQPFWWQLLFMLQKMLRLHFTTALSHFASKASPFPLTPVSVTVSRAIVCNNPTRFRSQMGSFSTSSSSSSKLLFRQLFEKESSTYTYLLADASHPEKPALLIDPVDRTVDRDLSIIEQLGLKLVYAMNTHVHADHVTGTGLIKSKVPSVKSVISKASGATADLYVEPGDKVQIGDLFLEGGSSEQLYKSIHSQILTLPKSTLIYPAHDYKGFTVSTVGEELQNNPRITKDEETFKNIMGNLNLSYPKMIDIAVPANMVCGIQSNPKQAEAS

SEQ ID NO: 8707 - protein, 261 aa, Glycine max
  peptide (1)..(261): Ceres Seq. ID no. 14315975
  misc_feature (73)..(169): Pfam Name: Pfam Description:  Metallo-beta-lactamase superfamily
  misc_feature (14)..(169): NCBI GI NO: 25405648 NR Description: probable glyoxalase II, 78941-80643
  misc_feature (158)..(258): NCBI GI NO: 25405648 NR Description: probable glyoxalase II, 78941-80643
  misc_feature (49)..(169): NCBI GI NO: 1644427 NR Description: glyoxalase II [Arabidopsis thaliana]
  misc_feature (158)..(258): NCBI GI NO: 1644427 NR Description: glyoxalase II [Arabidopsis thaliana]
  misc_feature (49)..(169): NCBI GI NO: 18404530 NR Description: glyoxalase II, putative
  misc_feature (158)..(258): NCBI GI NO: 18404530 NR Description: glyoxalase II, putative
  misc_feature (14)..(169): NCBI GI NO: 8671869 NR Description: Contains similarity to an unknown glyoxalase IIfrom Arabidopsis thaliana gb|U74610 and a Metallo-beta-lactamase PF|00753 domain
  misc_feature (204)..(258): NCBI GI NO: 8671869 NR Description: Contains similarity to an unknown glyoxalase IIfrom Arabidopsis thaliana gb|U74610 and a Metallo-beta-lactamase PF|00753 domain
  misc_feature (183)..(204): NCBI GI NO: 8671869 NR Description: Contains similarity to an unknown glyoxalase IIfrom Arabidopsis thaliana gb|U74610 and a Metallo-beta-lactamase PF|00753 domain
  misc_feature (1)..(169): NCBI GI NO: 34910930 NR Description: putative glyoxalase II
MLQKMLRLHFTTALSHFASKASPFPLTPVSVTVSRAIVCNNPTRFRSQMGSFSTSSSSSSKLLFRQLFEKESSTYTYLLADASHPEKPALLIDPVDRTVDRDLSIIEQLGLKLVYAMNTHVHADHVTGTGLIKSKVPSVKSVISKASGATADLYVEPGDKVQIGDLFLEGGSSEQLYKSIHSQILTLPKSTLIYPAHDYKGFTVSTVGEELQNNPRITKDEETFKNIMGNLNLSYPKMIDIAVPANMVCGIQSNPKQAEAS

SEQ ID NO: 8708 - protein, 257 aa, Glycine max
  peptide (1)..(257): Ceres Seq. ID no. 14315976
  misc_feature (69)..(165): Pfam Name: Pfam Description:  Metallo-beta-lactamase superfamily
  misc_feature (10)..(165): NCBI GI NO: 25405648 NR Description: probable glyoxalase II, 78941-80643
  misc_feature (154)..(254): NCBI GI NO: 25405648 NR Description: probable glyoxalase II, 78941-80643
  misc_feature (45)..(165): NCBI GI NO: 1644427 NR Description: glyoxalase II [Arabidopsis thaliana]
  misc_feature (154)..(254): NCBI GI NO: 1644427 NR Description: glyoxalase II [Arabidopsis thaliana]
  misc_feature (45)..(165): NCBI GI NO: 18404530 NR Description: glyoxalase II, putative
  misc_feature (154)..(254): NCBI GI NO: 18404530 NR Description: glyoxalase II, putative
  misc_feature (10)..(165): NCBI GI NO: 8671869 NR Description: Contains similarity to an unknown glyoxalase IIfrom Arabidopsis thaliana gb|U74610 and a Metallo-beta-lactamase PF|00753 domain
  misc_feature (200)..(254): NCBI GI NO: 8671869 NR Description: Contains similarity to an unknown glyoxalase IIfrom Arabidopsis thaliana gb|U74610 and a Metallo-beta-lactamase PF|00753 domain
  misc_feature (179)..(200): NCBI GI NO: 8671869 NR Description: Contains similarity to an unknown glyoxalase IIfrom Arabidopsis thaliana gb|U74610 and a Metallo-beta-lactamase PF|00753 domain
  misc_feature (1)..(165): NCBI GI NO: 34910930 NR Description: putative glyoxalase II
MLRLHFTTALSHFASKASPFPLTPVSVTVSRAIVCNNPTRFRSQMGSFSTSSSSSSKLLFRQLFEKESSTYTYLLADASHPEKPALLIDPVDRTVDRDLSIIEQLGLKLVYAMNTHVHADHVTGTGLIKSKVPSVKSVISKASGATADLYVEPGDKVQIGDLFLEGGSSEQLYKSIHSQILTLPKSTLIYPAHDYKGFTVSTVGEELQNNPRITKDEETFKNIMGNLNLSYPKMIDIAVPANMVCGIQSNPKQAEAS

SEQ ID NO: 8709 - DNA, 1019 bp, Glycine max
  misc_feature (1)..(1019): Ceres Seq. ID no. 14316404
aaccaaatgttattccctcctttcttagtctgctgtgttttctctttctagagaatccaagcctaccattgaagtggaattctgtgaggctaagtaaaatggggtaccagccattggaaaagggaaaaccaaaacataagaaggggttatggtcacctgaagaagacaacaaactcagaaaccacatccttaaacatggtcatggctgttggagttctgtccccattaaggcaggcttgcaaaggaatggaaagagctgtagattaaggtggattaactatctaaggccaggattaaagagagggaaattcagcaaacaggaagaggagacaatcctcacccttcaccacatgctaggcaacaagtggtcacggatatcacagcatttgcctggaaggacagacaatgagattaaaaactattggcattcatatttgaaaaagagagtggccaaagctaaggaaatggaatctcataaccaaattaagtatgctagctcaagctcagatactatggactcttcacattctctccaaaatcttgcaactcaatgcccactgaattataacttcaccaaagaggcttctcaaagttccttaccaaaactgttatttgctgagtggctttcactggatcatttaaactctgcaaattcagttgactctttgggtttgaggaatggatttgatcaaaattcatcttttcatgaagctgcaattcatgacatgtcagaggtaccctttggtggagagtataatagatgtgtaagtaacatttcagcccctgagatgttcaattcacagcttaagtatggaaatcaaatggtggaaaatggttacattcattgtatgcctggggttgacttaagtagcaatttcagcataagcaatgatgcaataatgtacatatgagagctaagtttccgggctggtcagcaaggaataatatcattttctaattttatacatactgaaaacaatcaaactttagcaatatatataaaataataattccattgc

SEQ ID NO: 8710 - protein, 302 aa, Glycine max
  peptide (1)..(302): Ceres Seq. ID no. 14316405
  misc_feature (47)..(94): Pfam Name: Pfam Description:  Myb-like DNA-binding domain
  misc_feature (40)..(212): NCBI GI NO: 15229055 NR Description: myb family transcription factor
  misc_feature (33)..(153): NCBI GI NO: 32489825 NR Description: OSJNBb0039L24.8
  misc_feature (39)..(183): NCBI GI NO: 15242947 NR Description: myb family transcription factor(MYB19)
  misc_feature (44)..(171): NCBI GI NO: 15235149 NR Description: myb family transcription factor
  misc_feature (44)..(171): NCBI GI NO: 25387539 NR Description: myb-like protein [imported] - Arabidopsis thaliana
  misc_feature (42)..(246): NCBI GI NO: 33320067 NR Description: transcription factor Myb [Capsicum annuum]
  misc_feature (42)..(184): NCBI GI NO: 28927688 NR Description: putative Myb-like DNA-binding protein
  misc_feature (42)..(183): NCBI GI NO: 2280530 NR Description: ATMYB4 [Arabidopsis thaliana]
  misc_feature (42)..(183): NCBI GI NO: 30690317 NR Description: myb transcription factor (ATMYB4)
  misc_feature (41)..(259): NCBI GI NO: 19059 NR Description: MybHv33 [Hordeum vulgare subsp. vulgare]
PNVIPSFLSLLCFLFLENPSLPLKWNSVRLSKMGYQPLEKGKPKHKKGLWSPEEDNKLRNHILKHGHGCWSSVPIKAGLQRNGKSCRLRWINYLRPGLKRGKFSKQEEETILTLHHMLGNKWSRISQHLPGRTDNEIKNYWHSYLKKRVAKAKEMESHNQIKYASSSSDTMDSSHSLQNLATQCPLNYNFTKEASQSSLPKLLFAEWLSLDHLNSANSVDSLGLRNGFDQNSSFHEAAIHDMSEVPFGGEYNRCVSNISAPEMFNSQLKYGNQMVENGYIHCMPGVDLSSNFSISNDAIMYI

SEQ ID NO: 8711 - protein, 270 aa, Glycine max
  peptide (1)..(270): Ceres Seq. ID no. 14316406
  misc_feature (15)..(62): Pfam Name: Pfam Description:  Myb-like DNA-binding domain
  misc_feature (8)..(180): NCBI GI NO: 15229055 NR Description: myb family transcription factor
  misc_feature (1)..(121): NCBI GI NO: 32489825 NR Description: OSJNBb0039L24.8
  misc_feature (7)..(151): NCBI GI NO: 15242947 NR Description: myb family transcription factor(MYB19)
  misc_feature (12)..(139): NCBI GI NO: 15235149 NR Description: myb family transcription factor
  misc_feature (12)..(139): NCBI GI NO: 25387539 NR Description: myb-like protein [imported] - Arabidopsis thaliana
  misc_feature (10)..(214): NCBI GI NO: 33320067 NR Description: transcription factor Myb [Capsicum annuum]
  misc_feature (10)..(152): NCBI GI NO: 28927688 NR Description: putative Myb-like DNA-binding protein
  misc_feature (10)..(151): NCBI GI NO: 2280530 NR Description: ATMYB4 [Arabidopsis thaliana]
  misc_feature (10)..(151): NCBI GI NO: 30690317 NR Description: myb transcription factor (ATMYB4)
  misc_feature (9)..(227): NCBI GI NO: 19059 NR Description: MybHv33 [Hordeum vulgare subsp. vulgare]
MGYQPLEKGKPKHKKGLWSPEEDNKLRNHILKHGHGCWSSVPIKAGLQRNGKSCRLRWINYLRPGLKRGKFSKQEEETILTLHHMLGNKWSRISQHLPGRTDNEIKNYWHSYLKKRVAKAKEMESHNQIKYASSSSDTMDSSHSLQNLATQCPLNYNFTKEASQSSLPKLLFAEWLSLDHLNSANSVDSLGLRNGFDQNSSFHEAAIHDMSEVPFGGEYNRCVSNISAPEMFNSQLKYGNQMVENGYIHCMPGVDLSSNFSISNDAIMYI

SEQ ID NO: 8712 - protein, 186 aa, Glycine max
  peptide (1)..(186): Ceres Seq. ID no. 14316407
  misc_feature (1)..(96): NCBI GI NO: 15229055 NR Description: myb family transcription factor
  misc_feature (1)..(37): NCBI GI NO: 32489825 NR Description: OSJNBb0039L24.8
  misc_feature (1)..(67): NCBI GI NO: 15242947 NR Description: myb family transcription factor(MYB19)
  misc_feature (1)..(55): NCBI GI NO: 15235149 NR Description: myb family transcription factor
  misc_feature (1)..(55): NCBI GI NO: 25387539 NR Description: myb-like protein [imported] - Arabidopsis thaliana
  misc_feature (1)..(130): NCBI GI NO: 33320067 NR Description: transcription factor Myb [Capsicum annuum]
  misc_feature (1)..(68): NCBI GI NO: 28927688 NR Description: putative Myb-like DNA-binding protein
  misc_feature (1)..(67): NCBI GI NO: 2280530 NR Description: ATMYB4 [Arabidopsis thaliana]
  misc_feature (1)..(67): NCBI GI NO: 30690317 NR Description: myb transcription factor (ATMYB4)
  misc_feature (1)..(143): NCBI GI NO: 19059 NR Description: MybHv33 [Hordeum vulgare subsp. vulgare]
MLGNKWSRISQHLPGRTDNEIKNYWHSYLKKRVAKAKEMESHNQIKYASSSSDTMDSSHSLQNLATQCPLNYNFTKEASQSSLPKLLFAEWLSLDHLNSANSVDSLGLRNGFDQNSSFHEAAIHDMSEVPFGGEYNRCVSNISAPEMFNSQLKYGNQMVENGYIHCMPGVDLSSNFSISNDAIMYI

SEQ ID NO: 8713 - DNA, 1648 bp, Glycine max
  misc_feature (1)..(1648): Ceres Seq. ID no. 14315162
atgtcaatcatagtgataattggagagagagagagaacacacggtgtgagagaaagaaagtttttggttagggaggaacccacctacattctagttagggagaaagtgtgagagagaaagaaagggatcggaagaatgaagctctagttttctctgagagtaagtgaagaaaaactcaaaatagaagatgtttatcatgctgatggtgatgagagagaaagggtcagcaacaagaacagaagaaaagagattcatcacactaatatagattgtacttgattggagcaggattgtccataaaaatacaagccttcagttgtggctactacaaggtggttcccttcggattccggtgcctttgcggactggtcggcccctccgtctgctgtctccggccgcggcgacgatctctccctcggcttcaatgcttcatccgccaccacacatggtggcggtgcagccatgtggccgggggcatccaggtcatttaactacaacatggcgcctcaccacgacatcttcgtggtagcgcccgcttcctctttccaccaccaccacgaccacaacgacgccgtattgtccgatccaaataacggttctaacaattcgaacaacaatcctggaactgcactcggtgtgaatgttttccctctcctaaccgccacgccatgcctcgagagcgagggcataatgggaaacatcagccaccaccgtaacagaattcagttatgggaagatcacgagtcttctccaccgcagcagcaacagggtcacgtggagcgtgacacgtgtggggatgggggtttgggtgggagtgggactaacacgtgccaggactgtgggaaccaggcgaagaaggactgtagtcaccggaggtgcaggacgtgttgcaagagtaggggttttgattgcgccacgcacgtgaagagcacgtgggtgccggcgtcgcggcggagggagaggcagctcatgacggttgcggcggccaggtccagtggggacacttctggtgccaagaaacctaggcttgttgcttcccagactacttcgcatacttcaacgtctaataatactaataccactcctccgaggagttttgacactggttctagccaccaagatgtgggtttcaaggagtcactaccttgccaagtgcgtgcaccggcggtgttcaagtgtgttcgtgtaacagcagtggatgatggtggggaagatgagtatgcttatcaagcagttgtgaagattggtggccatgtgttcaaagggtttctctatgatcaaggggttgaggacaaagaagggtatcctaatttatcagaattgcatttgggtggtggaaatggggtttcctcttcatctccaatggtggatccttctcatgatgtctatgcagcttcaggtggtgggttacttcttggaggttcatcaaactatggtaatcatccaataaattaaaaaccattctttccaagtgcaacatagatgatgatgatgggcttggaaagcctgacttattaattattgtagggtaatttttctaattttgccaaatattgggggttgggggtggggggtatagattaattaatattaatattcttctgagtttgtatcttatcttataaccatatgtcactctgcatttttc

SEQ ID NO: 8714 - protein, 330 aa, Glycine max
  peptide (1)..(330): Ceres Seq. ID no. 14315163
  misc_feature (113)..(277): Pfam Name: DUF702 Pfam Description: Domain of unknown function
  misc_feature (18)..(314): NCBI GI NO: 18416839 NR Description: lateral root primordia (LRP1)
  misc_feature (18)..(314): NCBI GI NO: 882341 NR Description: LRP1
  misc_feature (21)..(327): NCBI GI NO: 34906658 NR Description: putative LRP(lateral root primordia) 1
  misc_feature (117)..(330): NCBI GI NO: 15239350 NR Description: zinc finger protein SHI-related
  misc_feature (45)..(302): NCBI GI NO: 15234365 NR Description: expressed protein [Arabidopsis thaliana]
  misc_feature (119)..(330): NCBI GI NO: 15222285 NR Description: hypothetical protein [Arabidopsis thaliana]
  misc_feature (107)..(274): NCBI GI NO: 15223669 NR Description: hypothetical protein [Arabidopsis thaliana]
  misc_feature (79)..(199): NCBI GI NO: 15224110 NR Description: expressed protein [Arabidopsis thaliana]
  misc_feature (216)..(278): NCBI GI NO: 15224110 NR Description: expressed protein [Arabidopsis thaliana]
  misc_feature (191)..(275): NCBI GI NO: 15226540 NR Description: expressed protein [Arabidopsis thaliana]
MWPGASRSFNYNMAPHHDIFVVAPASSFHHHHDHNDAVLSDPNNGSNNSNNNPGTALGVNVFPLLTATPCLESEGIMGNISHHRNRIQLWEDHESSPPQQQQGHVERDTCGDGGLGGSGTNTCQDCGNQAKKDCSHRRCRTCCKSRGFDCATHVKSTWVPASRRRERQLMTVAAARSSGDTSGAKKPRLVASQTTSHTSTSNNTNTTPPRSFDTGSSHQDVGFKESLPCQVRAPAVFKCVRVTAVDDGGEDEYAYQAVVKIGGHVFKGFLYDQGVEDKEGYPNLSELHLGGGNGVSSSSPMVDPSHDVYAASGGGLLLGGSSNYGNHPIN

SEQ ID NO: 8715 - protein, 318 aa, Glycine max
  peptide (1)..(318): Ceres Seq. ID no. 14315164
  misc_feature (101)..(265): Pfam Name: DUF702 Pfam Description: Domain of unknown function
  misc_feature (6)..(302): NCBI GI NO: 18416839 NR Description: lateral root primordia (LRP1)
  misc_feature (6)..(302): NCBI GI NO: 882341 NR Description: LRP1
  misc_feature (9)..(315): NCBI GI NO: 34906658 NR Description: putative LRP(lateral root primordia) 1
  misc_feature (105)..(318): NCBI GI NO: 15239350 NR Description: zinc finger protein SHI-related
  misc_feature (33)..(290): NCBI GI NO: 15234365 NR Description: expressed protein [Arabidopsis thaliana]
  misc_feature (107)..(318): NCBI GI NO: 15222285 NR Description: hypothetical protein [Arabidopsis thaliana]
  misc_feature (95)..(262): NCBI GI NO: 15223669 NR Description: hypothetical protein [Arabidopsis thaliana]
  misc_feature (67)..(187): NCBI GI NO: 15224110 NR Description: expressed protein [Arabidopsis thaliana]
  misc_feature (204)..(266): NCBI GI NO: 15224110 NR Description: expressed protein [Arabidopsis thaliana]
  misc_feature (179)..(263): NCBI GI NO: 15226540 NR Description: expressed protein [Arabidopsis thaliana]
MAPHHDIFVVAPASSFHHHHDHNDAVLSDPNNGSNNSNNNPGTALGVNVFPLLTATPCLESEGIMGNISHHRNRIQLWEDHESSPPQQQQGHVERDTCGDGGLGGSGTNTCQDCGNQAKKDCSHRRCRTCCKSRGFDCATHVKSTWVPASRRRERQLMTVAAARSSGDTSGAKKPRLVASQTTSHTSTSNNTNTTPPRSFDTGSSHQDVGFKESLPCQVRAPAVFKCVRVTAVDDGGEDEYAYQAVVKIGGHVFKGFLYDQGVEDKEGYPNLSELHLGGGNGVSSSSPMVDPSHDVYAASGGGLLLGGSSNYGNHPIN

SEQ ID NO: 8716 - protein, 254 aa, Glycine max
  peptide (1)..(254): Ceres Seq. ID no. 14315165
  misc_feature (37)..(201): Pfam Name: DUF702 Pfam Description: Domain of unknown function
  misc_feature (1)..(238): NCBI GI NO: 18416839 NR Description: lateral root primordia (LRP1)
  misc_feature (1)..(238): NCBI GI NO: 882341 NR Description: LRP1
  misc_feature (1)..(251): NCBI GI NO: 34906658 NR Description: putative LRP(lateral root primordia) 1
  misc_feature (41)..(254): NCBI GI NO: 15239350 NR Description: zinc finger protein SHI-related
  misc_feature (1)..(226): NCBI GI NO: 15234365 NR Description: expressed protein [Arabidopsis thaliana]
  misc_feature (43)..(254): NCBI GI NO: 15222285 NR Description: hypothetical protein [Arabidopsis thaliana]
  misc_feature (31)..(198): NCBI GI NO: 15223669 NR Description: hypothetical protein [Arabidopsis thaliana]
  misc_feature (3)..(123): NCBI GI NO: 15224110 NR Description: expressed protein [Arabidopsis thaliana]
  misc_feature (140)..(202): NCBI GI NO: 15224110 NR Description: expressed protein [Arabidopsis thaliana]
  misc_feature (115)..(199): NCBI GI NO: 15226540 NR Description: expressed protein [Arabidopsis thaliana]
MGNISHHRNRIQLWEDHESSPPQQQQGHVERDTCGDGGLGGSGTNTCQDCGNQAKKDCSHRRCRTCCKSRGFDCATHVKSTWVPASRRRERQLMTVAAARSSGDTSGAKKPRLVASQTTSHTSTSNNTNTTPPRSFDTGSSHQDVGFKESLPCQVRAPAVFKCVRVTAVDDGGEDEYAYQAVVKIGGHVFKGFLYDQGVEDKEGYPNLSELHLGGGNGVSSSSPMVDPSHDVYAASGGGLLLGGSSNYGNHPIN

SEQ ID NO: 8717 - DNA, 1486 bp, Glycine max
  misc_feature (1)..(1486): Ceres Seq. ID no. 15171681
aaaactccaatcaaatcgcagaaccaaaaccaaaaccaaaccctttccctctcttcaattcaaccttctccatgtctctgaaaccgtcgaattcgtcggagaatctgatgctcccggtgtctgatcctcccaagagccacgacgctgacgacaagctcttcaaaggctccgccatgaccaaacgcggagccttcgccgccgtctcctacatgtcctgcgccgttttgttggtgatgttcaataaagcagcgctttcgtcttataactttccgtccgctaacgtcatcacacttcttcagatggtatgttcgtgttgctttctctatttattgagacgctggaggatgatttctttctcaacaggtgaatccttacacatatcagataactcgacaaaatttgtatcattgaagactttgaagcacactcttcctctgtcaggagcttatttattttacatgctagtcaccatggagtctgttcgtggagtaaatgttccaatgtacacaactcttaggaggaccacagtggtatttacaatgcttgtagagtttgttctggtggggcagagatatacaccttctgttattttcagtgttggcttgattgtctttggtgcgtttgttgctggagcacgggatttatcttttgatgcttatggctatgctgttgttttcatgtcgaacatcgccacagcaatatatcttgcaaccatagcccgcattgggaaaactagtggtcttaatagctttggcctaatgtggtgcaatggtattatatgtgggcctgttttgctcatctggacatttgttcgtggtgacttgatgacaacaatcaattttccgtacctcttctcacctggttttattgttattttgcttttttcctgcgtgctggcattcttcttgaattactgtatttttctgaacacaacactaaattcagctgtgacacagacaatttgtggtaatctgaaggatctctttactattggccttggctggataatttttggtgggctaccatttgatttttggaatataattgggcaatttctcggttttgccggatctggcttatacgcctactacaagctcattggcaagtaacttattcaagtcctctagatgatgtctttttttcaatttgggagtgccatgtgcttcagtcttctgcccatctctgcatcccttgagaagggagaagaatctgaatcaaactcaggtttgggaacttgtgatcgactaatcttatactatggggaagttttgctaatacaagttgacatacaaacagtttctggggaatcagacgagcaaggctggtcatggctttaatgtattcaaacatcaaacttctaattatctaatagtatgttcacccattgcatttgatgaatctcatgcatatctttgtaagatgtaactgttaacaagcactgtattctgatctaagagaaaatttaaatctagcaattcatttcatt

SEQ ID NO: 8718 - protein, 368 aa, Glycine max
  peptide (1)..(368): Ceres Seq. ID no. 15171682
  misc_feature (285)..(362): Pfam Name: Pfam Description:  Integral membrane protein DUF6
  misc_feature (288)..(358): NCBI GI NO: 15236724 NR Description: expressed protein [Arabidopsis thaliana]
  misc_feature (34)..(73): NCBI GI NO: 15236724 NR Description: expressed protein [Arabidopsis thaliana]
  misc_feature (64)..(362): NCBI GI NO: 17535737 NR Description: SQuashed Vulva SQV-7
  misc_feature (64)..(362): NCBI GI NO: 32766366 NR Description: Unknown (protein for MGC:63651) [Danio rerio]
  misc_feature (65)..(362): NCBI GI NO: 31210267 NR Description: ENSANGP00000010400 [Anopheles gambiae]
  misc_feature (65)..(362): NCBI GI NO: 39590273 NR Description: Hypothetical protein CBG11203
  misc_feature (65)..(362): NCBI GI NO: 1665787 NR Description: Similar to a C
  misc_feature (65)..(362): NCBI GI NO: 14028875 NR Description: solute carrier family 35
  misc_feature (65)..(364): NCBI GI NO: 18417838 NR Description: expressed protein [Arabidopsis thaliana]
  misc_feature (56)..(362): NCBI GI NO: 17647441 NR Description: fringe connection CG3874-PA
NSNQIAEPKPKPNPFPLFNSTFSMSLKPSNSSENLMLPVSDPPKSHDADDKLFKGSAMTKRGAFAAVSYMSCAVLLVMFNKAALSSYNFPSANVITLLQMVCSCCFLYLLRRWRMISFSTGESLHISDNSTKFVSLKTLKHTLPLSGAYLFYMLVTMESVRGVNVPMYTTLRRTTVVFTMLVEFVLVGQRYTPSVIFSVGLIVFGAFVAGARDLSFDAYGYAVVFMSNIATAIYLATIARIGKTSGLNSFGLMWCNGIICGPVLLIWTFVRGDLMTTINFPYLFSPGFIVILLFSCVLAFFLNYCIFLNTTLNSAVTQTICGNLKDLFTIGLGWIIFGGLPFDFWNIIGQFLGFAGSGLYAYYKLIGK

SEQ ID NO: 8719 - protein, 345 aa, Glycine max
  peptide (1)..(345): Ceres Seq. ID no. 15171683
  misc_feature (262)..(339): Pfam Name: Pfam Description:  Integral membrane protein DUF6
  misc_feature (265)..(335): NCBI GI NO: 15236724 NR Description: expressed protein [Arabidopsis thaliana]
  misc_feature (11)..(50): NCBI GI NO: 15236724 NR Description: expressed protein [Arabidopsis thaliana]
  misc_feature (41)..(339): NCBI GI NO: 17535737 NR Description: SQuashed Vulva SQV-7
  misc_feature (41)..(339): NCBI GI NO: 32766366 NR Description: Unknown (protein for MGC:63651) [Danio rerio]
  misc_feature (42)..(339): NCBI GI NO: 31210267 NR Description: ENSANGP00000010400 [Anopheles gambiae]
  misc_feature (42)..(339): NCBI GI NO: 39590273 NR Description: Hypothetical protein CBG11203
  misc_feature (42)..(339): NCBI GI NO: 1665787 NR Description: Similar to a C
  misc_feature (42)..(339): NCBI GI NO: 14028875 NR Description: solute carrier family 35
  misc_feature (42)..(341): NCBI GI NO: 18417838 NR Description: expressed protein [Arabidopsis thaliana]
  misc_feature (33)..(339): NCBI GI NO: 17647441 NR Description: fringe connection CG3874-PA
MSLKPSNSSENLMLPVSDPPKSHDADDKLFKGSAMTKRGAFAAVSYMSCAVLLVMFNKAALSSYNFPSANVITLLQMVCSCCFLYLLRRWRMISFSTGESLHISDNSTKFVSLKTLKHTLPLSGAYLFYMLVTMESVRGVNVPMYTTLRRTTVVFTMLVEFVLVGQRYTPSVIFSVGLIVFGAFVAGARDLSFDAYGYAVVFMSNIATAIYLATIARIGKTSGLNSFGLMWCNGIICGPVLLIWTFVRGDLMTTINFPYLFSPGFIVILLFSCVLAFFLNYCIFLNTTLNSAVTQTICGNLKDLFTIGLGWIIFGGLPFDFWNIIGQFLGFAGSGLYAYYKLIGK

SEQ ID NO: 8720 - protein, 333 aa, Glycine max
  peptide (1)..(333): Ceres Seq. ID no. 15171684
  misc_feature (250)..(327): Pfam Name: Pfam Description:  Integral membrane protein DUF6
  misc_feature (253)..(323): NCBI GI NO: 15236724 NR Description: expressed protein [Arabidopsis thaliana]
  misc_feature (1)..(38): NCBI GI NO: 15236724 NR Description: expressed protein [Arabidopsis thaliana]
  misc_feature (29)..(327): NCBI GI NO: 17535737 NR Description: SQuashed Vulva SQV-7
  misc_feature (29)..(327): NCBI GI NO: 32766366 NR Description: Unknown (protein for MGC:63651) [Danio rerio]
  misc_feature (30)..(327): NCBI GI NO: 31210267 NR Description: ENSANGP00000010400 [Anopheles gambiae]
  misc_feature (30)..(327): NCBI GI NO: 39590273 NR Description: Hypothetical protein CBG11203
  misc_feature (30)..(327): NCBI GI NO: 1665787 NR Description: Similar to a C
  misc_feature (30)..(327): NCBI GI NO: 14028875 NR Description: solute carrier family 35
  misc_feature (30)..(329): NCBI GI NO: 18417838 NR Description: expressed protein [Arabidopsis thaliana]
  misc_feature (21)..(327): NCBI GI NO: 17647441 NR Description: fringe connection CG3874-PA
MLPVSDPPKSHDADDKLFKGSAMTKRGAFAAVSYMSCAVLLVMFNKAALSSYNFPSANVITLLQMVCSCCFLYLLRRWRMISFSTGESLHISDNSTKFVSLKTLKHTLPLSGAYLFYMLVTMESVRGVNVPMYTTLRRTTVVFTMLVEFVLVGQRYTPSVIFSVGLIVFGAFVAGARDLSFDAYGYAVVFMSNIATAIYLATIARIGKTSGLNSFGLMWCNGIICGPVLLIWTFVRGDLMTTINFPYLFSPGFIVILLFSCVLAFFLNYCIFLNTTLNSAVTQTICGNLKDLFTIGLGWIIFGGLPFDFWNIIGQFLGFAGSGLYAYYKLIGK

SEQ ID NO: 8721 - DNA, 1359 bp, Glycine max
  misc_feature (1)..(1359): Ceres Seq. ID no. 13595748
aaaattctgggagaattgaagaagccccgaattagatcggggtttgtggcaagagtgcaaattcgtgtctggagttttggtcaacagagagaaagtagggaaaagaaaaaaagcctcatcaccgacttcggcgaaatggatccgccgccggtaccgatccggtggcgcgcaaccgccatcccattctttgtgttggttctctttctatccaccatctccccttcgcgcgcaatctactgcgacgaagatgattgctacgatctacttggggttactcaaagtgccaatgcttccgaaatcaaaaaagcttactacaaactctccttgaagtatcacccggacaaaaaccctgatccggaatcgcgaaagctgtttgtaaaagtcgccaatgcttatgagattttgaaggatgaggccacgcgagagcaatatgattatgcaattgcacatccggaggaggtgttttataatactgcacgctattatcgggcttactatggtcacaagacggatccccgtgctgtgttggtcggccttcttcttattctttcaggttttcaatatctaaatcaatcaacaaggtataatcaggctgtagccatggtcaagaagacacctgcatataaaaataaactaagggcattggaacttgaacgcagtggaggggttacaaacaagaagaagagtcagaagaatatggacaagaaaacggaagaagaccttagcaaagaactcgatctgcagataactggagctgaaatgccctctgtatggaaacttcttggcgtccgctttgttctattaccgtataccttaggcaagctgctgttgtggactgcctgttggttttggagatacaaagtgaaaaagtacccttattccttggaagatgcttcttatctgacacaaagatccctcagtattcctctcgatagatggagaaatatagatgaagcaacaaaggaagatcttgtgctcagacgcttatgggagaaatcaaatctggagaactatgtagcagagatgcggaaagaatcaaagcgcagaagatagttgcattagtcggctctgccgcttttaaattactaaattttgttgcaaattgattttcggggtgggggtgataaaagcagaattattcgtggcaaccacgaaattgtggaatcatatacgtagtttattacgtttacacatgttattgttgctctctaacagtctgtaaacaatgaacaccaaagaatactgctttagatattgcttttattctttcaatgaatcgggtacataagcctcaatcttgctacaatcgcatgtttggtagtaattttgagtgcctctagttcaataattttaagggtt

SEQ ID NO: 8722 - protein, 350 aa, Glycine max
  peptide (1)..(350): Ceres Seq. ID no. 15221656
  misc_feature (84)..(148): Pfam Name: Pfam Description:  DnaJ domain
  misc_feature (49)..(350): NCBI GI NO: 30696610 NR Description: DnaJ protein family [Arabidopsis thaliana]
  misc_feature (49)..(316): NCBI GI NO: 25404348 NR Description: hypothetical protein T13M11.13
  misc_feature (152)..(350): NCBI GI NO: 19347731 NR Description: unknown protein [Arabidopsis thaliana]
  misc_feature (64)..(349): NCBI GI NO: 18859921 NR Description: CG7872-PA [Drosophila melanogaster]
  misc_feature (54)..(349): NCBI GI NO: 12313893 NR Description: bA16L21
  misc_feature (78)..(349): NCBI GI NO: 38078426 NR Description: RIKEN cDNA 2010203O07 [Mus musculus]
  misc_feature (65)..(349): NCBI GI NO: 34868434 NR Description: similar to bA16L21
  misc_feature (57)..(341): NCBI GI NO: 39593758 NR Description: Hypothetical protein CBG06069
  misc_feature (57)..(341): NCBI GI NO: 17538212 NR Description: DNaJ domain
  misc_feature (79)..(347): NCBI GI NO: 23508632 NR Description: hypothetical protein, conserved
KILGELKKPRIRSGFVARVQIRVWSFGQQRESREKKKSLITDFGEMDPPPVPIRWRATAIPFFVLVLFLSTISPSRAIYCDEDDCYDLLGVTQSANASEIKKAYYKLSLKYHPDKNPDPESRKLFVKVANAYEILKDEATREQYDYAIAHPEEVFYNTARYYRAYYGHKTDPRAVLVGLLLILSGFQYLNQSTRYNQAVAMVKKTPAYKNKLRALELERSGGVTNKKKSQKNMDKKTEEDLSKELDLQITGAEMPSVWKLLGVRFVLLPYTLGKLLLWTACWFWRYKVKKYPYSLEDASYLTQRSLSIPLDRWRNIDEATKEDLVLRRLWEKSNLENYVAEMRKESKRRR

SEQ ID NO: 8723 - protein, 305 aa, Glycine max
  peptide (1)..(305): Ceres Seq. ID no. 15221657
  misc_feature (39)..(103): Pfam Name: Pfam Description:  DnaJ domain
  misc_feature (4)..(305): NCBI GI NO: 30696610 NR Description: DnaJ protein family [Arabidopsis thaliana]
  misc_feature (4)..(271): NCBI GI NO: 25404348 NR Description: hypothetical protein T13M11.13
  misc_feature (107)..(305): NCBI GI NO: 19347731 NR Description: unknown protein [Arabidopsis thaliana]
  misc_feature (19)..(304): NCBI GI NO: 18859921 NR Description: CG7872-PA [Drosophila melanogaster]
  misc_feature (9)..(304): NCBI GI NO: 12313893 NR Description: bA16L21
  misc_feature (33)..(304): NCBI GI NO: 38078426 NR Description: RIKEN cDNA 2010203O07 [Mus musculus]
  misc_feature (20)..(304): NCBI GI NO: 34868434 NR Description: similar to bA16L21
  misc_feature (12)..(296): NCBI GI NO: 39593758 NR Description: Hypothetical protein CBG06069
  misc_feature (12)..(296): NCBI GI NO: 17538212 NR Description: DNaJ domain
  misc_feature (34)..(302): NCBI GI NO: 23508632 NR Description: hypothetical protein, conserved
MDPPPVPIRWRATAIPFFVLVLFLSTISPSRAIYCDEDDCYDLLGVTQSANASEIKKAYYKLSLKYHPDKNPDPESRKLFVKVANAYEILKDEATREQYDYAIAHPEEVFYNTARYYRAYYGHKTDPRAVLVGLLLILSGFQYLNQSTRYNQAVAMVKKTPAYKNKLRALELERSGGVTNKKKSQKNMDKKTEEDLSKELDLQITGAEMPSVWKLLGVRFVLLPYTLGKLLLWTACWFWRYKVKKYPYSLEDASYLTQRSLSIPLDRWRNIDEATKEDLVLRRLWEKSNLENYVAEMRKESKRRR

SEQ ID NO: 8724 - DNA, 1341 bp, Glycine max
  misc_feature (1)..(1341): Ceres Seq. ID no. 14315170
agatttaattcctttcaaccaaacacaccaaaataagccgggcgccaaaacaaataagccggaatcaaagagtaccctttccagccttccgtaccaaacaaaattgaatctctcttccgcacaaacaacctctcacgccccaaagccacacacaaaacatttaccttttccaacccttcaattccctaaacatttttcttttccttcgaactccaattccctcaccagaacacggtcaccattgttttccctttcaacaacattcgccatcctttcgcgacgaagagaaaaaaaaaaggggtgttagggtttcgattctctgcgacgctctccgcattgcgctaccctgcaccttcctcaccatatcgcgcgcctctctcactcccctactgtttttccgctccccaccccctctctctgtgttgcgaaaattagggttcataggtttggggctaattcttcttccgatttcgaaccgagcgcaatcgtaaagagagaaaatgtacgctgatcgcgtggagggtggagcaaggaggccagtgaaggaacgccttaatgatgtgaatggtgtcagtggctctactcgcccgcagcagcagcgtcaaatcactggcaagaggtcaaggcaagatgacaagtgggaacatgatctctttgacaatgacgaaccccggatcactaatcgcaaagttagtgctcaagatcttcgcctcaagcttcaaaggaagggtcttcaacctgcatctcagagtggaaagagttctgccccaaacgtgctggatctccgtgaaaggctatcagggacaatggcaccacaacctacaaattatgatctgcctaagacaaaagttattaaaccaagcagtaaaagtgttggtgttgaggctcctgcagtgcagatcaaaaggccagctgacccagctcctaaaaagtcatggaaggctggtccttcagttgatgaatttttgcggtccttgggtctcgaaaagtatctcataacttttcaggctgaagaagttgatatgacagctctcaatcatatgactgatgaagatctcaaggctatgggcataccaatgggaccaagaaagaagatacttttagcactggagtcgaaagtctaacatttagttatggaattgattttctaagctggatggtggtgggaggagatcaggatctaaaaaccaagtgtaatagcatagttctttgattattttcgtttttaatattttcccttactttttagacattaatcaagttaattttggtgtttattttgctaaaccccgtcaatctcctgaaactctcttataatgcaattaatggatttgagagttt

SEQ ID NO: 8725 - protein, 207 aa, Glycine max
  peptide (1)..(207): Ceres Seq. ID no. 14315171
  misc_feature (145)..(206): Pfam Name: Sterile alpha motif Pfam Description: SAM domain
  misc_feature (1)..(206): NCBI GI NO: 18397861 NR Description: expressed protein [Arabidopsis thaliana]
  misc_feature (1)..(203): NCBI GI NO: 30695517 NR Description: expressed protein [Arabidopsis thaliana]
  misc_feature (1)..(193): NCBI GI NO: 39546279 NR Description: OSJNBa0083D01.12
  misc_feature (70)..(203): NCBI GI NO: 38345636 NR Description: OSJNBb0048E02.6
  misc_feature (151)..(205): NCBI GI NO: 22330538 NR Description: expressed protein [Arabidopsis thaliana]
MYADRVEGGARRPVKERLNDVNGVSGSTRPQQQRQITGKRSRQDDKWEHDLFDNDEPRITNRKVSAQDLRLKLQRKGLQPASQSGKSSAPNVLDLRERLSGTMAPQPTNYDLPKTKVIKPSSKSVGVEAPAVQIKRPADPAPKKSWKAGPSVDEFLRSLGLEKYLITFQAEEVDMTALNHMTDEDLKAMGIPMGPRKKILLALESKV

SEQ ID NO: 8726 - protein, 144 aa, Glycine max
  peptide (1)..(144): Ceres Seq. ID no. 14315172
MVSVALLARSSSVKSLARGQGKMTSGNMISLTMTNPGSLIAKLVLKIFASSFKGRVFNLHLRVERVLPQTCWISVKGYQGQWHHNLQIMICLRQKLLNQAVKVLVLRLLQCRSKGQLTQLLKSHGRLVLQLMNFCGPWVSKSIS

SEQ ID NO: 8727 - protein, 122 aa, Glycine max
  peptide (1)..(122): Ceres Seq. ID no. 14315173
MTSGNMISLTMTNPGSLIAKLVLKIFASSFKGRVFNLHLRVERVLPQTCWISVKGYQGQWHHNLQIMICLRQKLLNQAVKVLVLRLLQCRSKGQLTQLLKSHGRLVLQLMNFCGPWVSKSIS

SEQ ID NO: 8728 - DNA, 2222 bp, Glycine max
  misc_feature (1)..(2222): Ceres Seq. ID no. 15177274
ctgatgtttcaatagggtttcgaatttttctctgtttccctctgagactctctctatgctttggttttctcagatttttccaaattcgcggctcttccaggttgaatttggtagttttttcaatctagggttagggttttgtgcgtgctagtcaatggtttgttgcgtgcaaatttcatgaagagtgttatttatatttccgtacccgcttcagtttcttcgtaggttctgttgcagtgagaattgggcactttctcctttcgattttccggtcgaatcaagcatcaaaatctgagatttttcttttttgcaagtggtttttttagatttggggtagattttttttttgttttctttttattttgggcttcgtagtgcattgaattggcgcggcattcactggaatttgcgacgtgggagctggagaagctgcgatgaagtgtggtgcttggagggtattcttaaagtagcactcaattcgaggtttaatgtttggtcagagcatggattctgcaaggaatgcgggtggtgtggcagggacagtgctaattcccatgcgttttgtgtggccatatggaggaaggagtgtgtttctcagtggttctttcacaaggtggttggagcttctaccgatgtcgccagtggaaggttgtccaactgtgtttcaagtgatttataacttgccacccgggtaccatcagtacaagttttttgttgatggagaatggcgccatgatgaacatcaaccttatgtacctggagattatgggatagtcaacactgtcttcttggccactgatcctaactacatacctgttttacccccagacgttgcttctggaaatagcatggatgtggataatgatgcttttcgacgaatggtccgtctgaccgatggaacactgagtgaggtgctgccaagaatatcagatactgatgtacagatctcccgtcagcgtatttctgcatttctatcttcacacaccgcttatgaattacttcctgagtcaggcaaggttgttgctttggatgttgatctacccgtgaaacaggcatttcatatattgcatgagcagggaattttcatggctcctctttgggacttctgcaaagggcaatttgttggtgttcttagtgctttggattttattttaattttaagagagctggggaatcatggatctaatctgacagaagaggagcttgaaacacataccatatcagcttggaaagaaggaaagtcgtacttaaatagacagaacaatggacatggaactatgttttcaagacgatttatccatgcaggaccatatgataatctgaaagatattgccatgaagatcttgcaaaaggaggtttcaacagttcctattatccattcatcttctgaagatgcttcatttccacagttactacatcttgcttcactttcaggaatacttaaatgcatttgtaggtattttaggcactgctctagttccctgcctgtacttcaacttccaatctgtgcaatacctgtgggcacgtgggtgcccaaaattggggaatcaaatcggcagcctctagcaatgttgagaccaaccgcttctcttgcgtcagccctaaatttattagttcaagcccaagtaagctcaataccaatagttgatgataatgactcattactggatatatattgtcggagtgacataacagctttggcaaagaacagagcatatgcacatattaatcttgatgaaatgacagttcatcaggctttgcagttgggccaggacgcatatagtccctatgagcttagaagtcaaagatgtcagatgtgtttgcgttctgatcctctgcataaagtgatggaacgcttggcaaatccaggtgtcaggcggcttgtcatcgtggaagctggcagcaagcgtgtagaaggcattgtttcattgagggacatattcaagttcttcattggtgattagttttggattggtgaatggaaaagtaaaatggtatgtgctgtggttatgatactagagcatccatacaaccagccaccatcacttgtccaaccattgaaagtgctttctacacggtgattttatctctcatttcattgtaatacaattggattggcctcttgctttattgccttttttaagattttaggctgagaaagaggcctgtaaattcagagtatttgattgccccaaatttattcatctctccccattcgtatt

SEQ ID NO: 8729 - protein, 491 aa, Glycine max
  peptide (1)..(491): Ceres Seq. ID no. 15177275
  misc_feature (171)..(225): Pfam Name: Pfam Description:  CBS domain
  misc_feature (1)..(490): NCBI GI NO: 18390971 NR Description: protein kinase, putative [Arabidopsis thaliana]
  misc_feature (1)..(489): NCBI GI NO: 11139548 NR Description: protein kinase AKINbetagamma-2 [Zea mays]
  misc_feature (1)..(489): NCBI GI NO: 30102976 NR Description: putative protein kinase AKINbetagamma
  misc_feature (1)..(489): NCBI GI NO: 11139546 NR Description: protein kinase AKINbetagamma-1 [Zea mays]
  misc_feature (16)..(490): NCBI GI NO: 29887975 NR Description: AKIN betagamma [Medicago truncatula]
  misc_feature (113)..(490): NCBI GI NO: 9965729 NR Description: putative activator subunit of SNF1-related proteinkinase SNF4
  misc_feature (197)..(461): NCBI GI NO: 25402511 NR Description: hypothetical protein
  misc_feature (20)..(490): NCBI GI NO: 21740621 NR Description: OSJNBb0012E08.3
  misc_feature (270)..(489): NCBI GI NO: 24648663 NR Description: SNF4/AMP-activated protein kinase gamma subunitCG17299-PH
  misc_feature (108)..(296): NCBI GI NO: 24648663 NR Description: SNF4/AMP-activated protein kinase gamma subunitCG17299-PH
MFGQSMDSARNAGGVAGTVLIPMRFVWPYGGRSVFLSGSFTRWLELLPMSPVEGCPTVFQVIYNLPPGYHQYKFFVDGEWRHDEHQPYVPGDYGIVNTVFLATDPNYIPVLPPDVASGNSMDVDNDAFRRMVRLTDGTLSEVLPRISDTDVQISRQRISAFLSSHTAYELLPESGKVVALDVDLPVKQAFHILHEQGIFMAPLWDFCKGQFVGVLSALDFILILRELGNHGSNLTEEELETHTISAWKEGKSYLNRQNNGHGTMFSRRFIHAGPYDNLKDIAMKILQKEVSTVPIIHSSSEDASFPQLLHLASLSGILKCICRYFRHCSSSLPVLQLPICAIPVGTWVPKIGESNRQPLAMLRPTASLASALNLLVQAQVSSIPIVDDNDSLLDIYCRSDITALAKNRAYAHINLDEMTVHQALQLGQDAYSPYELRSQRCQMCLRSDPLHKVMERLANPGVRRLVIVEAGSKRVEGIVSLRDIFKFFIGD

SEQ ID NO: 8730 - protein, 486 aa, Glycine max
  peptide (1)..(486): Ceres Seq. ID no. 15177276
  misc_feature (166)..(220): Pfam Name: Pfam Description:  CBS domain
  misc_feature (1)..(485): NCBI GI NO: 18390971 NR Description: protein kinase, putative [Arabidopsis thaliana]
  misc_feature (1)..(484): NCBI GI NO: 11139548 NR Description: protein kinase AKINbetagamma-2 [Zea mays]
  misc_feature (1)..(484): NCBI GI NO: 30102976 NR Description: putative protein kinase AKINbetagamma
  misc_feature (1)..(484): NCBI GI NO: 11139546 NR Description: protein kinase AKINbetagamma-1 [Zea mays]
  misc_feature (11)..(485): NCBI GI NO: 29887975 NR Description: AKIN betagamma [Medicago truncatula]
  misc_feature (108)..(485): NCBI GI NO: 9965729 NR Description: putative activator subunit of SNF1-related proteinkinase SNF4
  misc_feature (192)..(456): NCBI GI NO: 25402511 NR Description: hypothetical protein
  misc_feature (15)..(485): NCBI GI NO: 21740621 NR Description: OSJNBb0012E08.3
  misc_feature (265)..(484): NCBI GI NO: 24648663 NR Description: SNF4/AMP-activated protein kinase gamma subunitCG17299-PH
  misc_feature (103)..(291): NCBI GI NO: 24648663 NR Description: SNF4/AMP-activated protein kinase gamma subunitCG17299-PH
MDSARNAGGVAGTVLIPMRFVWPYGGRSVFLSGSFTRWLELLPMSPVEGCPTVFQVIYNLPPGYHQYKFFVDGEWRHDEHQPYVPGDYGIVNTVFLATDPNYIPVLPPDVASGNSMDVDNDAFRRMVRLTDGTLSEVLPRISDTDVQISRQRISAFLSSHTAYELLPESGKVVALDVDLPVKQAFHILHEQGIFMAPLWDFCKGQFVGVLSALDFILILRELGNHGSNLTEEELETHTISAWKEGKSYLNRQNNGHGTMFSRRFIHAGPYDNLKDIAMKILQKEVSTVPIIHSSSEDASFPQLLHLASLSGILKCICRYFRHCSSSLPVLQLPICAIPVGTWVPKIGESNRQPLAMLRPTASLASALNLLVQAQVSSIPIVDDNDSLLDIYCRSDITALAKNRAYAHINLDEMTVHQALQLGQDAYSPYELRSQRCQMCLRSDPLHKVMERLANPGVRRLVIVEAGSKRVEGIVSLRDIFKFFIGD

SEQ ID NO: 8731 - protein, 469 aa, Glycine max
  peptide (1)..(469): Ceres Seq. ID no. 15177277
  misc_feature (149)..(203): Pfam Name: Pfam Description:  CBS domain
  misc_feature (1)..(468): NCBI GI NO: 18390971 NR Description: protein kinase, putative [Arabidopsis thaliana]
  misc_feature (1)..(467): NCBI GI NO: 11139548 NR Description: protein kinase AKINbetagamma-2 [Zea mays]
  misc_feature (1)..(467): NCBI GI NO: 30102976 NR Description: putative protein kinase AKINbetagamma
  misc_feature (1)..(467): NCBI GI NO: 11139546 NR Description: protein kinase AKINbetagamma-1 [Zea mays]
  misc_feature (1)..(468): NCBI GI NO: 29887975 NR Description: AKIN betagamma [Medicago truncatula]
  misc_feature (91)..(468): NCBI GI NO: 9965729 NR Description: putative activator subunit of SNF1-related proteinkinase SNF4
  misc_feature (175)..(439): NCBI GI NO: 25402511 NR Description: hypothetical protein
  misc_feature (1)..(468): NCBI GI NO: 21740621 NR Description: OSJNBb0012E08.3
  misc_feature (248)..(467): NCBI GI NO: 24648663 NR Description: SNF4/AMP-activated protein kinase gamma subunitCG17299-PH
  misc_feature (86)..(274): NCBI GI NO: 24648663 NR Description: SNF4/AMP-activated protein kinase gamma subunitCG17299-PH
MRFVWPYGGRSVFLSGSFTRWLELLPMSPVEGCPTVFQVIYNLPPGYHQYKFFVDGEWRHDEHQPYVPGDYGIVNTVFLATDPNYIPVLPPDVASGNSMDVDNDAFRRMVRLTDGTLSEVLPRISDTDVQISRQRISAFLSSHTAYELLPESGKVVALDVDLPVKQAFHILHEQGIFMAPLWDFCKGQFVGVLSALDFILILRELGNHGSNLTEEELETHTISAWKEGKSYLNRQNNGHGTMFSRRFIHAGPYDNLKDIAMKILQKEVSTVPIIHSSSEDASFPQLLHLASLSGILKCICRYFRHCSSSLPVLQLPICAIPVGTWVPKIGESNRQPLAMLRPTASLASALNLLVQAQVSSIPIVDDNDSLLDIYCRSDITALAKNRAYAHINLDEMTVHQALQLGQDAYSPYELRSQRCQMCLRSDPLHKVMERLANPGVRRLVIVEAGSKRVEGIVSLRDIFKFFIGD

SEQ ID NO: 8732 - DNA, 1438 bp, Glycine max
  misc_feature (1)..(1438): Ceres Seq. ID no. 13594269
agttaaacctctggtcttcggcatgaacgaaaacctgttcgaacgaatgttgtgctccttcaaagcttctagtgttcttccaatttcgctccttcaacacttcggccccaattgctgttagtggtcgtcttctttgttcaaccacgcttctctctagtctctatgaatagcgcgcatttgtagaatctgttctggagatacgagtaagcccacagattttttttttgtttttcctgtgggtgtgcatggtttacatgtgatgcaaggtttctgttaagctagcttggcaatcatttggctggcatggacatagcacattgctatttaaagggtaatgctgatgctgtggagttttgtccacatgatccctaccataatgttttagcagtatccacttacacattacaagaaggttctcagccctgtcgacatggaagcatttcactcttcaatgttgatgtggaaccaggtcaccttgacatggtttttagtgaggaaactgctgggatttttgacataaagtggaatccacctggcgggcatgcaagtccttttctagctcaagcagatgctgatggatacttgagaattaaaatgctggagggttgctgtaatggagtggaaggggttaatctaaaggagatcacaaatgaaaaaatcagtaactctatgtgcttgtacctggattggaacccttcagccacatccatcacagtggggctttctgacggctctgtgtctattgtttcttttcttgaatccaagctggaaattcaagaagagtggaaagctcatgattatgaactttggacaacctcctttgatatccaccaaccaaatttggtatacactggctctgatgattgtaaattcagttgttgggatttgcgagataaacctcccaatgtggtatttcagagctctaaagtccacaaaatgggtgtttgttgcattgagaagagtccacatgacccaaataccttgttaactggcagttatgatgaattcctaagggtatgggatttaagatcaatctcaaaaccccttaattcaattaacttggggggaggagtttggagggttaagcaccaccccttcattccaggcttggttttggctgcttgtatgcacaatggttttgctattgtcgccattaaaggcaacaatgccgaagtgtcggaaacttacaagaagcatgattctcttgcctatggagcagattggcagaaaggagaagcaaatcacataggtgggaataccaaaccactggtggctacttgctcattctacgacaaacttgttcgggtgtggaggccaggaaatgatcttatcttgtagaatgtagattgatgcttaacgttaagtcatgaacccacttgaaaatgtgatacgtagtttatttattgaattatggttgaattacatgacactttcattt

SEQ ID NO: 8733 - protein, 344 aa, Glycine max
  peptide (1)..(344): Ceres Seq. ID no. 13594270
  misc_feature (1)..(341): NCBI GI NO: 15242588 NR Description: WD-40 repeat protein family [Arabidopsis thaliana]
  misc_feature (1)..(264): NCBI GI NO: 26450621 NR Description: unknown protein [Arabidopsis thaliana]
  misc_feature (11)..(337): NCBI GI NO: 18858115 NR Description: CG3184-PA [Drosophila melanogaster]
  misc_feature (36)..(307): NCBI GI NO: 21313066 NR Description: RIKEN cDNA 2810443J12 [Mus musculus]
  misc_feature (36)..(307): NCBI GI NO: 24308452 NR Description: hypothetical protein BC017335 [Homo sapiens]
  misc_feature (36)..(307): NCBI GI NO: 34853114 NR Description: similar to RIKEN cDNA 2810443J12
  misc_feature (120)..(336): NCBI GI NO: 19075894 NR Description: hypothetical protein [Schizosaccharomyces pombe]
  misc_feature (121)..(307): NCBI GI NO: 26352908 NR Description: unnamed protein product [Mus musculus]
  misc_feature (23)..(336): NCBI GI NO: 23612162 NR Description: hypothetical protein, conserved
  misc_feature (228)..(307): NCBI GI NO: 25455692 NR Description: Similar to hypothetical protein BC017335
MDIAHCYLKGNADAVEFCPHDPYHNVLAVSTYTLQEGSQPCRHGSISLFNVDVEPGHLDMVFSEETAGIFDIKWNPPGGHASPFLAQADADGYLRIKMLEGCCNGVEGVNLKEITNEKISNSMCLYLDWNPSATSITVGLSDGSVSIVSFLESKLEIQEEWKAHDYELWTTSFDIHQPNLVYTGSDDCKFSCWDLRDKPPNVVFQSSKVHKMGVCCIEKSPHDPNTLLTGSYDEFLRVWDLRSISKPLNSINLGGGVWRVKHHPFIPGLVLAACMHNGFAIVAIKGNNAEVSETYKKHDSLAYGADWQKGEANHIGGNTKPLVATCSFYDKLVRVWRPGNDLIL

SEQ ID NO: 8734 - protein, 285 aa, Glycine max
  peptide (1)..(285): Ceres Seq. ID no. 13594271
  misc_feature (1)..(282): NCBI GI NO: 15242588 NR Description: WD-40 repeat protein family [Arabidopsis thaliana]
  misc_feature (1)..(205): NCBI GI NO: 26450621 NR Description: unknown protein [Arabidopsis thaliana]
  misc_feature (1)..(278): NCBI GI NO: 18858115 NR Description: CG3184-PA [Drosophila melanogaster]
  misc_feature (1)..(248): NCBI GI NO: 21313066 NR Description: RIKEN cDNA 2810443J12 [Mus musculus]
  misc_feature (1)..(248): NCBI GI NO: 24308452 NR Description: hypothetical protein BC017335 [Homo sapiens]
  misc_feature (1)..(248): NCBI GI NO: 34853114 NR Description: similar to RIKEN cDNA 2810443J12
  misc_feature (61)..(277): NCBI GI NO: 19075894 NR Description: hypothetical protein [Schizosaccharomyces pombe]
  misc_feature (62)..(248): NCBI GI NO: 26352908 NR Description: unnamed protein product [Mus musculus]
  misc_feature (1)..(277): NCBI GI NO: 23612162 NR Description: hypothetical protein, conserved
  misc_feature (169)..(248): NCBI GI NO: 25455692 NR Description: Similar to hypothetical protein BC017335
MVFSEETAGIFDIKWNPPGGHASPFLAQADADGYLRIKMLEGCCNGVEGVNLKEITNEKISNSMCLYLDWNPSATSITVGLSDGSVSIVSFLESKLEIQEEWKAHDYELWTTSFDIHQPNLVYTGSDDCKFSCWDLRDKPPNVVFQSSKVHKMGVCCIEKSPHDPNTLLTGSYDEFLRVWDLRSISKPLNSINLGGGVWRVKHHPFIPGLVLAACMHNGFAIVAIKGNNAEVSETYKKHDSLAYGADWQKGEANHIGGNTKPLVATCSFYDKLVRVWRPGNDLIL

SEQ ID NO: 8735 - protein, 247 aa, Glycine max
  peptide (1)..(247): Ceres Seq. ID no. 13594272
  misc_feature (1)..(244): NCBI GI NO: 15242588 NR Description: WD-40 repeat protein family [Arabidopsis thaliana]
  misc_feature (1)..(167): NCBI GI NO: 26450621 NR Description: unknown protein [Arabidopsis thaliana]
  misc_feature (1)..(240): NCBI GI NO: 18858115 NR Description: CG3184-PA [Drosophila melanogaster]
  misc_feature (1)..(210): NCBI GI NO: 21313066 NR Description: RIKEN cDNA 2810443J12 [Mus musculus]
  misc_feature (1)..(210): NCBI GI NO: 24308452 NR Description: hypothetical protein BC017335 [Homo sapiens]
  misc_feature (1)..(210): NCBI GI NO: 34853114 NR Description: similar to RIKEN cDNA 2810443J12
  misc_feature (23)..(239): NCBI GI NO: 19075894 NR Description: hypothetical protein [Schizosaccharomyces pombe]
  misc_feature (24)..(210): NCBI GI NO: 26352908 NR Description: unnamed protein product [Mus musculus]
  misc_feature (1)..(239): NCBI GI NO: 23612162 NR Description: hypothetical protein, conserved
  misc_feature (131)..(210): NCBI GI NO: 25455692 NR Description: Similar to hypothetical protein BC017335
MLEGCCNGVEGVNLKEITNEKISNSMCLYLDWNPSATSITVGLSDGSVSIVSFLESKLEIQEEWKAHDYELWTTSFDIHQPNLVYTGSDDCKFSCWDLRDKPPNVVFQSSKVHKMGVCCIEKSPHDPNTLLTGSYDEFLRVWDLRSISKPLNSINLGGGVWRVKHHPFIPGLVLAACMHNGFAIVAIKGNNAEVSETYKKHDSLAYGADWQKGEANHIGGNTKPLVATCSFYDKLVRVWRPGNDLIL

SEQ ID NO: 8736 - DNA, 663 bp, Glycine max
  misc_feature (1)..(663): Ceres Seq. ID no. 13594273
atattcaaaagccgaacccaaataacacaacacaaaacgatcttttatttctctgtctagagaagaatctagcaagccttgctcgtcacaaaatcaaaggttgcaactgagaactcactccttcgaatcaaaatcaaaaaatgtcggtgactctgcacacaaacctaggcgacatcaagtgtgaaatcttctgcgacgaggtccctaaaacctccgagaattttttagcgctatgtgcaagtggttactatgatgggactatatttcaccgcaacattaagggttttatgattcaaggtggagatccaactggaactggcaaagggggaaccagtatatggggcaagaaatttaacgatgagataagagaatctctgaagcacaatgcaagaggaatattagcaatggccaatagtggtccaaatactaatggaagccaatttttcttgacttatgcaaagctttatccaatcactgtgtgtggtgtgtgcttaagttaaaaacttgccttccaattaatgtaacgagtgtttcctttctcatttccttttgccacagaattgtgagagtcagttgatatctttgtatgtgacttcaataaattttaataaaagaaagcatcatttaaaaaaaaaaaaaaaaaagcttatcgataccgtcgac

SEQ ID NO: 8737 - protein, 119 aa, Glycine max
  peptide (1)..(119): Ceres Seq. ID no. 13594274
  misc_feature (1)..(107): NCBI GI NO: 30678211 NR Description: expressed protein [Arabidopsis thaliana]
  misc_feature (1)..(107): NCBI GI NO: 6006361 NR Description: ESTs AU030008
  misc_feature (1)..(107): NCBI GI NO: 14043400 NR Description: Unknown (protein for MGC:10732) [Homo sapiens]
  misc_feature (1)..(107): NCBI GI NO: 19557636 NR Description: peptidylprolyl isomerase-like protein 3 isoformPPIL3b
  misc_feature (1)..(107): NCBI GI NO: 21746159 NR Description: peptidylprolyl isomerase-like 3
  misc_feature (1)..(107): NCBI GI NO: 28269677 NR Description: peptidylprolyl isomerase-like 3
  misc_feature (1)..(107): NCBI GI NO: 28190012 NR Description: CYP10L [Mus musculus]
  misc_feature (1)..(107): NCBI GI NO: 29028318 NR Description: cyclophilin [Homo sapiens]
  misc_feature (1)..(105): NCBI GI NO: 27924331 NR Description: Similar to peptidylprolyl isomerase
  misc_feature (1)..(107): NCBI GI NO: 39590255 NR Description: Hypothetical protein CBG11184
MSVTLHTNLGDIKCEIFCDEVPKTSENFLALCASGYYDGTIFHRNIKGFMIQGGDPTGTGKGGTSIWGKKFNDEIRESLKHNARGILAMANSGPNTNGSQFFLTYAKLYPITVCGVCLS

SEQ ID NO: 8738 - protein, 70 aa, Glycine max
  peptide (1)..(70): Ceres Seq. ID no. 13594275
  misc_feature (1)..(58): NCBI GI NO: 30678211 NR Description: expressed protein [Arabidopsis thaliana]
  misc_feature (1)..(58): NCBI GI NO: 6006361 NR Description: ESTs AU030008
  misc_feature (1)..(58): NCBI GI NO: 14043400 NR Description: Unknown (protein for MGC:10732) [Homo sapiens]
  misc_feature (1)..(58): NCBI GI NO: 19557636 NR Description: peptidylprolyl isomerase-like protein 3 isoformPPIL3b
  misc_feature (1)..(58): NCBI GI NO: 21746159 NR Description: peptidylprolyl isomerase-like 3
  misc_feature (1)..(58): NCBI GI NO: 28269677 NR Description: peptidylprolyl isomerase-like 3
  misc_feature (1)..(58): NCBI GI NO: 28190012 NR Description: CYP10L [Mus musculus]
  misc_feature (1)..(58): NCBI GI NO: 29028318 NR Description: cyclophilin [Homo sapiens]
  misc_feature (1)..(56): NCBI GI NO: 27924331 NR Description: Similar to peptidylprolyl isomerase
  misc_feature (1)..(58): NCBI GI NO: 39590255 NR Description: Hypothetical protein CBG11184
MIQGGDPTGTGKGGTSIWGKKFNDEIRESLKHNARGILAMANSGPNTNGSQFFLTYAKLYPITVCGVCLS

SEQ ID NO: 8739 - DNA, 613 bp, Glycine max
  misc_feature (1)..(613): Ceres Seq. ID no. 13638275
tttattatcatagtagatattcattccccttatctttctctcttctctctccccgcccaaaccctaactccctaccctattccgctttctctcatccatcatgaaaggaggaaagtccaagaccgaatctaagagagccgatgccaaacttgctgtgaataagaagggcgccgccaccaagactaggaaacccgccggaaaggggaaggcagcgaaagatcctaacaagccaaagaggcctccaagtgctttcttcgttttcatggaggaattcaggaaggtgttcaacaaggaacatcccgacaacaaagcagtgtctgctgtgggcaaagctgctggagcaaaatggaagacgatgaaagcacttggatttgagtcataaccatctctgtggcaagattccccttggctctccttttgatcatctcgaagcctcctcctttgtctacaacgattgtctctgcgggaagcccctcaaaccttgctactagctcaccattacatgcaaactcaaatatcttggaaaaatatatgtatatttgcagttagaccagtgtgtaccatccttagttaactcatcggtccgtttcatgtatycaatttgttgtttgtc

SEQ ID NO: 8740 - protein, 93 aa, Glycine max
  peptide (1)..(93): Ceres Seq. ID no. 15219404
  misc_feature (1)..(86): NCBI GI NO: 123379 NR Description: HMG1/2-LIKE PROTEIN (SB11 PROTEIN)
  misc_feature (1)..(86): NCBI GI NO: 541968 NR Description: high mobility group protein HMG-1 - garden pea
  misc_feature (1)..(86): NCBI GI NO: 729737 NR Description: HMG1/2-LIKE PROTEIN
  misc_feature (1)..(88): NCBI GI NO: 18419623 NR Description: HMG-domain containing protein
  misc_feature (1)..(86): NCBI GI NO: 7446229 NR Description: high mobility group protein MNB1b - maize
  misc_feature (1)..(86): NCBI GI NO: 123378 NR Description: DNA-BINDING PROTEIN MNB1B (HMG1-LIKE PROTEIN)
  misc_feature (1)..(86): NCBI GI NO: 3885888 NR Description: high mobility group protein [Oryza sativa]
  misc_feature (1)..(86): NCBI GI NO: 1052956 NR Description: high mobility group protein 2 HMG2 [Ipomoea nil]
  misc_feature (1)..(88): NCBI GI NO: 729736 NR Description: HMG1/2-LIKE PROTEIN
  misc_feature (1)..(86): NCBI GI NO: 7446213 NR Description: high mobility group protein HMG-1 - common tobacco
MKGGKSKTESKRADAKLAVNKKGAATKTRKPAGKGKAAKDPNKPKRPPSAFFVFMEEFRKVFNKEHPDNKAVSAVGKAAGAKWKTMKALGFES

SEQ ID NO: 8741 - DNA, 1062 bp, Glycine max
  misc_feature (1)..(1062): Ceres Seq. ID no. 15225932
ggttacttttcgcatcttttcgttttgagctcaccgtggctcttctccattgtcgttttgcttctcccttcttccttcccattcaaaccctaatctgtccctcggatcccaaaattgccccaaattgagaacacgccatggcggcaacgttcgatttggttcgttccctcgcacttctcactcttgcatttgtgtgtagcgtcgcgaattcgatgcggttcgagcttcaatcgggtaacaccaagtgcatttcagaagacattaagaccaacgcgatgagtgtgggaaagtacagtgttgttaatccccgagaagggtacccacttcccgattcccacaggatcgttgtcaaggtgacgtcgcctcatgcgaacatgtatcactttggagatcatgtggattctggtaattttgcatttacggcatctgagtctggtgactactcagcttgcttttgggttcaggataccagagataccccgtcggtggtgactattgaatttgagtggagaactggggttgctgccaaagactggtccaaggttgccaagaaagggcagattgaagtaatggaatttgagttgaagaagctatatgatactatcctatccatccatgacgagatgttttatcttcgagaaagggaggaagagatgcaagatcttaacaaagcaacaaacagcaagatgtttaccttcagtttcctttcgattgtggtttgcttgtctgtggctggtttgcaactatggcatttgaagacattctttgagaggaagaagctcctctaagttcatcacacgaattttgttcatttttgcttcagaattttttttattttctgttcctggttgttccttatgtatccaaatgtatgattagttcatctttcacttttacattttatggcaactagaaattgctgctgatcgcaagtcatgttaaatgtatgttacaattatgaaccggtattaactttagaaactatagttaaatttcttaacaggcccttaaaaaaaaaaaaaaaaaaaaaaaaaaaaaaaaaaaaaaaaaaaaaaaaaaaag

SEQ ID NO: 8742 - protein, 216 aa, Glycine max
  peptide (1)..(216): Ceres Seq. ID no. 15225933
  misc_feature (13)..(216): Pfam Name: Pfam Description:  emp24/gp25L/p24 family
  misc_feature (7)..(216): NCBI GI NO: 33146897 NR Description: putative transmembrane protein
  misc_feature (13)..(216): NCBI GI NO: 21618241 NR Description: unknown [Arabidopsis thaliana]
  misc_feature (13)..(216): NCBI GI NO: 18396016 NR Description: emp24/gp25L/p24 family [Arabidopsis thaliana]
  misc_feature (10)..(216): NCBI GI NO: 15223027 NR Description: emp24/gp25L/p24 family [Arabidopsis thaliana]
  misc_feature (21)..(216): NCBI GI NO: 18921314 NR Description: putative transmembrane protein [Oryza sativa]
  misc_feature (10)..(216): NCBI GI NO: 8778403 NR Description: F16A14.23 [Arabidopsis thaliana]
  misc_feature (6)..(216): NCBI GI NO: 15227591 NR Description: emp24/gp25L/p24 family [Arabidopsis thaliana]
  misc_feature (13)..(216): NCBI GI NO: 12597802 NR Description: unknown protein [Arabidopsis thaliana]
  misc_feature (13)..(216): NCBI GI NO: 22330523 NR Description: emp24/gp25L/p24 family [Arabidopsis thaliana]
  misc_feature (8)..(216): NCBI GI NO: 11994711 NR Description: golgi-associated membrane trafficking protein-like
MAATFDLVRSLALLTLAFVCSVANSMRFELQSGNTKCISEDIKTNAMSVGKYSVVNPREGYPLPDSHRIVVKVTSPHANMYHFGDHVDSGNFAFTASESGDYSACFWVQDTRDTPSVVTIEFEWRTGVAAKDWSKVAKKGQIEVMEFELKKLYDTILSIHDEMFYLREREEEMQDLNKATNSKMFTFSFLSIVVCLSVAGLQLWHLKTFFERKKLL

SEQ ID NO: 8743 - protein, 191 aa, Glycine max
  peptide (1)..(191): Ceres Seq. ID no. 15225934
  misc_feature (1)..(191): Pfam Name: Pfam Description:  emp24/gp25L/p24 family
  misc_feature (1)..(191): NCBI GI NO: 33146897 NR Description: putative transmembrane protein
  misc_feature (1)..(191): NCBI GI NO: 21618241 NR Description: unknown [Arabidopsis thaliana]
  misc_feature (1)..(191): NCBI GI NO: 18396016 NR Description: emp24/gp25L/p24 family [Arabidopsis thaliana]
  misc_feature (1)..(191): NCBI GI NO: 15223027 NR Description: emp24/gp25L/p24 family [Arabidopsis thaliana]
  misc_feature (1)..(191): NCBI GI NO: 18921314 NR Description: putative transmembrane protein [Oryza sativa]
  misc_feature (1)..(191): NCBI GI NO: 8778403 NR Description: F16A14.23 [Arabidopsis thaliana]
  misc_feature (1)..(191): NCBI GI NO: 15227591 NR Description: emp24/gp25L/p24 family [Arabidopsis thaliana]
  misc_feature (1)..(191): NCBI GI NO: 12597802 NR Description: unknown protein [Arabidopsis thaliana]
  misc_feature (1)..(191): NCBI GI NO: 22330523 NR Description: emp24/gp25L/p24 family [Arabidopsis thaliana]
  misc_feature (1)..(191): NCBI GI NO: 11994711 NR Description: golgi-associated membrane trafficking protein-like
MRFELQSGNTKCISEDIKTNAMSVGKYSVVNPREGYPLPDSHRIVVKVTSPHANMYHFGDHVDSGNFAFTASESGDYSACFWVQDTRDTPSVVTIEFEWRTGVAAKDWSKVAKKGQIEVMEFELKKLYDTILSIHDEMFYLREREEEMQDLNKATNSKMFTFSFLSIVVCLSVAGLQLWHLKTFFERKKLL

SEQ ID NO: 8744 - protein, 170 aa, Glycine max
  peptide (1)..(170): Ceres Seq. ID no. 15225935
  misc_feature (1)..(170): Pfam Name: Pfam Description:  emp24/gp25L/p24 family
  misc_feature (1)..(170): NCBI GI NO: 33146897 NR Description: putative transmembrane protein
  misc_feature (1)..(170): NCBI GI NO: 21618241 NR Description: unknown [Arabidopsis thaliana]
  misc_feature (1)..(170): NCBI GI NO: 18396016 NR Description: emp24/gp25L/p24 family [Arabidopsis thaliana]
  misc_feature (1)..(170): NCBI GI NO: 15223027 NR Description: emp24/gp25L/p24 family [Arabidopsis thaliana]
  misc_feature (1)..(170): NCBI GI NO: 18921314 NR Description: putative transmembrane protein [Oryza sativa]
  misc_feature (1)..(170): NCBI GI NO: 8778403 NR Description: F16A14.23 [Arabidopsis thaliana]
  misc_feature (1)..(170): NCBI GI NO: 15227591 NR Description: emp24/gp25L/p24 family [Arabidopsis thaliana]
  misc_feature (1)..(170): NCBI GI NO: 12597802 NR Description: unknown protein [Arabidopsis thaliana]
  misc_feature (1)..(170): NCBI GI NO: 22330523 NR Description: emp24/gp25L/p24 family [Arabidopsis thaliana]
  misc_feature (1)..(170): NCBI GI NO: 11994711 NR Description: golgi-associated membrane trafficking protein-like
MSVGKYSVVNPREGYPLPDSHRIVVKVTSPHANMYHFGDHVDSGNFAFTASESGDYSACFWVQDTRDTPSVVTIEFEWRTGVAAKDWSKVAKKGQIEVMEFELKKLYDTILSIHDEMFYLREREEEMQDLNKATNSKMFTFSFLSIVVCLSVAGLQLWHLKTFFERKKLL

SEQ ID NO: 8745 - DNA, 1299 bp, Glycine max
  misc_feature (1)..(1299): Ceres Seq. ID no. 14316550
ctcaagatcagatcctcatctaccaccattccaggtgtagccatcaaaacaacgtttgtttaacaaaacccattatcagatcagatccgatcagatcctcttcagattcggatcaccgccgagtccatgagcacgccagcgctttcagggggcacgggcctcttctctggattcacgcgtttatgcaagggccttgcggtggtgcttgtttgcggtcacattgcggttcagtttatcccttcagctgttaactatcttgctcttattcccgccaggacaatcccatttgcctggaatctcattacagctggatatgttgaacaatctatatatggggtagtggtcagcacattaagtctcctgtttattgggaagctgcttgaaccaatatggggctccagggaattctttaaatttatctttgtggttaatcttctaacttcagtatgtttattcatcactgctattgccttatactacattacaaggctggagacttacctttacatgccactttctggatttcatggagttgtatctggtttcttggttggcattaagcaaattataccagatcaagagcttcctttcattaagataaaaacaaagtggttgccatctatcactgtattgctttccattgctattagcttctggacactagaggctacagcatatcttccaaccattatatctggcacgtatataagctggatttatcttagatactggcagaggaaaccagaaactaaacatagaggtgatctgagtgaagattttgctttctccacatttttcccagaatttttaagaccagtcatagaccctatcgcttcaatatttcatcgaatgctctgtggaagatatgatgcttctaatgatggtcaaggcaacagtctggaaagtgagcctttaccaggttcggactcaattgaggcatccaggagacgagaaagaggtgctcgagcactggaagaacgattggctgcagagaggttggctgttgcacgacgtgagttgcaaagagaggctgaggaaaatgtataattccccagcgtttgtaaattttggatcagttcaggcaatatgcacctattaggagtgatattttcagaggtcgtacagtaattagaaattttttgtttaggtcaaggaaaattttaatgtggttttgccatggactatgatctttacaaaaccgaaggtttctctttcttttgtcagataaatatatttgactttcttgtgtactttacacaaatacatagaatctaaagagtttttcagttgttgtctccc

SEQ ID NO: 8746 - protein, 306 aa, Glycine max
  peptide (1)..(306): Ceres Seq. ID no. 14316551
  misc_feature (7)..(306): NCBI GI NO: 18398108 NR Description: expressed protein [Arabidopsis thaliana]
  misc_feature (9)..(306): NCBI GI NO: 6648207 NR Description: unknown protein [Arabidopsis thaliana]
  misc_feature (1)..(306): NCBI GI NO: 34395257 NR Description: putative placental protein 6
  misc_feature (1)..(292): NCBI GI NO: 21741573 NR Description: OSJNBa0094O15.3
  misc_feature (23)..(286): NCBI GI NO: 5902022 NR Description: PL6 protein [Homo sapiens]
  misc_feature (23)..(286): NCBI GI NO: 9790165 NR Description: PL6 protein; PL-6; placental protein 6
  misc_feature (23)..(286): NCBI GI NO: 34865897 NR Description: similar to PL6 protein [Rattus norvegicus]
  misc_feature (23)..(288): NCBI GI NO: 19920824 NR Description: CG9536-PA [Drosophila melanogaster]
  misc_feature (1)..(275): NCBI GI NO: 31197821 NR Description: ENSANGP00000018642 [Anopheles gambiae]
  misc_feature (41)..(246): NCBI GI NO: 32413290 NR Description: hypothetical protein [Neurospora crassa]
MSTPALSGGTGLFSGFTRLCKGLAVVLVCGHIAVQFIPSAVNYLALIPARTIPFAWNLITAGYVEQSIYGVVVSTLSLLFIGKLLEPIWGSREFFKFIFVVNLLTSVCLFITAIALYYITRLETYLYMPLSGFHGVVSGFLVGIKQIIPDQELPFIKIKTKWLPSITVLLSIAISFWTLEATAYLPTIISGTYISWIYLRYWQRKPETKHRGDLSEDFAFSTFFPEFLRPVIDPIASIFHRMLCGRYDASNDGQGNSLESEPLPGSDSIEASRRRERGARALEERLAAERLAVARRELQREAEENV

SEQ ID NO: 8747 - protein, 179 aa, Glycine max
  peptide (1)..(179): Ceres Seq. ID no. 14316552
  misc_feature (1)..(179): NCBI GI NO: 18398108 NR Description: expressed protein [Arabidopsis thaliana]
  misc_feature (1)..(179): NCBI GI NO: 6648207 NR Description: unknown protein [Arabidopsis thaliana]
  misc_feature (1)..(179): NCBI GI NO: 34395257 NR Description: putative placental protein 6
  misc_feature (1)..(165): NCBI GI NO: 21741573 NR Description: OSJNBa0094O15.3
  misc_feature (1)..(159): NCBI GI NO: 5902022 NR Description: PL6 protein [Homo sapiens]
  misc_feature (1)..(159): NCBI GI NO: 9790165 NR Description: PL6 protein; PL-6; placental protein 6
  misc_feature (1)..(159): NCBI GI NO: 34865897 NR Description: similar to PL6 protein [Rattus norvegicus]
  misc_feature (1)..(161): NCBI GI NO: 19920824 NR Description: CG9536-PA [Drosophila melanogaster]
  misc_feature (1)..(148): NCBI GI NO: 31197821 NR Description: ENSANGP00000018642 [Anopheles gambiae]
  misc_feature (1)..(119): NCBI GI NO: 32413290 NR Description: hypothetical protein [Neurospora crassa]
MPLSGFHGVVSGFLVGIKQIIPDQELPFIKIKTKWLPSITVLLSIAISFWTLEATAYLPTIISGTYISWIYLRYWQRKPETKHRGDLSEDFAFSTFFPEFLRPVIDPIASIFHRMLCGRYDASNDGQGNSLESEPLPGSDSIEASRRRERGARALEERLAAERLAVARRELQREAEENV

SEQ ID NO: 8748 - DNA, 1269 bp, Glycine max
  misc_feature (1)..(1269): Ceres Seq. ID no. 14303116
gtttataaacttgaaagaaaaaaaagaaaaagctaccctcaagcggaaagaatcaaccttcttccctttcatttctcactttcagtgttcactcactcatctccactgtgcttcttcttcatcatcattcatcttcttcttctccctctccctctcttcccttcccaatgtcctctctccaccttcttcccggcgccaccaccgcccccaactccgcattcctcctccgcccccattctcccctcttcccctccaaaaccctaacccccaaaaaacccaaacctccctccgccctcctccagtggaatcgcaagcccgagctctccggctccaccccccgcgtcgccgtcatcacctccggcaagggtggcgtgggcaagaccaccaccaccgccaacatcggcctctccctcgcccgtctcggcttctccgtggtcgccatcgacgccgacgtcggcctccgcaacctcgacctcctcctcggcctcgagaaccgcgtcaactacaccgtgatcgaggtcctgaatggcgaatgccgcctcgaccaagccctcgtccgcgacaagcgctggtccaacttcgaactcctctgcatctccaaaccccgatccaaactccccctcggattcggcggcaaggccctcacctggctcgtggacgcgctgaaagcacgttcacagggctgccccgacttcatcctcatcgactgccccgccggcattgacgccggcttcatcaccgccatcacgcccgccaacgaggccgtcctcatcactacccccgacatcaccagcctccgcgacgccgaccgcgtcaccggcctcctcgaatgcgacggaattcgggacatcaagatgatcgtcaaccgggttcggaccgacatgatcaaaggggaggacatgatgtcggtgttggacgtgcaagagatgttagggttgcctttgctcggggttattcctgaggatagtgaggttattagaagcaccaatagaggtttccctcttgtgctcaacaagcctcccactttggccggattggcgttcgaacaagccgcgtggaggctcgtggagcaagatagcatgcaggccgtggtggtggaagaacaacccaaacgtgggtttttctccttttttggtgggtaggatttaaacaaggttatgcgtaatggtgtgtatagttagttggttgggttagagcatgtttggatgagtgttgacaaaattgattttgaattgaattgatttgatttatgtttgaatggtttttatt

SEQ ID NO: 8749 - protein, 324 aa, Glycine max
  peptide (1)..(324): Ceres Seq. ID no. 14303117
  misc_feature (65)..(301): Pfam Name: Pfam Description:  4Fe-4S iron sulfur cluster binding proteins
  misc_feature (24)..(324): NCBI GI NO: 15237874 NR Description: septum site-determining MinD (dbj|BAA90261.1)
  misc_feature (89)..(324): NCBI GI NO: 9971822 NR Description: minD [Tagetes erecta]
  misc_feature (1)..(92): NCBI GI NO: 9971822 NR Description: minD [Tagetes erecta]
  misc_feature (27)..(324): NCBI GI NO: 34897748 NR Description: Similar to Chlorella vulgaris C-27 chloroplast DNA
  misc_feature (45)..(300): NCBI GI NO: 11466429 NR Description: septum-site determining protein
  misc_feature (58)..(319): NCBI GI NO: 7524873 NR Description: septum site-determining protein
  misc_feature (58)..(323): NCBI GI NO: 23452400 NR Description: cell division inhibitor MinD
  misc_feature (51)..(320): NCBI GI NO: 11467859 NR Description: septum-site determining protein
  misc_feature (57)..(303): NCBI GI NO: 5748667 NR Description: cell division inhibitor MinD
  misc_feature (58)..(303): NCBI GI NO: 11467635 NR Description: septum-site determining protein [Guillardia theta]
MSSLHLLPGATTAPNSAFLLRPHSPLFPSKTLTPKKPKPPSALLQWNRKPELSGSTPRVAVITSGKGGVGKTTTTANIGLSLARLGFSVVAIDADVGLRNLDLLLGLENRVNYTVIEVLNGECRLDQALVRDKRWSNFELLCISKPRSKLPLGFGGKALTWLVDALKARSQGCPDFILIDCPAGIDAGFITAITPANEAVLITTPDITSLRDADRVTGLLECDGIRDIKMIVNRVRTDMIKGEDMMSVLDVQEMLGLPLLGVIPEDSEVIRSTNRGFPLVLNKPPTLAGLAFEQAAWRLVEQDSMQAVVVEEQPKRGFFSFFGG

SEQ ID NO: 8750 - protein, 240 aa, Glycine max
  peptide (1)..(240): Ceres Seq. ID no. 14303118
  misc_feature (59)..(240): NCBI GI NO: 34784016 NR Description: Unknown (protein for MGC:63802) [Danio rerio]
FINLKEKKEKATLKRKESTFFPFISHFQCSLTHLHCASSSSSFIFFFSLSLSSLPNVLSPPSSRRHHRPQLRIPPPPPFSPLPLQNPNPQKTQTSLRPPPVESQARALRLHPPRRRHHLRQGWRGQDHHHRQHRPLPRPSRLLRGRHRRRRRPPQPRPPPRPREPRQLHRDRGPEWRMPPRPSPRPRQALVQLRTPLHLQTPIQTPPRIRRQGPHLARGRAESTFTGLPRLHPHRLPRRH

SEQ ID NO: 8751 - DNA, 1305 bp, Glycine max
  misc_feature (1)..(1305): Ceres Seq. ID no. 14316546
tgctcaattcttatcctccttttcagcttcatcagggcaaatggcaccacagtctttttttacacagtctggtcaacacgtgcagcaagatttctcagctgtaaccagtcaacctgcagcacaatccttttcagctcctggtggccaacctctacaacccccaccatcagttcccactagtcaacatgcacagcaaccctttccatctcacactgatcaatctgcacagtcagttagtcatatatatggtggatttccttccctggctgctggctctatgactcaagaagcttcttcagccatgttccctcaatctcaaggtggacatatgaaccagacctatgaacaaggatctatgccacttatccctttacacacggctccccaagcttcaacaggacagagtgcaaactatttgtcttctcaatcccccattgatcaagcatcacagtttaacagtgggaacttgtcgggacagtcatttaaccatcaaccacttggtcaaggagtacatgcttcacagaatgctgtttctcagccacccaaggacaagtttgagacaaaatcgacagtttgggcagacacacttagcagggggttggttaatttgaatatatctggacctaaaataaaccctttagcagatattggagttgactttgatgccattaataggagggaaaagaggatggagaagcccaccacgacaacggtaacgtcaactgtaacaatgggtaaagctatgggatctggttcaggtatgggccgggctggtgtgggtgctcttagacctccaccaaacccgatgatgggtcctggtgttggtatggcacatatgggtatgggaggctatggaggcatgaacgtgcctatgggtatggtgcagatgcagccaccaccttttggatttccgcctgggtccaacatgcctggaaattataactccatgatgagaagaggtggttatcctcaacatccgtacagtggtggtggctaccgatgagatttatagcaatgtcaaagtgtataagattgagcactatacctagataagatcatagcaaggtaaagtagtattagtttatgacgcaattgttttgctacacagtttagagaacggcacggcaatacatctggtctacatcttgcaatcgtatttctaacaatagatgttatccttatacttgtttttttattatgctttccactcatttttataggtgttttgctgtgtaccagtcaccccatcaaataaccttacttgggttattggtttttttttttatagttaatacccccaacgcc

SEQ ID NO: 8752 - protein, 333 aa, Glycine max
  peptide (1)..(333): Ceres Seq. ID no. 14316547
  misc_feature (23)..(330): NCBI GI NO: 25408842 NR Description: hypothetical protein At2g43170
  misc_feature (23)..(330): NCBI GI NO: 30689266 NR Description: clathrin binding protein (epsin) -related
  misc_feature (23)..(330): NCBI GI NO: 15215854 NR Description: At2g43170/F14B2.11 [Arabidopsis thaliana]
  misc_feature (11)..(308): NCBI GI NO: 15451572 NR Description: Putative epsin [Oryza sativa]
  misc_feature (33)..(323): NCBI GI NO: 11357285 NR Description: epsin-like protein - Arabidopsis thaliana
  misc_feature (33)..(323): NCBI GI NO: 18411135 NR Description: epsin-related protein [Arabidopsis thaliana]
  misc_feature (1)..(218): NCBI GI NO: 1724114 NR Description: Af10-protein [Avena fatua]
AQFLSSFSASSGQMAPQSFFTQSGQHVQQDFSAVTSQPAAQSFSAPGGQPLQPPPSVPTSQHAQQPFPSHTDQSAQSVSHIYGGFPSLAAGSMTQEASSAMFPQSQGGHMNQTYEQGSMPLIPLHTAPQASTGQSANYLSSQSPIDQASQFNSGNLSGQSFNHQPLGQGVHASQNAVSQPPKDKFETKSTVWADTLSRGLVNLNISGPKINPLADIGVDFDAINRREKRMEKPTTTTVTSTVTMGKAMGSGSGMGRAGVGALRPPPNPMMGPGVGMAHMGMGGYGGMNVPMGMVQMQPPPFGFPPGSNMPGNYNSMMRRGGYPQHPYSGGGYR

SEQ ID NO: 8753 - protein, 320 aa, Glycine max
  peptide (1)..(320): Ceres Seq. ID no. 14316548
  misc_feature (10)..(317): NCBI GI NO: 25408842 NR Description: hypothetical protein At2g43170
  misc_feature (10)..(317): NCBI GI NO: 30689266 NR Description: clathrin binding protein (epsin) -related
  misc_feature (10)..(317): NCBI GI NO: 15215854 NR Description: At2g43170/F14B2.11 [Arabidopsis thaliana]
  misc_feature (1)..(295): NCBI GI NO: 15451572 NR Description: Putative epsin [Oryza sativa]
  misc_feature (20)..(310): NCBI GI NO: 11357285 NR Description: epsin-like protein - Arabidopsis thaliana
  misc_feature (20)..(310): NCBI GI NO: 18411135 NR Description: epsin-related protein [Arabidopsis thaliana]
  misc_feature (1)..(205): NCBI GI NO: 1724114 NR Description: Af10-protein [Avena fatua]
MAPQSFFTQSGQHVQQDFSAVTSQPAAQSFSAPGGQPLQPPPSVPTSQHAQQPFPSHTDQSAQSVSHIYGGFPSLAAGSMTQEASSAMFPQSQGGHMNQTYEQGSMPLIPLHTAPQASTGQSANYLSSQSPIDQASQFNSGNLSGQSFNHQPLGQGVHASQNAVSQPPKDKFETKSTVWADTLSRGLVNLNISGPKINPLADIGVDFDAINRREKRMEKPTTTTVTSTVTMGKAMGSGSGMGRAGVGALRPPPNPMMGPGVGMAHMGMGGYGGMNVPMGMVQMQPPPFGFPPGSNMPGNYNSMMRRGGYPQHPYSGGGYR

SEQ ID NO: 8754 - protein, 241 aa, Glycine max
  peptide (1)..(241): Ceres Seq. ID no. 14316549
  misc_feature (1)..(238): NCBI GI NO: 25408842 NR Description: hypothetical protein At2g43170
  misc_feature (1)..(238): NCBI GI NO: 30689266 NR Description: clathrin binding protein (epsin) -related
  misc_feature (1)..(238): NCBI GI NO: 15215854 NR Description: At2g43170/F14B2.11 [Arabidopsis thaliana]
  misc_feature (1)..(216): NCBI GI NO: 15451572 NR Description: Putative epsin [Oryza sativa]
  misc_feature (1)..(231): NCBI GI NO: 11357285 NR Description: epsin-like protein - Arabidopsis thaliana
  misc_feature (1)..(231): NCBI GI NO: 18411135 NR Description: epsin-related protein [Arabidopsis thaliana]
  misc_feature (1)..(126): NCBI GI NO: 1724114 NR Description: Af10-protein [Avena fatua]
MTQEASSAMFPQSQGGHMNQTYEQGSMPLIPLHTAPQASTGQSANYLSSQSPIDQASQFNSGNLSGQSFNHQPLGQGVHASQNAVSQPPKDKFETKSTVWADTLSRGLVNLNISGPKINPLADIGVDFDAINRREKRMEKPTTTTVTSTVTMGKAMGSGSGMGRAGVGALRPPPNPMMGPGVGMAHMGMGGYGGMNVPMGMVQMQPPPFGFPPGSNMPGNYNSMMRRGGYPQHPYSGGGYR

SEQ ID NO: 8755 - DNA, 803 bp, Glycine max
  misc_feature (1)..(803): Ceres Seq. ID no. 14315039
ctcattgttgttcttctctttcttttattgcttcctttcccattcttcatcttcttctctctgaaccgtactcaaactcactttcccacttatttatacaatgtcggcttacaaagaccaggatccccgtcttcatggcatcaaaactaagattcgtgtcgtccccaatttccccaaatccggtcttatgttcctagacattactactctattgcttgatcccaaagcatttaaggactcaatagatttgttcgtggagcggtacaagggcaaaaacatttctgttgttgcaggaattgaagctcgaggttttatttttggtccccccattgcgctggctataggagcaaagtttgtaccattgaggaaaccaaagaagttgcctggaaaagttatttctcaagaatatattctggaatatggaagggactgtcttgagatgcatgttggagctgttgatgatttgattgcaactggcggaacactctgtgccgctatggacttgttagaacgtgtgggagcagaagtagtggagtgtgcatgtgtaattgaattaccagaattgaagggtcgtgaacgtttgaacgggaagcccttgtgcgtgttggtggaatatgtggatatatgattatgaagaagtgggcaaaagaatattaagatgtagatttgggagatgatgtgtctttcagtgggtgctttcccattctgattacaattctagcttgtagtaggaacgatcaaatcaaattaatgcatttgtatgacccactctttgggctcatcttctcatctctttttcgaat

SEQ ID NO: 8756 - protein, 175 aa, Glycine max
  peptide (1)..(175): Ceres Seq. ID no. 14315040
  misc_feature (1)..(172): NCBI GI NO: 15235709 NR Description: adenine phosphoribosyltransferase (EC 2
  misc_feature (1)..(172): NCBI GI NO: 21536749 NR Description: adenine phosphoribosyltransferase (EC 2
  misc_feature (1)..(172): NCBI GI NO: 15234553 NR Description: adenine phosphoribosyltransferase -related
  misc_feature (7)..(171): NCBI GI NO: 33354190 NR Description: putative adenine phosphoribosyl transferase
  misc_feature (2)..(170): NCBI GI NO: 32492063 NR Description: adenine phosphoribosyltransferase [Brassica napus]
  misc_feature (8)..(171): NCBI GI NO: 2499932 NR Description: Adenine phosphoribosyltransferase 1 (APRT)
  misc_feature (8)..(171): NCBI GI NO: 9711921 NR Description: Adenine phosphoribosyltransferase
  misc_feature (1)..(171): NCBI GI NO: 18396344 NR Description: adenine phosphoribosyltransferase 1, APRT
  misc_feature (7)..(171): NCBI GI NO: 30689934 NR Description: adenine phosphoribosyltransferase 1, APRT
  misc_feature (44)..(175): NCBI GI NO: 3776082 NR Description: MtN30 [Medicago truncatula]
MSAYKDQDPRLHGIKTKIRVVPNFPKSGLMFLDITTLLLDPKAFKDSIDLFVERYKGKNISVVAGIEARGFIFGPPIALAIGAKFVPLRKPKKLPGKVISQEYILEYGRDCLEMHVGAVDDLIATGGTLCAAMDLLERVGAEVVECACVIELPELKGRERLNGKPLCVLVEYVDI

SEQ ID NO: 8757 - protein, 146 aa, Glycine max
  peptide (1)..(146): Ceres Seq. ID no. 14315041
  misc_feature (1)..(143): NCBI GI NO: 15235709 NR Description: adenine phosphoribosyltransferase (EC 2
  misc_feature (1)..(143): NCBI GI NO: 21536749 NR Description: adenine phosphoribosyltransferase (EC 2
  misc_feature (1)..(143): NCBI GI NO: 15234553 NR Description: adenine phosphoribosyltransferase -related
  misc_feature (1)..(142): NCBI GI NO: 33354190 NR Description: putative adenine phosphoribosyl transferase
  misc_feature (1)..(141): NCBI GI NO: 32492063 NR Description: adenine phosphoribosyltransferase [Brassica napus]
  misc_feature (1)..(142): NCBI GI NO: 2499932 NR Description: Adenine phosphoribosyltransferase 1 (APRT)
  misc_feature (1)..(142): NCBI GI NO: 9711921 NR Description: Adenine phosphoribosyltransferase
  misc_feature (1)..(142): NCBI GI NO: 18396344 NR Description: adenine phosphoribosyltransferase 1, APRT
  misc_feature (1)..(142): NCBI GI NO: 30689934 NR Description: adenine phosphoribosyltransferase 1, APRT
  misc_feature (15)..(146): NCBI GI NO: 3776082 NR Description: MtN30 [Medicago truncatula]
MFLDITTLLLDPKAFKDSIDLFVERYKGKNISVVAGIEARGFIFGPPIALAIGAKFVPLRKPKKLPGKVISQEYILEYGRDCLEMHVGAVDDLIATGGTLCAAMDLLERVGAEVVECACVIELPELKGRERLNGKPLCVLVEYVDI

SEQ ID NO: 8758 - DNA, 1066 bp, Glycine max
  misc_feature (1)..(1066): Ceres Seq. ID no. 15168506
aataatttaatagtgtaatgtccgaagatcaaaaccctctgatggggcatcgtatttgattggtcggtcatagcaattagcaactccacccttcaaacttgaaaggaaaaaaggactttggttatccacgccacaccacgctgtaattaactaaactttctagaatcttcttctctcgccatggccgcgccgtcgtcctccgccgcggcaaacatcatgctggcgatctccgagaagaagacgaacagtgtagatctgtatcgccctctccgcaactacgtggccttccactactcggagcgagaggcgcagaacctcgagtatgatctccaaaccctgaagcaactccgctccgatgtggagcgccactccgatccatcgctcccggcgcgccgtgatctcctccaatcctactacaaatctctctgcctcgtggagacgcggttccctatctcttccgaccccgatcacgtcaacgccctcaccttcgtctggttcgacgccttcaagcccaagcagaaggcctcgcagcagaacatccacctcgagaaggcctccgtgctcttcaatttgggtgccgtttacagccagattggtttgtcctatgatcggaacactgtagatggccgccgtcaggcctcccacgccttcatcgcggctgccggatccttcgccttccttcgcgacaatgcttccctgaaggcctccgttgggagttccaccactgtggatttgtccgttgagtgcgccgggatgctggagaagctcatgctcgcgcaggcgcaggagtgcgtcttcgagaacaccattgccaaagggagcactcccggtgtctatgccaagatctctaggcaggtccggtgctagtttgttctatgttttaacttataatcattctttcatgtttgatacttgagttgagtgattatgaagatggttggtacaatttcgatttcgttattatagttttgctctcatttgtgttgttttttgatgttgaaatggtttttctttatgcatgggcaatgagtttcaatgtattaggggtatccgcgcttattgaagc

SEQ ID NO: 8759 - protein, 228 aa, Glycine max
  peptide (1)..(228): Ceres Seq. ID no. 15168507
  misc_feature (12)..(170): Pfam Name: Pfam Description:  BRO1-like domain
  misc_feature (5)..(226): NCBI GI NO: 15218061 NR Description: proline-rich protein family [Arabidopsis thaliana]
  misc_feature (5)..(227): NCBI GI NO: 25518358 NR Description: hypothetical protein F9L1.7
  misc_feature (5)..(226): NCBI GI NO: 23297205 NR Description: At1g15130/F9L1_7 [Arabidopsis thaliana]
  misc_feature (7)..(226): NCBI GI NO: 37535674 NR Description: putative signal tranduction protein
  misc_feature (13)..(226): NCBI GI NO: 19880054 NR Description: ALG-2 interacting protein X
  misc_feature (1)..(218): NCBI GI NO: 30354357 NR Description: Rhpn1 protein [Mus musculus]
  misc_feature (1)..(218): NCBI GI NO: 6680085 NR Description: rhophilin, Rho GTPase binding protein 1
  misc_feature (4)..(218): NCBI GI NO: 34866821 NR Description: similar to rhophilin [Rattus norvegicus]
  misc_feature (6)..(207): NCBI GI NO: 15620917 NR Description: KIAA1929 protein [Homo sapiens]
  misc_feature (6)..(207): NCBI GI NO: 19343951 NR Description: Similar to GTP-rho binding protein 1
MAAPSSSAAANIMLAISEKKTNSVDLYRPLRNYVAFHYSEREAQNLEYDLQTLKQLRSDVERHSDPSLPARRDLLQSYYKSLCLVETRFPISSDPDHVNALTFVWFDAFKPKQKASQQNIHLEKASVLFNLGAVYSQIGLSYDRNTVDGRRQASHAFIAAAGSFAFLRDNASLKASVGSSTTVDLSVECAGMLEKLMLAQAQECVFENTIAKGSTPGVYAKISRQVRC

SEQ ID NO: 8760 - protein, 216 aa, Glycine max
  peptide (1)..(216): Ceres Seq. ID no. 15168508
  misc_feature (1)..(158): Pfam Name: Pfam Description:  BRO1-like domain
  misc_feature (1)..(214): NCBI GI NO: 15218061 NR Description: proline-rich protein family [Arabidopsis thaliana]
  misc_feature (1)..(215): NCBI GI NO: 25518358 NR Description: hypothetical protein F9L1.7
  misc_feature (1)..(214): NCBI GI NO: 23297205 NR Description: At1g15130/F9L1_7 [Arabidopsis thaliana]
  misc_feature (1)..(214): NCBI GI NO: 37535674 NR Description: putative signal tranduction protein
  misc_feature (1)..(214): NCBI GI NO: 19880054 NR Description: ALG-2 interacting protein X
  misc_feature (1)..(206): NCBI GI NO: 30354357 NR Description: Rhpn1 protein [Mus musculus]
  misc_feature (1)..(206): NCBI GI NO: 6680085 NR Description: rhophilin, Rho GTPase binding protein 1
  misc_feature (1)..(206): NCBI GI NO: 34866821 NR Description: similar to rhophilin [Rattus norvegicus]
  misc_feature (1)..(195): NCBI GI NO: 15620917 NR Description: KIAA1929 protein [Homo sapiens]
  misc_feature (1)..(195): NCBI GI NO: 19343951 NR Description: Similar to GTP-rho binding protein 1
MLAISEKKTNSVDLYRPLRNYVAFHYSEREAQNLEYDLQTLKQLRSDVERHSDPSLPARRDLLQSYYKSLCLVETRFPISSDPDHVNALTFVWFDAFKPKQKASQQNIHLEKASVLFNLGAVYSQIGLSYDRNTVDGRRQASHAFIAAAGSFAFLRDNASLKASVGSSTTVDLSVECAGMLEKLMLAQAQECVFENTIAKGSTPGVYAKISRQVRC

SEQ ID NO: 8761 - DNA, 1071 bp, Glycine max
  misc_feature (1)..(1071): Ceres Seq. ID no. 15177034
atatatcatttcaagaccttaaagtaccaaacttccaactcttctctcttctctcttcactcttcactcttgtcgtcatttcctcacaaaaccagtgtccgtaacatctccaccttaacgatgtcggtaaaggagtgtcaccaccacaagggaaagaagcacaaactctggagacgcatcttctggggcatagtgatcttcgccttcatcgtgttgctaacagttcttataatctgggcaatcctaaagccttcaaagccaaccttcatcctccaagacgtgaccgtctacggcttcaacgccaccatccccaacttcctcacctcaagctttcaggtcacgctttcctcgcgcaaccccaacgacaaaatcggagtctactacgaccgtctcgacacctacgtcacttaccggaaccaggtcacgtaccgaacctcaatcccaccctcataccaaggtcacaaggaagaggatgtgtggtccccattcgtcttcggcactaacgtccccgtcgcacccttcaacttcgttggtctcagtcaagaccagaccaacggcaacgtcctcgtcctcgttaagattgacggtaaggtacgatggaaagttggtaccttcgtctctggtcactacaacctctatgtaaggtgccctgctttcataacttttggcccccaaagcaccgggattgcccttggcaagaacgccgttaagtatcaattggttcaacgctgcaccgtcggggtttgatgtaaccgccgtccaacatatattcattctgtctttgctctgctccttgctatatttagtgtctatctatatacggtcttttctcatttctttttttttatatacgtattcttgttatcttccactacgtatttcttctgtattgacggatcactttgttgttaggcatacgtgcgtgtctttgttacagcatttggaattgtacattttgctacagaataaactgcacttggaaaaaaaagtatgtaatagagatgaaagcgaaattacaatttgtaacaaagagccaattgaaataaattaaaacgttgtttcaatttggac

SEQ ID NO: 8762 - protein, 248 aa, Glycine max
  peptide (1)..(248): Ceres Seq. ID no. 15177035
  misc_feature (43)..(248): NCBI GI NO: 18399308 NR Description: harpin-induced protein 1 family (HIN1)
  misc_feature (43)..(248): NCBI GI NO: 28392929 NR Description: putative VAMP protein SEC22 [Arabidopsis thaliana]
  misc_feature (41)..(248): NCBI GI NO: 15227538 NR Description: harpin-induced protein 1 family (HIN1)
  misc_feature (44)..(248): NCBI GI NO: 15231227 NR Description: harpin-induced protein 1 family (HIN1)
  misc_feature (41)..(248): NCBI GI NO: 15229906 NR Description: harpin-induced protein 1 family (HIN1)
  misc_feature (41)..(248): NCBI GI NO: 15240001 NR Description: harpin-induced protein, putative (HIN1)
  misc_feature (41)..(246): NCBI GI NO: 15233951 NR Description: harpin-induced protein 1 family (HIN1)
  misc_feature (41)..(248): NCBI GI NO: 22326984 NR Description: harpin-induced protein 1 family (HIN1)
  misc_feature (41)..(246): NCBI GI NO: 15227540 NR Description: harpin-induced protein 1 family (HIN1)
  misc_feature (41)..(248): NCBI GI NO: 32488715 NR Description: OSJNBa0088H09.16
IYHFKTLKYQTSNSSLFSLHSSLLSSFPHKTSVRNISTLTMSVKECHHHKGKKHKLWRRIFWGIVIFAFIVLLTVLIIWAILKPSKPTFILQDVTVYGFNATIPNFLTSSFQVTLSSRNPNDKIGVYYDRLDTYVTYRNQVTYRTSIPPSYQGHKEEDVWSPFVFGTNVPVAPFNFVGLSQDQTNGNVLVLVKIDGKVRWKVGTFVSGHYNLYVRCPAFITFGPQSTGIALGKNAVKYQLVQRCTVGV

SEQ ID NO: 8763 - protein, 208 aa, Glycine max
  peptide (1)..(208): Ceres Seq. ID no. 15177036
  misc_feature (3)..(208): NCBI GI NO: 18399308 NR Description: harpin-induced protein 1 family (HIN1)
  misc_feature (3)..(208): NCBI GI NO: 28392929 NR Description: putative VAMP protein SEC22 [Arabidopsis thaliana]
  misc_feature (1)..(208): NCBI GI NO: 15227538 NR Description: harpin-induced protein 1 family (HIN1)
  misc_feature (4)..(208): NCBI GI NO: 15231227 NR Description: harpin-induced protein 1 family (HIN1)
  misc_feature (1)..(208): NCBI GI NO: 15229906 NR Description: harpin-induced protein 1 family (HIN1)
  misc_feature (1)..(208): NCBI GI NO: 15240001 NR Description: harpin-induced protein, putative (HIN1)
  misc_feature (1)..(206): NCBI GI NO: 15233951 NR Description: harpin-induced protein 1 family (HIN1)
  misc_feature (1)..(208): NCBI GI NO: 22326984 NR Description: harpin-induced protein 1 family (HIN1)
  misc_feature (1)..(206): NCBI GI NO: 15227540 NR Description: harpin-induced protein 1 family (HIN1)
  misc_feature (1)..(208): NCBI GI NO: 32488715 NR Description: OSJNBa0088H09.16
MSVKECHHHKGKKHKLWRRIFWGIVIFAFIVLLTVLIIWAILKPSKPTFILQDVTVYGFNATIPNFLTSSFQVTLSSRNPNDKIGVYYDRLDTYVTYRNQVTYRTSIPPSYQGHKEEDVWSPFVFGTNVPVAPFNFVGLSQDQTNGNVLVLVKIDGKVRWKVGTFVSGHYNLYVRCPAFITFGPQSTGIALGKNAVKYQLVQRCTVGV

SEQ ID NO: 8764 - DNA, 1039 bp, Glycine max
  misc_feature (1)..(1039): Ceres Seq. ID no. 13638279
agcattaccggattacccggtcactagtcccttcccacgacaacacccacagtcctatttccacacccatcgaaatcgttaaagcagcacagtcactctctaaatcgttcaacctcacacccactcctccgatattcttttctgctttaatcttcgctctgttttcgggggtcagatcttaatgccgaaggcttcgtattctgtttgaattttgttatctattgggagtggagtagtatttgagatcgagcgtaaaatatataaaaataataaaagaagcaaaggcgatgtttttgtttgattggttttatgggattctggcatcgcttgggttgtggcagaaggaggccaagatcttattcttaggtctcgataatgccggaaagaccaccttgcttcacatgctcaaagacgagagactagttcagcatcagcctacacagtatccaacatcagaggagttgagtattgggaggatcaagtttaaagcttttgatctcgggggtcaccagattgcacgaagagtctggaaagattactatgctaaggtagatgcagtggtctacttggtagattcatatgacaaggaacgatttgccgagtctaaaaaagagttagatgctctgctctctgatgagtctttgactactgtccctttccttatccttggaaacaagatagatattccatatgctgcctcagaagaagagttgcgttaccatttgggcctgaccaatttcactacgggcaagggaaatgtaaatttgtcagattctaatgtccgtcctatggaggttttcatgtgcagtattgtgaagaaaatgggttacggagatggtttcaaatggctctctcagtacatcaaataaatagtccatgtagtaagagatggcttggtatcctgtttctagacgcttattcctatagttatgctatagaaatgttgttagtacaaattgctgttaaacattttttttagtacaaaaaattgtttaaagaatattttattaaaagaaaatgacacttatccctttctttc

SEQ ID NO: 8765 - protein, 193 aa, Glycine max
  peptide (1)..(193): Ceres Seq. ID no. 13638280
  misc_feature (5)..(192): Pfam Name: Pfam Description:  ADP-ribosylation factor family
  misc_feature (1)..(193): NCBI GI NO: 15235226 NR Description: GTP-binding protein SAR1A [Arabidopsis thaliana]
  misc_feature (1)..(193): NCBI GI NO: 34902852 NR Description: unnamed protein product
  misc_feature (1)..(192): NCBI GI NO: 15223516 NR Description: GTP-binding protein SAR1B [Arabidopsis thaliana]
  misc_feature (1)..(193): NCBI GI NO: 34894960 NR Description: putative GTP-binding protein
  misc_feature (1)..(193): NCBI GI NO: 25294173 NR Description: small GTP-binding protein Sar1BNt
  misc_feature (1)..(193): NCBI GI NO: 3334321 NR Description: GTP-binding protein SAR1A
  misc_feature (1)..(193): NCBI GI NO: 7438457 NR Description: GTP-binding protein - curled-leaved tobacco
  misc_feature (1)..(193): NCBI GI NO: 1549222 NR Description: NtSar1 protein [Nicotiana tabacum]
  misc_feature (1)..(192): NCBI GI NO: 25294172 NR Description: ras-like small monomeric GTP-binding protein
  misc_feature (1)..(193): NCBI GI NO: 7438455 NR Description: GTP-binding protein Sar1
MFLFDWFYGILASLGLWQKEAKILFLGLDNAGKTTLLHMLKDERLVQHQPTQYPTSEELSIGRIKFKAFDLGGHQIARRVWKDYYAKVDAVVYLVDSYDKERFAESKKELDALLSDESLTTVPFLILGNKIDIPYAASEEELRYHLGLTNFTTGKGNVNLSDSNVRPMEVFMCSIVKKMGYGDGFKWLSQYIK

SEQ ID NO: 8766 - protein, 155 aa, Glycine max
  peptide (1)..(155): Ceres Seq. ID no. 13638281
  misc_feature (1)..(154): Pfam Name: Pfam Description:  ADP-ribosylation factor family
  misc_feature (1)..(155): NCBI GI NO: 15235226 NR Description: GTP-binding protein SAR1A [Arabidopsis thaliana]
  misc_feature (1)..(155): NCBI GI NO: 34902852 NR Description: unnamed protein product
  misc_feature (1)..(154): NCBI GI NO: 15223516 NR Description: GTP-binding protein SAR1B [Arabidopsis thaliana]
  misc_feature (1)..(155): NCBI GI NO: 34894960 NR Description: putative GTP-binding protein
  misc_feature (1)..(155): NCBI GI NO: 25294173 NR Description: small GTP-binding protein Sar1BNt
  misc_feature (1)..(155): NCBI GI NO: 3334321 NR Description: GTP-binding protein SAR1A
  misc_feature (1)..(155): NCBI GI NO: 7438457 NR Description: GTP-binding protein - curled-leaved tobacco
  misc_feature (1)..(155): NCBI GI NO: 1549222 NR Description: NtSar1 protein [Nicotiana tabacum]
  misc_feature (1)..(154): NCBI GI NO: 25294172 NR Description: ras-like small monomeric GTP-binding protein
  misc_feature (1)..(155): NCBI GI NO: 7438455 NR Description: GTP-binding protein Sar1
MLKDERLVQHQPTQYPTSEELSIGRIKFKAFDLGGHQIARRVWKDYYAKVDAVVYLVDSYDKERFAESKKELDALLSDESLTTVPFLILGNKIDIPYAASEEELRYHLGLTNFTTGKGNVNLSDSNVRPMEVFMCSIVKKMGYGDGFKWLSQYIK

SEQ ID NO: 8767 - DNA, 1002 bp, Glycine max
  misc_feature (1)..(1002): Ceres Seq. ID no. 13595782
attttcttgttgaggaagaaagatgctgatgaaattcaaataccctcgtcgatcacacgcacccaagaccaagaactcaagaagggtaccacattcgctttatcactattaacttcataacttagtttctcttctagtccagaagtacaagtaagtgatggtggtgtttccggtggtgaagctagcaacactcgctctgagaaccgcgtgcaaaccaatcgccaacaggctcaagaaggaggccggttaccaccccaagttccgaaatttcatcatcagcattgcccaggccaatcatagattgacgacgagagtgcagagacgaatttacggtcatgccactgatgttgcaatccaccctctgaacgaggagaaggctgtgcaagctgctgctgatctgcttggagaactctttgtcttctcggttgcaggagctgccatcatctttgaggtgcaaagaagttcaagatcagaagcaagaaaagaagaattacgtagacaggagatacaggaaataaagactaagaatgaagaattggctagagaaattgaacttcttgcacaaaagcttgaagagctggaacaactttccaggggacgaggactacttggcactcttaacttcagacacactcgtgtctctgaagatagaaaatccaattgattgttgcaattgttaagcattgcacacagattttgattaacaagcaatacctcttggtgtggcaagaagcatgatattgacaatgtgcagatgggttactgtatattatatatggaggtacaatcagagctaaaaccaaattttaggtgtggtgaggggctttgaggattttttttttgagaggggctttgaggattaatcttgttcatacgaaataaaacaaaattgtacaacacatttatgaatgcgttctttttgaaaatttcctttccagggacaaattcagcctgctaactacagttttctagccttttggataatctacatttgtttcctcc

SEQ ID NO: 8768 - protein, 168 aa, Glycine max
  peptide (1)..(168): Ceres Seq. ID no. 13595783
  misc_feature (5)..(167): NCBI GI NO: 34904528 NR Description: B1066G12.9
  misc_feature (2)..(157): NCBI GI NO: 18396819 NR Description: expressed protein [Arabidopsis thaliana]
  misc_feature (2)..(146): NCBI GI NO: 15230967 NR Description: hypothetical protein [Arabidopsis thaliana]
  misc_feature (7)..(137): NCBI GI NO: 19112998 NR Description: hypothetical coiled-coil protein
  misc_feature (1)..(145): NCBI GI NO: 27676608 NR Description: similar to OPA3 protein; Optic atrophy 3
  misc_feature (1)..(145): NCBI GI NO: 26342969 NR Description: unnamed protein product [Mus musculus]
  misc_feature (1)..(139): NCBI GI NO: 13376717 NR Description: OPA3 protein; Optic atrophy 3
  misc_feature (1)..(144): NCBI GI NO: 24649440 NR Description: CG13601-PA [Drosophila melanogaster]
  misc_feature (1)..(142): NCBI GI NO: 39849948 NR Description: Unknown (protein for MGC:75494) [Homo sapiens]
  misc_feature (3)..(130): NCBI GI NO: 23482917 NR Description: Arabidopsis thaliana At1g28510/F3M18_5
MVVFPVVKLATLALRTACKPIANRLKKEAGYHPKFRNFIISIAQANHRLTTRVQRRIYGHATDVAIHPLNEEKAVQAAADLLGELFVFSVAGAAIIFEVQRSSRSEARKEELRRQEIQEIKTKNEELAREIELLAQKLEELEQLSRGRGLLGTLNFRHTRVSEDRKSN

SEQ ID NO: 8769 - DNA, 803 bp, Glycine max
  misc_feature (1)..(803): Ceres Seq. ID no. 14316320
agttggcgaatgacaatgcaatgctcgtgtcgttttggtgtcactgagtcagtctgagtaggaagaggaagccatgggcaacacatcctccatgctcacccaatacgacatcgaagaggttcagcaacattgcaaaaacgcttttacgcaacaggagatagtttctctgtaccaacgcttctgtcagctggatcgcaacaactgcggtttcatcccttccgatgaattcctctccattcccgaattcgccgtcaatcctctctctcagagtttgttgaggatgctggatgggttgaacttcaaggaatttgtggccttcttgtccgccttcagtccccgtgccactctccaccacaaaattgaattcattttcaaggtctatgacaccgattgcaatggaaaagttaccttccatgacatgttgagggctttaaggaatttgagtggacccttcatgtctgagcaacagagagaggacgttctgacacaggtccttgaggaagctggctatgcaaaggattcttcattagtcttgtctgacttcatgaagattcttggcaattcgggtttgaagatggaagtagaggttccggtggattagagtgaggataatacaattccctttttgagttttcttttttcttttttttgaggataactttccctttcagtttgatgacggaggttcttggttctggtatttagttcttcctcttaatgggtaaaagattatttgttcagtgattaattactgcaaacaaagttatggattatataatgtttaacaaatgctttcaaaactg

SEQ ID NO: 8770 - protein, 175 aa, Glycine max
  peptide (1)..(175): Ceres Seq. ID no. 14316321
  misc_feature (31)..(59): Pfam Name: Pfam Description:  EF hand
  misc_feature (1)..(175): NCBI GI NO: 16550928 NR Description: calcineurin-like protein [Eucalyptus grandis]
  misc_feature (1)..(175): NCBI GI NO: 18401887 NR Description: calcineurin B subunit, putative
  misc_feature (1)..(175): NCBI GI NO: 21592761 NR Description: calcineurin-like protein [Arabidopsis thaliana]
  misc_feature (1)..(172): NCBI GI NO: 1168750 NR Description: Calcineurin B subunit
  misc_feature (1)..(172): NCBI GI NO: 13445166 NR Description: calcineurin B [Dictyostelium discoideum]
  misc_feature (74)..(172): NCBI GI NO: 17566934 NR Description: calcium binding protein P22 like
  misc_feature (1)..(88): NCBI GI NO: 17566934 NR Description: calcium binding protein P22 like
  misc_feature (1)..(170): NCBI GI NO: 3929338 NR Description: Calcineurin B subunit
  misc_feature (1)..(164): NCBI GI NO: 2645886 NR Description: calcineurin subunit B [Neurospora crassa]
  misc_feature (74)..(172): NCBI GI NO: 39593284 NR Description: Hypothetical protein CBG09544
MGNTSSMLTQYDIEEVQQHCKNAFTQQEIVSLYQRFCQLDRNNCGFIPSDEFLSIPEFAVNPLSQSLLRMLDGLNFKEFVAFLSAFSPRATLHHKIEFIFKVYDTDCNGKVTFHDMLRALRNLSGPFMSEQQREDVLTQVLEEAGYAKDSSLVLSDFMKILGNSGLKMEVEVPVD

SEQ ID NO: 8771 - protein, 169 aa, Glycine max
  peptide (1)..(169): Ceres Seq. ID no. 14316322
  misc_feature (25)..(53): Pfam Name: Pfam Description:  EF hand
  misc_feature (1)..(169): NCBI GI NO: 16550928 NR Description: calcineurin-like protein [Eucalyptus grandis]
  misc_feature (1)..(169): NCBI GI NO: 18401887 NR Description: calcineurin B subunit, putative
  misc_feature (1)..(169): NCBI GI NO: 21592761 NR Description: calcineurin-like protein [Arabidopsis thaliana]
  misc_feature (1)..(166): NCBI GI NO: 1168750 NR Description: Calcineurin B subunit
  misc_feature (1)..(166): NCBI GI NO: 13445166 NR Description: calcineurin B [Dictyostelium discoideum]
  misc_feature (68)..(166): NCBI GI NO: 17566934 NR Description: calcium binding protein P22 like
  misc_feature (1)..(82): NCBI GI NO: 17566934 NR Description: calcium binding protein P22 like
  misc_feature (1)..(164): NCBI GI NO: 3929338 NR Description: Calcineurin B subunit
  misc_feature (1)..(158): NCBI GI NO: 2645886 NR Description: calcineurin subunit B [Neurospora crassa]
  misc_feature (68)..(166): NCBI GI NO: 39593284 NR Description: Hypothetical protein CBG09544
MLTQYDIEEVQQHCKNAFTQQEIVSLYQRFCQLDRNNCGFIPSDEFLSIPEFAVNPLSQSLLRMLDGLNFKEFVAFLSAFSPRATLHHKIEFIFKVYDTDCNGKVTFHDMLRALRNLSGPFMSEQQREDVLTQVLEEAGYAKDSSLVLSDFMKILGNSGLKMEVEVPVD

SEQ ID NO: 8772 - protein, 106 aa, Glycine max
  peptide (1)..(106): Ceres Seq. ID no. 14316323
  misc_feature (1)..(106): NCBI GI NO: 16550928 NR Description: calcineurin-like protein [Eucalyptus grandis]
  misc_feature (1)..(106): NCBI GI NO: 18401887 NR Description: calcineurin B subunit, putative
  misc_feature (1)..(106): NCBI GI NO: 21592761 NR Description: calcineurin-like protein [Arabidopsis thaliana]
  misc_feature (1)..(103): NCBI GI NO: 1168750 NR Description: Calcineurin B subunit
  misc_feature (1)..(103): NCBI GI NO: 13445166 NR Description: calcineurin B [Dictyostelium discoideum]
  misc_feature (5)..(103): NCBI GI NO: 17566934 NR Description: calcium binding protein P22 like
  misc_feature (1)..(19): NCBI GI NO: 17566934 NR Description: calcium binding protein P22 like
  misc_feature (1)..(101): NCBI GI NO: 3929338 NR Description: Calcineurin B subunit
  misc_feature (1)..(95): NCBI GI NO: 2645886 NR Description: calcineurin subunit B [Neurospora crassa]
  misc_feature (5)..(103): NCBI GI NO: 39593284 NR Description: Hypothetical protein CBG09544
MLDGLNFKEFVAFLSAFSPRATLHHKIEFIFKVYDTDCNGKVTFHDMLRALRNLSGPFMSEQQREDVLTQVLEEAGYAKDSSLVLSDFMKILGNSGLKMEVEVPVD

SEQ ID NO: 8773 - DNA, 709 bp, Glycine max
  misc_feature (1)..(709): Ceres Seq. ID no. 15175098
aatcgaccttcaaggtattttcatcgattgcaaacaattagacagaaacttccaacctcgaacacttttttcaggcaaaccaacacacataaccgcacacaaacatcacatgtgtgtgggtggtcactgttgtttttcttgcttgtcttgttcctacacatgttttcttaatttttattttcttcattttatcttgatatgaaaattaaacataagccaacatattaattaagcatgtgcttgtccgtttcaggttaggaaggagaaattaggtgacagaattaccgcccttcatcaactcgtttccccattcggaaagactgacacggcttctgtcttattagaagctattggctatatcagattccttcagagtcaaattgaggcccttagcttaccatacttgggcagtggatcaggaaacatgaggcagcaacaatccgttcaaggagagaacaattgtatattccctgaagaccccggtcagttgctgaatgaaaactgtttgaagaggaaagcagctagtgagcaggattctcaagaagaacaaaagaaagacctgaggagtagagggttatgcttggttccagtgtcatgcacgctgcaagttggaagtgacaatggagctgactattgggctcctgcttttggtgggggatttcggtagattgcttaacttactattaataggttatcatatgcagcatac

SEQ ID NO: 8774 - protein, 80 aa, Glycine max
  peptide (1)..(80): Ceres Seq. ID no. 15175099
  misc_feature (1)..(79): NCBI GI NO: 15233452 NR Description: bHLH068 putative bHLH transcription factor
  misc_feature (1)..(76): NCBI GI NO: 11045087 NR Description: putative protein [Brassica napus]
  misc_feature (1)..(76): NCBI GI NO: 33111977 NR Description: putative bHLH133 transcription factor
  misc_feature (33)..(78): NCBI GI NO: 15217667 NR Description: hypothetical protein [Arabidopsis thaliana]
  misc_feature (33)..(80): NCBI GI NO: 15232315 NR Description: bHLH transcription factor (bHLH123) -related
  misc_feature (33)..(80): NCBI GI NO: 9294343 NR Description: gene_id:F3H11.2~unknown protein
  misc_feature (44)..(77): NCBI GI NO: 18402256 NR Description: expressed protein [Arabidopsis thaliana]
  misc_feature (44)..(77): NCBI GI NO: 21536756 NR Description: unknown [Arabidopsis thaliana]
  misc_feature (32)..(80): NCBI GI NO: 34910130 NR Description: B1070A12.8
  misc_feature (33)..(76): NCBI GI NO: 14488370 NR Description: putative ethylene-responsive protein
MRQQQSVQGENNCIFPEDPGQLLNENCLKRKAASEQDSQEEQKKDLRSRGLCLVPVSCTLQVGSDNGADYWAPAFGGGFR

SEQ ID NO: 8775 - protein, 66 aa, Glycine max
  peptide (1)..(66): Ceres Seq. ID no. 15175100
IDLQGIFIDCKQLDRNFQPRTLFSGKPTHITAHKHHMCVGGHCCFSCLSCSYTCFLNFYFLHFILI

SEQ ID NO: 8776 - protein, 56 aa, Glycine max
  peptide (1)..(56): Ceres Seq. ID no. 15175101
NRPSRYFHRLQTIRQKLPTSNTFFRQTNTHNRTQTSHVCGWSLLFFLLVLFLHMFS

SEQ ID NO: 8777 - DNA, 2220 bp, Glycine max
  misc_feature (1)..(2220): Ceres Seq. ID no. 14314411
cacttatcaagaaaccctaatacagatacagtttccctctctctttctcaagcaatccaaagtcacaacccacacacactgtacgggttgtgcagatcagagggtgttggtacactctatctatcttttttctcccataagcagaaacaccctctctaatgtttctctctttgtcccatacccatacctcattctgcaagcgtccccttaaataataaatacaccgcgtgtgtgtgtgtatgtgagagagagagagtaagaaataaagcaaatctctctgctgtttctcttacgtctttctattttgggctctcatggattcgggtaacagtgggagtatgcaatcttccagcaccgccggtgatgaagagtacgattcacgcgccgacccatctttgtcgtcatcaatctctgcgttctttaatagtaactcccatccttcagctccaccacaaccaacaacgttaacaaaccacgttggtcctcctttctctactcagcaccaccacgtgttcgaccctttatcatccaattacttggatccgacacaaagatcgccgcaatcaaaccaaatcctcaacctcgacatggtgcggtccaaggttgccgccagatccggacccgattttagctccttcataccttcatcttccccacacaacaacaacaaccaagcttttctgttaactcaattgggaggaggaggagttaacaacgttggtgcttttcccagtaccactctccctccagaaagtggaggaggcggattagtaatgaatgaacaagtaaacagtagcaacaccaacaaaaacatggttcgaaacccgaagaaaaggtcaagagcttctaggcgtgcacccaccactgttctcactacggacaccacgaatttccgagccatggttcaggaattcactggcatcccagcacctcctttcacttcctcctcctcgtctttcccaagaacaaggttagatctctttgccacctctaatgcttcttcttcatccattattagagaacaaacaccttcttatcttcttcgcccctttgcacacaaagtccaagctcaagtaccttcttcaatcccaccaccctcttcctttcaacccatgttgaacaactaccaccaccaccaccaccagcataacccaattctcagcttccaatccattctccaaccgcatcaactcattggttctaaaactcaacaacaaccctccttggaaataccgcctagtgctcttgggttggaggaattaggattgaaccatgctcatcatcaaaacatcaacatgcgttcgtcttcatcggatggaacattgtcaagggtcaacaacgacaataacaacatgcgtggtccttcggcagattgggcccaggcccaggcccaaagaattgataacaatgatggaggacttttggggtctcttactggtgccaccttaaactacagaagcaatattgtttcggatcagcgagtcaaggttactaataattcggattttcatggagaaaaaggaccggaatgtgttgtggctgtacgaagcgaaggtatggtcgaatcgtggattaattgttcttctgattgagagcagaaataagcaaccatcaaatgggaaaagaatatatgaacaaagaaaaaaagggagattcataaatatattttcctcacacggtttaaagcaactgatgatggtagtatactaattcatgagagacagaatcttggtaattggtatcctcagcttaaccatgaccgtcaaattaattaaacacctttttcttcttcttttatttggttctttgtgtccattagaattatgcgtaaataactagcagctaccttgtctttctctactcctttattttattttatttgttttcttctcaaaatctcaattgtggttttgatcgatattatatacagctatatacgaattagaatcctggagggttttcgtttcgacgtacgtttgtttcatcgtaatttgtgtctctatttggtaaactagagagctacatacatacaatggcagcatcatatgatcagtttgtggttcgtgtcactgtatatggattttggttttgactacttgtgtgaaattatggttcagagaatgtacaatgtgcacagcatagaatgaacaacacagacaaaactgtatgtatcctctcttttcctgttttgtcgcaccttctattctctgattttacctc

SEQ ID NO: 8778 - protein, 425 aa, Glycine max
  peptide (1)..(425): Ceres Seq. ID no. 14314412
  misc_feature (179)..(207): Pfam Name: Pfam Description:  VQ motif
  misc_feature (169)..(372): NCBI GI NO: 15238363 NR Description: expressed protein [Arabidopsis thaliana]
  misc_feature (1)..(76): NCBI GI NO: 15238363 NR Description: expressed protein [Arabidopsis thaliana]
  misc_feature (115)..(353): NCBI GI NO: 15235990 NR Description: expressed protein [Arabidopsis thaliana]
  misc_feature (169)..(283): NCBI GI NO: 15220238 NR Description: hypothetical protein [Arabidopsis thaliana]
  misc_feature (161)..(231): NCBI GI NO: 18414384 NR Description: expressed protein [Arabidopsis thaliana]
  misc_feature (117)..(280): NCBI GI NO: 18403283 NR Description: expressed protein [Arabidopsis thaliana]
  misc_feature (161)..(231): NCBI GI NO: 21593100 NR Description: unknown [Arabidopsis thaliana]
  misc_feature (105)..(207): NCBI GI NO: 22324429 NR Description: unknown protein
MDSGNSGSMQSSSTAGDEEYDSRADPSLSSSISAFFNSNSHPSAPPQPTTLTNHVGPPFSTQHHHVFDPLSSNYLDPTQRSPQSNQILNLDMVRSKVAARSGPDFSSFIPSSSPHNNNNQAFLLTQLGGGGVNNVGAFPSTTLPPESGGGGLVMNEQVNSSNTNKNMVRNPKKRSRASRRAPTTVLTTDTTNFRAMVQEFTGIPAPPFTSSSSSFPRTRLDLFATSNASSSSIIREQTPSYLLRPFAHKVQAQVPSSIPPPSSFQPMLNNYHHHHHQHNPILSFQSILQPHQLIGSKTQQQPSLEIPPSALGLEELGLNHAHHQNINMRSSSSDGTLSRVNNDNNNMRGPSADWAQAQAQRIDNNDGGLLGSLTGATLNYRSNIVSDQRVKVTNNSDFHGEKGPECVVAVRSEGMVESWINCSSD

SEQ ID NO: 8779 - protein, 417 aa, Glycine max
  peptide (1)..(417): Ceres Seq. ID no. 14314413
  misc_feature (171)..(199): Pfam Name: Pfam Description:  VQ motif
  misc_feature (161)..(364): NCBI GI NO: 15238363 NR Description: expressed protein [Arabidopsis thaliana]
  misc_feature (1)..(68): NCBI GI NO: 15238363 NR Description: expressed protein [Arabidopsis thaliana]
  misc_feature (107)..(345): NCBI GI NO: 15235990 NR Description: expressed protein [Arabidopsis thaliana]
  misc_feature (161)..(275): NCBI GI NO: 15220238 NR Description: hypothetical protein [Arabidopsis thaliana]
  misc_feature (153)..(223): NCBI GI NO: 18414384 NR Description: expressed protein [Arabidopsis thaliana]
  misc_feature (109)..(272): NCBI GI NO: 18403283 NR Description: expressed protein [Arabidopsis thaliana]
  misc_feature (153)..(223): NCBI GI NO: 21593100 NR Description: unknown [Arabidopsis thaliana]
  misc_feature (97)..(199): NCBI GI NO: 22324429 NR Description: unknown protein
MQSSSTAGDEEYDSRADPSLSSSISAFFNSNSHPSAPPQPTTLTNHVGPPFSTQHHHVFDPLSSNYLDPTQRSPQSNQILNLDMVRSKVAARSGPDFSSFIPSSSPHNNNNQAFLLTQLGGGGVNNVGAFPSTTLPPESGGGGLVMNEQVNSSNTNKNMVRNPKKRSRASRRAPTTVLTTDTTNFRAMVQEFTGIPAPPFTSSSSSFPRTRLDLFATSNASSSSIIREQTPSYLLRPFAHKVQAQVPSSIPPPSSFQPMLNNYHHHHHQHNPILSFQSILQPHQLIGSKTQQQPSLEIPPSALGLEELGLNHAHHQNINMRSSSSDGTLSRVNNDNNNMRGPSADWAQAQAQRIDNNDGGLLGSLTGATLNYRSNIVSDQRVKVTNNSDFHGEKGPECVVAVRSEGMVESWINCSSD

SEQ ID NO: 8780 - protein, 334 aa, Glycine max
  peptide (1)..(334): Ceres Seq. ID no. 14314414
  misc_feature (88)..(116): Pfam Name: Pfam Description:  VQ motif
  misc_feature (78)..(281): NCBI GI NO: 15238363 NR Description: expressed protein [Arabidopsis thaliana]
  misc_feature (24)..(262): NCBI GI NO: 15235990 NR Description: expressed protein [Arabidopsis thaliana]
  misc_feature (78)..(192): NCBI GI NO: 15220238 NR Description: hypothetical protein [Arabidopsis thaliana]
  misc_feature (70)..(140): NCBI GI NO: 18414384 NR Description: expressed protein [Arabidopsis thaliana]
  misc_feature (26)..(189): NCBI GI NO: 18403283 NR Description: expressed protein [Arabidopsis thaliana]
  misc_feature (70)..(140): NCBI GI NO: 21593100 NR Description: unknown [Arabidopsis thaliana]
  misc_feature (14)..(116): NCBI GI NO: 22324429 NR Description: unknown protein
MVRSKVAARSGPDFSSFIPSSSPHNNNNQAFLLTQLGGGGVNNVGAFPSTTLPPESGGGGLVMNEQVNSSNTNKNMVRNPKKRSRASRRAPTTVLTTDTTNFRAMVQEFTGIPAPPFTSSSSSFPRTRLDLFATSNASSSSIIREQTPSYLLRPFAHKVQAQVPSSIPPPSSFQPMLNNYHHHHHQHNPILSFQSILQPHQLIGSKTQQQPSLEIPPSALGLEELGLNHAHHQNINMRSSSSDGTLSRVNNDNNNMRGPSADWAQAQAQRIDNNDGGLLGSLTGATLNYRSNIVSDQRVKVTNNSDFHGEKGPECVVAVRSEGMVESWINCSSD

SEQ ID NO: 8781 - DNA, 1109 bp, Glycine max
  misc_feature (1)..(1109): Ceres Seq. ID no. 15173557
agtttagataaacctccgactctgttctcaaggcgtcgtaacatcctcgtcactctcacacatcacacaacaatggcttctcttcattcttctttcctccttacatcaaattttctttccctcacaaccccatcaagttcttccactcacgttctctttcccatgagactctccacgacccacttgcgaccccttcttctcaccacacgacacggtttcgggagaccaccctttgccgcggtggcggaacaggcggccaccgcgaccgaggcgtccgcgaggaggctctacgttggcaacattccccgcaccgtcaccaacgaagagcttgccaagattgttcaagaacatggtgctgttgagaaagctgaggttatgtatgataaatactctggaaggagccgccgctttgcatttgttacgatgaaaactgttgaggatgcaactgctgtgattgagaaacttaacggcactgaaattggaggacgtgaggtcaaagtaaacgtaacggaaaaacctttatcaacaccagatttgcctttactccaagctgaggaatctgaatttattgacagtccccacaaggtgtatgtgggaaatctggccaaaacagtaacaactgatactcttaaaaactttttttctgagaagggaaaagttcttagtgccaaggtttcacgggtccctggtacctcaaaatccagtggatatgggtttgttactttttcgtcagaagaggatgtagaagctgcaatctcatctttcaacaattctttgttagaaggccaaacaatccgtgtaaacaaggcatagagaattagcaatgttggagagcatgtttgaccacgtgtcatctagccggaacaatgtatactttgtgtgaggctgaaaccactagcaaatttccttgtctcttgtatagcataaacctaatcattttcagttgataaggttctacgaaaaaatagtgcttcatgcttctgttgcaggcattgctcctttagtccaggatattgagacctcactttttcttcatgatcatgttgttgcacctttctactctgcttcagtgttgcaactcttgttgatatatgcatgtattcaattcc

SEQ ID NO: 8782 - protein, 270 aa, Glycine max
  peptide (1)..(270): Ceres Seq. ID no. 15173558
  misc_feature (96)..(167): Pfam Name: a.k.a. RRM, RBD, or RNP domain Pfam Description: RNA recognition motif.
  misc_feature (77)..(270): NCBI GI NO: 30693595 NR Description: RNA recognition motif (RRM)-containing protein
  misc_feature (25)..(270): NCBI GI NO: 7578881 NR Description: plastid-specific ribosomal protein 2 precursor
  misc_feature (77)..(267): NCBI GI NO: 11357772 NR Description: hypothetical protein F4F15
  misc_feature (156)..(270): NCBI GI NO: 20159727 NR Description: plastid-specific ribosomal protein 2 precursor
  misc_feature (83)..(270): NCBI GI NO: 681912 NR Description: cp33 [Arabidopsis thaliana]
  misc_feature (83)..(270): NCBI GI NO: 17064758 NR Description: ubiquitin / ribosomal protein CEP52
  misc_feature (83)..(270): NCBI GI NO: 15231200 NR Description: 33 kDa ribonucleoprotein, chloroplast
  misc_feature (81)..(270): NCBI GI NO: 1076509 NR Description: RNA-binding protein RNP1 precursor - kidney bean
  misc_feature (83)..(270): NCBI GI NO: 7446342 NR Description: RNA-binding protein precursor, 33K - wood tobacco
  misc_feature (83)..(270): NCBI GI NO: 133249 NR Description: 33 kDa ribonucleoprotein, chloroplast precursor
SLDKPPTLFSRRRNILVTLTHHTTMASLHSSFLLTSNFLSLTTPSSSSTHVLFPMRLSTTHLRPLLLTTRHGFGRPPFAAVAEQAATATEASARRLYVGNIPRTVTNEELAKIVQEHGAVEKAEVMYDKYSGRSRRFAFVTMKTVEDATAVIEKLNGTEIGGREVKVNVTEKPLSTPDLPLLQAEESEFIDSPHKVYVGNLAKTVTTDTLKNFFSEKGKVLSAKVSRVPGTSKSSGYGFVTFSSEEDVEAAISSFNNSLLEGQTIRVNKA

SEQ ID NO: 8783 - protein, 246 aa, Glycine max
  peptide (1)..(246): Ceres Seq. ID no. 15173559
  misc_feature (72)..(143): Pfam Name: a.k.a. RRM, RBD, or RNP domain Pfam Description: RNA recognition motif.
  misc_feature (53)..(246): NCBI GI NO: 30693595 NR Description: RNA recognition motif (RRM)-containing protein
  misc_feature (1)..(246): NCBI GI NO: 7578881 NR Description: plastid-specific ribosomal protein 2 precursor
  misc_feature (53)..(243): NCBI GI NO: 11357772 NR Description: hypothetical protein F4F15
  misc_feature (132)..(246): NCBI GI NO: 20159727 NR Description: plastid-specific ribosomal protein 2 precursor
  misc_feature (59)..(246): NCBI GI NO: 681912 NR Description: cp33 [Arabidopsis thaliana]
  misc_feature (59)..(246): NCBI GI NO: 15231200 NR Description: 33 kDa ribonucleoprotein, chloroplast
  misc_feature (59)..(246): NCBI GI NO: 17064758 NR Description: ubiquitin / ribosomal protein CEP52
  misc_feature (57)..(246): NCBI GI NO: 1076509 NR Description: RNA-binding protein RNP1 precursor - kidney bean
  misc_feature (59)..(246): NCBI GI NO: 7446342 NR Description: RNA-binding protein precursor, 33K - wood tobacco
  misc_feature (59)..(246): NCBI GI NO: 133249 NR Description: 33 kDa ribonucleoprotein, chloroplast precursor
MASLHSSFLLTSNFLSLTTPSSSSTHVLFPMRLSTTHLRPLLLTTRHGFGRPPFAAVAEQAATATEASARRLYVGNIPRTVTNEELAKIVQEHGAVEKAEVMYDKYSGRSRRFAFVTMKTVEDATAVIEKLNGTEIGGREVKVNVTEKPLSTPDLPLLQAEESEFIDSPHKVYVGNLAKTVTTDTLKNFFSEKGKVLSAKVSRVPGTSKSSGYGFVTFSSEEDVEAAISSFNNSLLEGQTIRVNKA

SEQ ID NO: 8784 - protein, 216 aa, Glycine max
  peptide (1)..(216): Ceres Seq. ID no. 15173560
  misc_feature (42)..(113): Pfam Name: a.k.a. RRM, RBD, or RNP domain Pfam Description: RNA recognition motif.
  misc_feature (23)..(216): NCBI GI NO: 30693595 NR Description: RNA recognition motif (RRM)-containing protein
  misc_feature (1)..(216): NCBI GI NO: 7578881 NR Description: plastid-specific ribosomal protein 2 precursor
  misc_feature (23)..(213): NCBI GI NO: 11357772 NR Description: hypothetical protein F4F15
  misc_feature (102)..(216): NCBI GI NO: 20159727 NR Description: plastid-specific ribosomal protein 2 precursor
  misc_feature (29)..(216): NCBI GI NO: 681912 NR Description: cp33 [Arabidopsis thaliana]
  misc_feature (29)..(216): NCBI GI NO: 15231200 NR Description: 33 kDa ribonucleoprotein, chloroplast
  misc_feature (29)..(216): NCBI GI NO: 17064758 NR Description: ubiquitin / ribosomal protein CEP52
  misc_feature (27)..(216): NCBI GI NO: 1076509 NR Description: RNA-binding protein RNP1 precursor - kidney bean
  misc_feature (29)..(216): NCBI GI NO: 7446342 NR Description: RNA-binding protein precursor, 33K - wood tobacco
  misc_feature (29)..(216): NCBI GI NO: 133249 NR Description: 33 kDa ribonucleoprotein, chloroplast precursor
MRLSTTHLRPLLLTTRHGFGRPPFAAVAEQAATATEASARRLYVGNIPRTVTNEELAKIVQEHGAVEKAEVMYDKYSGRSRRFAFVTMKTVEDATAVIEKLNGTEIGGREVKVNVTEKPLSTPDLPLLQAEESEFIDSPHKVYVGNLAKTVTTDTLKNFFSEKGKVLSAKVSRVPGTSKSSGYGFVTFSSEEDVEAAISSFNNSLLEGQTIRVNKA

SEQ ID NO: 8785 - DNA, 1130 bp, Glycine max
  misc_feature (1)..(1130): Ceres Seq. ID no. 14305671
aaaaaagcctcctcctctttctcttgttcaaccttcccacaaacactgcatgcgtctttgaccacaactgcttcttcaatttccaatctttttggacaccctctattgctattcctcccttggtgttgtttgtgttaaagggtatctctctacttaatataaagttccattgtctcttgaggcaattttcaaccttagttgtgtgtttcggagagtttttttgtgttgttttgttgaggttgggtttgtgagtgagagaatggtgggtgctctatctgttgtgggttcatcagtgatggactctcacactggcccttgtttgtgtgttgatgctctcccaacaactagtgttaatctcaagagtggtggagatgttttgtgcaagaatttgatgggaaggaagcataatttggtgaagcatggtggtgggaccatgaagttgagcagttcatttgttgatcctggaagagagtggaggctctttgttaacaaaagttgcaagaggcagcgcaaggataggagagtgaccattgttaatgaacttggaggacaatatgaggacacttttgaagatgttaaagcgcaaatgctcaactatttcacatacaaggctgtgaggactgttcttcatcagttgtatgagatgaatccacctaaatacacgtggttctataattttgttgcttcaaacaaaccagcagatgggaaacgttttattcgatcacttgggaaggagcaacaagagcttgctgaaagagtgatggtaactcggcttcacctttatggaaaatgggtcaagaaatgtaatcatgctgagatatatcaagaaatctctgatgaaaacttggagttaatgagggaacggctcatggagacagtaatatggccctcagatgacacaaacacggaaaagattggctgataattcatctcaaatttttactttctgtcttcaacctcttcctagtctaggtatattttttgtttcaatatcaatctgttttgtttccaaaattgtcatttgtgtcattttcctttgataggattctcagttttacgttatgtaaattatgtatatatttgtaccttgttaaatacacaatccattatatatcgctagtttcagatgt

SEQ ID NO: 8786 - protein, 220 aa, Glycine max
  peptide (1)..(220): Ceres Seq. ID no. 14305672
  misc_feature (104)..(215): Pfam Name: Pfam Description:  RbcX protein
  misc_feature (1)..(216): NCBI GI NO: 18420050 NR Description: expressed protein [Arabidopsis thaliana]
  misc_feature (81)..(220): NCBI GI NO: 30103018 NR Description: unknown protein
  misc_feature (73)..(216): NCBI GI NO: 33146778 NR Description: unknown protein
  misc_feature (104)..(174): NCBI GI NO: 23040626 NR Description: hypothetical protein
  misc_feature (104)..(215): NCBI GI NO: 2463319 NR Description: rbcX [Nostoc sp.]
  misc_feature (104)..(203): NCBI GI NO: 2126547 NR Description: rbcX protein - Anabaena sp
  misc_feature (104)..(203): NCBI GI NO: 2463298 NR Description: rbcX [Nostoc commune]
  misc_feature (104)..(203): NCBI GI NO: 541323 NR Description: hypothetical 15.2K protein - Anabaena sp
  misc_feature (99)..(219): NCBI GI NO: 15282295 NR Description: RbcX protein [Anabaena solitaria]
  misc_feature (104)..(203): NCBI GI NO: 2463304 NR Description: rbcX [Nostoc flagelliforme]
MVGALSVVGSSVMDSHTGPCLCVDALPTTSVNLKSGGDVLCKNLMGRKHNLVKHGGGTMKLSSSFVDPGREWRLFVNKSCKRQRKDRRVTIVNELGGQYEDTFEDVKAQMLNYFTYKAVRTVLHQLYEMNPPKYTWFYNFVASNKPADGKRFIRSLGKEQQELAERVMVTRLHLYGKWVKKCNHAEIYQEISDENLELMRERLMETVIWPSDDTNTEKIG

SEQ ID NO: 8787 - protein, 208 aa, Glycine max
  peptide (1)..(208): Ceres Seq. ID no. 14305673
  misc_feature (92)..(203): Pfam Name: Pfam Description:  RbcX protein
  misc_feature (1)..(204): NCBI GI NO: 18420050 NR Description: expressed protein [Arabidopsis thaliana]
  misc_feature (69)..(208): NCBI GI NO: 30103018 NR Description: unknown protein
  misc_feature (61)..(204): NCBI GI NO: 33146778 NR Description: unknown protein
  misc_feature (92)..(162): NCBI GI NO: 23040626 NR Description: hypothetical protein
  misc_feature (92)..(203): NCBI GI NO: 2463319 NR Description: rbcX [Nostoc sp.]
  misc_feature (92)..(191): NCBI GI NO: 2126547 NR Description: rbcX protein - Anabaena sp
  misc_feature (92)..(191): NCBI GI NO: 2463298 NR Description: rbcX [Nostoc commune]
  misc_feature (92)..(191): NCBI GI NO: 541323 NR Description: hypothetical 15.2K protein - Anabaena sp
  misc_feature (87)..(207): NCBI GI NO: 15282295 NR Description: RbcX protein [Anabaena solitaria]
  misc_feature (92)..(191): NCBI GI NO: 2463304 NR Description: rbcX [Nostoc flagelliforme]
MDSHTGPCLCVDALPTTSVNLKSGGDVLCKNLMGRKHNLVKHGGGTMKLSSSFVDPGREWRLFVNKSCKRQRKDRRVTIVNELGGQYEDTFEDVKAQMLNYFTYKAVRTVLHQLYEMNPPKYTWFYNFVASNKPADGKRFIRSLGKEQQELAERVMVTRLHLYGKWVKKCNHAEIYQEISDENLELMRERLMETVIWPSDDTNTEKIG

SEQ ID NO: 8788 - protein, 176 aa, Glycine max
  peptide (1)..(176): Ceres Seq. ID no. 14305674
  misc_feature (60)..(171): Pfam Name: Pfam Description:  RbcX protein
  misc_feature (1)..(172): NCBI GI NO: 18420050 NR Description: expressed protein [Arabidopsis thaliana]
  misc_feature (37)..(176): NCBI GI NO: 30103018 NR Description: unknown protein
  misc_feature (29)..(172): NCBI GI NO: 33146778 NR Description: unknown protein
  misc_feature (60)..(130): NCBI GI NO: 23040626 NR Description: hypothetical protein
  misc_feature (60)..(171): NCBI GI NO: 2463319 NR Description: rbcX [Nostoc sp.]
  misc_feature (60)..(159): NCBI GI NO: 2126547 NR Description: rbcX protein - Anabaena sp
  misc_feature (60)..(159): NCBI GI NO: 2463298 NR Description: rbcX [Nostoc commune]
  misc_feature (60)..(159): NCBI GI NO: 541323 NR Description: hypothetical 15.2K protein - Anabaena sp
  misc_feature (55)..(175): NCBI GI NO: 15282295 NR Description: RbcX protein [Anabaena solitaria]
  misc_feature (60)..(159): NCBI GI NO: 2463304 NR Description: rbcX [Nostoc flagelliforme]
MGRKHNLVKHGGGTMKLSSSFVDPGREWRLFVNKSCKRQRKDRRVTIVNELGGQYEDTFEDVKAQMLNYFTYKAVRTVLHQLYEMNPPKYTWFYNFVASNKPADGKRFIRSLGKEQQELAERVMVTRLHLYGKWVKKCNHAEIYQEISDENLELMRERLMETVIWPSDDTNTEKIG

SEQ ID NO: 8789 - DNA, 1377 bp, Glycine max
  misc_feature (1)..(1377): Ceres Seq. ID no. 14314400
aggaatgtgtcactactgaactgtgcaatatgagtgcttgcaaaaccctttcatgtttctccctctcttcttcctcttccttcttcaaacccacccttctccaccctcgccaacgtctaaccctaactcggagatgttccacgtcagccctactcgaagaaccggaaccccaatctccgagcgttcagcacctcctcacgagtcccgacggcgtctccacgctgatgaagatggaccgcaagcctcttctccctcacgagccgcacgttcgctggttcccttacctcgacgcctaccgctgccgaaacggctgcgttttgagcagcgccgaggtcgtccaggccctcgcgccctgcatctccgacgaccggaggcagaggttcgggagcgtggttcggaaccggagctactcggtctgcctcgtcgtggaagggctctgcgacttcggcaacgtctccgccacgttccggtccgcggacgcgcttggcgtccagtccgtccacgtcgtgtcgtgtgacgccaacaaaaggtataaagataatcgccatgtgagcatgggtgcagagaaatggttggacattgaactgtgggactctacaaaggagtgctttaaaatgttgaaatcacgcggttatcgaattgcgacaactcatgtgggaatggatgcggtttctattcatgacttagattggtcctgcccaactgcaatcgtggttgggaatgaaaataggggtattagtgatgaggcattggagctgtcagatttgcattgcagtattcctatggcaggaatggtggactctttcaatgtttcagttgctgcgggaatcctcatgcaccactctgtttgtgatagaatatctcgtatgggccgtcatggtgatctaacagtggaagaatgccagattctacttgcagagttttctctgcgccatagcaagagttcgattagtattgttgaagattatgcaatgcgtaaagcagcgacattgacctaacagcaataacaggaagtcaaacttcttctgactgtgcttggctgcttgcctgtacttggcaaggagacaaaccagagactagattgtctctgattgattgaatgattcctacaaactagcattagcttatgcatgctgtgcaaggctcacagatgacaatggggaccttaccaacacccagcttcttggactatagaatatttccttaatgatgtgcttactagccccactttacttagcaatgggggaatgatgctgtcaaaagtgcaattgcaattttatttatgtggatttttcgggccttacagtatctaatggtttttatttggatgagaaaagaaaatagaaaagggaaattttttacctcctatttttaagc

SEQ ID NO: 8790 - protein, 331 aa, Glycine max
  peptide (1)..(331): Ceres Seq. ID no. 14314401
  misc_feature (137)..(279): Pfam Name: Pfam Description:  SpoU rRNA Methylase family
  misc_feature (19)..(326): NCBI GI NO: 15242287 NR Description: rRNA methylase - like protein
  misc_feature (71)..(327): NCBI GI NO: 34393586 NR Description: putative rRNA methylase
  misc_feature (92)..(329): NCBI GI NO: 28207743 NR Description: CR004 protein [Chlamydomonas reinhardtii]
  misc_feature (119)..(281): NCBI GI NO: 27364301 NR Description: rRNA methylases [Vibrio vulnificus CMCP6]
  misc_feature (119)..(302): NCBI GI NO: 20808975 NR Description: rRNA methylase [Thermoanaerobacter tengcongensis]
  misc_feature (119)..(308): NCBI GI NO: 15606763 NR Description: rRNA methylase SpoU [Aquifex aeolicus]
  misc_feature (119)..(306): NCBI GI NO: 32562924 NR Description: tRNA (guanosine-2'-O-)-methyltransferase
  misc_feature (115)..(278): NCBI GI NO: 21673707 NR Description: tRNA methyltransferase SpoU
  misc_feature (122)..(281): NCBI GI NO: 28896932 NR Description: tRNA methyltransferase
  misc_feature (123)..(285): NCBI GI NO: 33866213 NR Description: putative tRNA (guanosine-2'-O-)-methyltransferase
ECVTTELCNMSACKTLSCFSLSSSSSFFKPTLLHPRQRLTLTRRCSTSALLEEPEPQSPSVQHLLTSPDGVSTLMKMDRKPLLPHEPHVRWFPYLDAYRCRNGCVLSSAEVVQALAPCISDDRRQRFGSVVRNRSYSVCLVVEGLCDFGNVSATFRSADALGVQSVHVVSCDANKRYKDNRHVSMGAEKWLDIELWDSTKECFKMLKSRGYRIATTHVGMDAVSIHDLDWSCPTAIVVGNENRGISDEALELSDLHCSIPMAGMVDSFNVSVAAGILMHHSVCDRISRMGRHGDLTVEECQILLAEFSLRHSKSSISIVEDYAMRKAATLT

SEQ ID NO: 8791 - protein, 322 aa, Glycine max
  peptide (1)..(322): Ceres Seq. ID no. 14314402
  misc_feature (128)..(270): Pfam Name: Pfam Description:  SpoU rRNA Methylase family
  misc_feature (10)..(317): NCBI GI NO: 15242287 NR Description: rRNA methylase - like protein
  misc_feature (62)..(318): NCBI GI NO: 34393586 NR Description: putative rRNA methylase
  misc_feature (83)..(320): NCBI GI NO: 28207743 NR Description: CR004 protein [Chlamydomonas reinhardtii]
  misc_feature (110)..(272): NCBI GI NO: 27364301 NR Description: rRNA methylases [Vibrio vulnificus CMCP6]
  misc_feature (110)..(293): NCBI GI NO: 20808975 NR Description: rRNA methylase [Thermoanaerobacter tengcongensis]
  misc_feature (110)..(299): NCBI GI NO: 15606763 NR Description: rRNA methylase SpoU [Aquifex aeolicus]
  misc_feature (110)..(297): NCBI GI NO: 32562924 NR Description: tRNA (guanosine-2'-O-)-methyltransferase
  misc_feature (106)..(269): NCBI GI NO: 21673707 NR Description: tRNA methyltransferase SpoU
  misc_feature (113)..(272): NCBI GI NO: 28896932 NR Description: tRNA methyltransferase
  misc_feature (114)..(276): NCBI GI NO: 33866213 NR Description: putative tRNA (guanosine-2'-O-)-methyltransferase
MSACKTLSCFSLSSSSSFFKPTLLHPRQRLTLTRRCSTSALLEEPEPQSPSVQHLLTSPDGVSTLMKMDRKPLLPHEPHVRWFPYLDAYRCRNGCVLSSAEVVQALAPCISDDRRQRFGSVVRNRSYSVCLVVEGLCDFGNVSATFRSADALGVQSVHVVSCDANKRYKDNRHVSMGAEKWLDIELWDSTKECFKMLKSRGYRIATTHVGMDAVSIHDLDWSCPTAIVVGNENRGISDEALELSDLHCSIPMAGMVDSFNVSVAAGILMHHSVCDRISRMGRHGDLTVEECQILLAEFSLRHSKSSISIVEDYAMRKAATLT

SEQ ID NO: 8792 - protein, 257 aa, Glycine max
  peptide (1)..(257): Ceres Seq. ID no. 14314403
  misc_feature (63)..(205): Pfam Name: Pfam Description:  SpoU rRNA Methylase family
  misc_feature (1)..(252): NCBI GI NO: 15242287 NR Description: rRNA methylase - like protein
  misc_feature (1)..(253): NCBI GI NO: 34393586 NR Description: putative rRNA methylase
  misc_feature (18)..(255): NCBI GI NO: 28207743 NR Description: CR004 protein [Chlamydomonas reinhardtii]
  misc_feature (45)..(207): NCBI GI NO: 27364301 NR Description: rRNA methylases [Vibrio vulnificus CMCP6]
  misc_feature (45)..(228): NCBI GI NO: 20808975 NR Description: rRNA methylase [Thermoanaerobacter tengcongensis]
  misc_feature (45)..(234): NCBI GI NO: 15606763 NR Description: rRNA methylase SpoU [Aquifex aeolicus]
  misc_feature (45)..(232): NCBI GI NO: 32562924 NR Description: tRNA (guanosine-2'-O-)-methyltransferase
  misc_feature (41)..(204): NCBI GI NO: 21673707 NR Description: tRNA methyltransferase SpoU
  misc_feature (48)..(207): NCBI GI NO: 28896932 NR Description: tRNA methyltransferase
  misc_feature (49)..(211): NCBI GI NO: 33866213 NR Description: putative tRNA (guanosine-2'-O-)-methyltransferase
MKMDRKPLLPHEPHVRWFPYLDAYRCRNGCVLSSAEVVQALAPCISDDRRQRFGSVVRNRSYSVCLVVEGLCDFGNVSATFRSADALGVQSVHVVSCDANKRYKDNRHVSMGAEKWLDIELWDSTKECFKMLKSRGYRIATTHVGMDAVSIHDLDWSCPTAIVVGNENRGISDEALELSDLHCSIPMAGMVDSFNVSVAAGILMHHSVCDRISRMGRHGDLTVEECQILLAEFSLRHSKSSISIVEDYAMRKAATLT

SEQ ID NO: 8793 - DNA, 1775 bp, Glycine max
  misc_feature (1)..(1775): Ceres Seq. ID no. 14306857
aatcctcataactgcactatcacacacatagttctcttatctggtgcaagtgcaacaatcaagtactcatcagcatgggaatgttgttgttgttgttgtcttattctctccttttcctggttctattccttacactgaaatcccttttccaaagcagaaaattgagaaacctaccaccaggtcctcctcctcttcccataataggtaaccttaacctcctcgaacaacctattcaccgtttcttccaacgcatgtccaaagaatatggaaacatcgtttccctttggttcggttcacgtctcgccgttgtcatttcctcaccaactgcataccaagaatgcttcaccaaacacgacgttgccttggccaaccggctaccttctctctcgggaaaatacatattctacaacaacaccaccgtagggtcctgctcccacggccagcactggcggaacctccgccgaatcaccgccctggacgtcctctccacgcagcgagtccactctttctccggaatccgaagcgacgagacgaaaaggttggtacagaggttgctggccaagaactccaaggagggttttgctcgcgtggagataagctccatgttcaatgacttgacctacaacaacatcatgaggatgatatcagggaagaggttttacggagaggagagtgagttgaagaacgttgagaaagcgagggagttcagagagacagtgacagagatgctagaactcatgggggtggctaataagggagatcacttacctttcctaagatggttcgattttcagaatgtggagaagcgtttgaagagtattagtaaaaggtatgataccatcttgaatgagatcattgatgagaaccgtagcaagaaggaccgcgagaattccatgattgatcatcttctcaaactgcaagagactcagcctgagtactacactgaccaaatcatcaaaggccttgctttggccatgctttttggcggaactgactcatcaacgggaaccttagagtggtcgctatctaatttattgaatcacccagaggtgttgaagaaagcaaaagaagaattggacactcaagtaggacaagaccgcttgttaaatgagtcagaccttccaaaacttccttatcttagaaagatcattcttgagacacttaggttgtatcctccagctccaattctaatacctcatgtgtcttcagaagatatcactattgaaggattcaatgtcccacgagacacaattgtgatcattaatggttggggcatgcagagagatcctcatttgtggaatgatgccacatgctttaaacctgagaggtttgatgtggaaggagaggagaaaaagttggtagcatttggaatgggaagaagggcttgcccaggagaacccatggctatgcaaagtgtcagctttactttgggattattgattcaatgttttgactggaaacgagtaagtgaggaaaagcttgatatgacagagaataattggattaccttgtcaaggttaattccattggaagccatgtgcaaggctcgtccactcgccactaaaattggagtttaattattaatagtttttttatttggtaaagttgggtcaacatctaatacttataatttcagtgtgcatgtggtggttatacatgttaaacataatagtatttgtttgtatgtttacaaggccagttgtagaattggtgtgcattaggatatattaatattgtatgcatccccaacttctcaaataaattttttacttttt

SEQ ID NO: 8794 - protein, 500 aa, Glycine max
  peptide (1)..(500): Ceres Seq. ID no. 14306858
  misc_feature (34)..(487): Pfam Name: Pfam Description:  Cytochrome P450
  misc_feature (4)..(498): NCBI GI NO: 4200044 NR Description: cytochrome P450 [Glycyrrhiza echinata]
  misc_feature (1)..(498): NCBI GI NO: 3850630 NR Description: cytochrome P450 [Cicer arietinum]
  misc_feature (4)..(498): NCBI GI NO: 5915842 NR Description: Cytochrome P450 81E1
  misc_feature (1)..(498): NCBI GI NO: 4688640 NR Description: cytochrome P450 monooxygenase [Cicer arietinum]
  misc_feature (1)..(498): NCBI GI NO: 33521517 NR Description: isoflavone 2'-hydroxylase [Medicago truncatula]
  misc_feature (4)..(498): NCBI GI NO: 7415996 NR Description: cytochrome P450
  misc_feature (8)..(498): NCBI GI NO: 4894170 NR Description: cytochrome P450 [Cicer arietinum]
  misc_feature (3)..(498): NCBI GI NO: 15235535 NR Description: cytochrome P450 family [Arabidopsis thaliana]
  misc_feature (3)..(498): NCBI GI NO: 15228472 NR Description: cytochrome P450 family [Arabidopsis thaliana]
  misc_feature (11)..(498): NCBI GI NO: 15235534 NR Description: cytochrome P450 family [Arabidopsis thaliana]
MGMLLLLLSYSLLFLVLFLTLKSLFQSRKLRNLPPGPPPLPIIGNLNLLEQPIHRFFQRMSKEYGNIVSLWFGSRLAVVISSPTAYQECFTKHDVALANRLPSLSGKYIFYNNTTVGSCSHGQHWRNLRRITALDVLSTQRVHSFSGIRSDETKRLVQRLLAKNSKEGFARVEISSMFNDLTYNNIMRMISGKRFYGEESELKNVEKAREFRETVTEMLELMGVANKGDHLPFLRWFDFQNVEKRLKSISKRYDTILNEIIDENRSKKDRENSMIDHLLKLQETQPEYYTDQIIKGLALAMLFGGTDSSTGTLEWSLSNLLNHPEVLKKAKEELDTQVGQDRLLNESDLPKLPYLRKIILETLRLYPPAPILIPHVSSEDITIEGFNVPRDTIVIINGWGMQRDPHLWNDATCFKPERFDVEGEEKKLVAFGMGRRACPGEPMAMQSVSFTLGLLIQCFDWKRVSEEKLDMTENNWITLSRLIPLEAMCKARPLATKIGV

SEQ ID NO: 8795 - protein, 498 aa, Glycine max
  peptide (1)..(498): Ceres Seq. ID no. 14306859
  misc_feature (32)..(485): Pfam Name: Pfam Description:  Cytochrome P450
  misc_feature (2)..(496): NCBI GI NO: 4200044 NR Description: cytochrome P450 [Glycyrrhiza echinata]
  misc_feature (1)..(496): NCBI GI NO: 3850630 NR Description: cytochrome P450 [Cicer arietinum]
  misc_feature (2)..(496): NCBI GI NO: 5915842 NR Description: Cytochrome P450 81E1
  misc_feature (1)..(496): NCBI GI NO: 4688640 NR Description: cytochrome P450 monooxygenase [Cicer arietinum]
  misc_feature (1)..(496): NCBI GI NO: 33521517 NR Description: isoflavone 2'-hydroxylase [Medicago truncatula]
  misc_feature (2)..(496): NCBI GI NO: 7415996 NR Description: cytochrome P450
  misc_feature (6)..(496): NCBI GI NO: 4894170 NR Description: cytochrome P450 [Cicer arietinum]
  misc_feature (1)..(496): NCBI GI NO: 15235535 NR Description: cytochrome P450 family [Arabidopsis thaliana]
  misc_feature (1)..(496): NCBI GI NO: 15228472 NR Description: cytochrome P450 family [Arabidopsis thaliana]
  misc_feature (9)..(496): NCBI GI NO: 15235534 NR Description: cytochrome P450 family [Arabidopsis thaliana]
MLLLLLSYSLLFLVLFLTLKSLFQSRKLRNLPPGPPPLPIIGNLNLLEQPIHRFFQRMSKEYGNIVSLWFGSRLAVVISSPTAYQECFTKHDVALANRLPSLSGKYIFYNNTTVGSCSHGQHWRNLRRITALDVLSTQRVHSFSGIRSDETKRLVQRLLAKNSKEGFARVEISSMFNDLTYNNIMRMISGKRFYGEESELKNVEKAREFRETVTEMLELMGVANKGDHLPFLRWFDFQNVEKRLKSISKRYDTILNEIIDENRSKKDRENSMIDHLLKLQETQPEYYTDQIIKGLALAMLFGGTDSSTGTLEWSLSNLLNHPEVLKKAKEELDTQVGQDRLLNESDLPKLPYLRKIILETLRLYPPAPILIPHVSSEDITIEGFNVPRDTIVIINGWGMQRDPHLWNDATCFKPERFDVEGEEKKLVAFGMGRRACPGEPMAMQSVSFTLGLLIQCFDWKRVSEEKLDMTENNWITLSRLIPLEAMCKARPLATKIGV

SEQ ID NO: 8796 - protein, 441 aa, Glycine max
  peptide (1)..(441): Ceres Seq. ID no. 14306860
  misc_feature (1)..(428): Pfam Name: Pfam Description:  Cytochrome P450
  misc_feature (1)..(439): NCBI GI NO: 4200044 NR Description: cytochrome P450 [Glycyrrhiza echinata]
  misc_feature (1)..(439): NCBI GI NO: 3850630 NR Description: cytochrome P450 [Cicer arietinum]
  misc_feature (1)..(439): NCBI GI NO: 5915842 NR Description: Cytochrome P450 81E1
  misc_feature (1)..(439): NCBI GI NO: 4688640 NR Description: cytochrome P450 monooxygenase [Cicer arietinum]
  misc_feature (1)..(439): NCBI GI NO: 33521517 NR Description: isoflavone 2'-hydroxylase [Medicago truncatula]
  misc_feature (1)..(439): NCBI GI NO: 7415996 NR Description: cytochrome P450
  misc_feature (1)..(439): NCBI GI NO: 4894170 NR Description: cytochrome P450 [Cicer arietinum]
  misc_feature (1)..(439): NCBI GI NO: 15235535 NR Description: cytochrome P450 family [Arabidopsis thaliana]
  misc_feature (1)..(439): NCBI GI NO: 15228472 NR Description: cytochrome P450 family [Arabidopsis thaliana]
  misc_feature (1)..(439): NCBI GI NO: 15235534 NR Description: cytochrome P450 family [Arabidopsis thaliana]
MSKEYGNIVSLWFGSRLAVVISSPTAYQECFTKHDVALANRLPSLSGKYIFYNNTTVGSCSHGQHWRNLRRITALDVLSTQRVHSFSGIRSDETKRLVQRLLAKNSKEGFARVEISSMFNDLTYNNIMRMISGKRFYGEESELKNVEKAREFRETVTEMLELMGVANKGDHLPFLRWFDFQNVEKRLKSISKRYDTILNEIIDENRSKKDRENSMIDHLLKLQETQPEYYTDQIIKGLALAMLFGGTDSSTGTLEWSLSNLLNHPEVLKKAKEELDTQVGQDRLLNESDLPKLPYLRKIILETLRLYPPAPILIPHVSSEDITIEGFNVPRDTIVIINGWGMQRDPHLWNDATCFKPERFDVEGEEKKLVAFGMGRRACPGEPMAMQSVSFTLGLLIQCFDWKRVSEEKLDMTENNWITLSRLIPLEAMCKARPLATKIGV

SEQ ID NO: 8797 - DNA, 1092 bp, Glycine max
  misc_feature (1)..(1092): Ceres Seq. ID no. 13581686
attcttctgattttgtttaatcatgaacggtgctcccaagcacgaacgccgctgggcgtccgacaccgtgccggagatggcattcgtcagcgccgggacttcgccgggaactgagtacaactccgtcaccgacgagtacgttgaggtcactctcgatgttcacgacgatcacaccatcgttctccgcgacgttgagccggtgactgtcgttaacatcgacgacggcgtcgcaacaagtggaaacgaaactccgacgtcctccgcgtggtcgccgtcgatcaggaggagctctcctaaccggtggcggcagttctcgcaggagctgaaggccgaggcggttgcgaaggcgaggcagttttcgcaggagctcaaggcggagctgcggtggttctcgtggagccaaggcggatctgaaacggcgttggtggctcgagatctcaggaagcagcgcgctcagcttgaccgcaaccgctccggtacgaagaaagcgctccgtggactgaaatttattagcagtaaatccaatggcgctgacgcctggaacgaggtgcaaagcaatttctatagtcttgccaaggacggttatctttatcgcactgattttgcgcaatgcatagggatgaaggactctaaggagttcgctctggaactatttgacgcgctgagtcgtagacgtagactgaaggttgaaaagatcagcagagacgagcttaacgaattctggtcgcaaattaccgatcaaagctttgattcgcggcttcagatattctttgacatggtggacaagaatgaagatggtaggatcaccgaagaagaagtgaaagagatcattatgctaagcgcttcagcaaataaattatccagattgaaagagcaggccgaggaatacgcagctctgatcatggaagagttagaccctgaaagacttggctacatcgaggtgggagttctctacaaatgataacatatgaatttatcaagaatacatgcatatattttaattctctaacacatatgagtacgtcacaaaagaaaatctttgtaagtgatagacattaatgttaatccaatccatgattaatttggtttccg

SEQ ID NO: 8798 - protein, 312 aa, Glycine max
  peptide (1)..(312): Ceres Seq. ID no. 13581687
  misc_feature (245)..(273): Pfam Name: Pfam Description:  EF hand
  misc_feature (3)..(312): NCBI GI NO: 34910200 NR Description: cytochrome b245 beta chain homolog rbohA
  misc_feature (1)..(133): NCBI GI NO: 4585142 NR Description: NADPH oxidase; gp91; phox homolog
  misc_feature (199)..(307): NCBI GI NO: 4585142 NR Description: NADPH oxidase; gp91; phox homolog
  misc_feature (40)..(307): NCBI GI NO: 3242456 NR Description: Atrboh F [Arabidopsis thaliana]
  misc_feature (40)..(307): NCBI GI NO: 25354658 NR Description: protein F22C12.18
  misc_feature (40)..(307): NCBI GI NO: 18407959 NR Description: respiratory burst oxidase protein F
  misc_feature (42)..(307): NCBI GI NO: 16549087 NR Description: respiratory burst oxidase homolog
  misc_feature (82)..(307): NCBI GI NO: 28268678 NR Description: respiratory burst oxidase homolog
  misc_feature (57)..(307): NCBI GI NO: 17384016 NR Description: NADPH oxidase [Nicotiana tabacum]
  misc_feature (40)..(307): NCBI GI NO: 18389310 NR Description: respiratory burst oxidase protein F
MNGAPKHERRWASDTVPEMAFVSAGTSPGTEYNSVTDEYVEVTLDVHDDHTIVLRDVEPVTVVNIDDGVATSGNETPTSSAWSPSIRRSSPNRWRQFSQELKAEAVAKARQFSQELKAELRWFSWSQGGSETALVARDLRKQRAQLDRNRSGTKKALRGLKFISSKSNGADAWNEVQSNFYSLAKDGYLYRTDFAQCIGMKDSKEFALELFDALSRRRRLKVEKISRDELNEFWSQITDQSFDSRLQIFFDMVDKNEDGRITEEEVKEIIMLSASANKLSRLKEQAEEYAALIMEELDPERLGYIEVGVLYK

SEQ ID NO: 8799 - protein, 294 aa, Glycine max
  peptide (1)..(294): Ceres Seq. ID no. 13581688
  misc_feature (227)..(255): Pfam Name: Pfam Description:  EF hand
  misc_feature (1)..(294): NCBI GI NO: 34910200 NR Description: cytochrome b245 beta chain homolog rbohA
  misc_feature (1)..(115): NCBI GI NO: 4585142 NR Description: NADPH oxidase; gp91; phox homolog
  misc_feature (181)..(289): NCBI GI NO: 4585142 NR Description: NADPH oxidase; gp91; phox homolog
  misc_feature (22)..(289): NCBI GI NO: 3242456 NR Description: Atrboh F [Arabidopsis thaliana]
  misc_feature (22)..(289): NCBI GI NO: 25354658 NR Description: protein F22C12.18
  misc_feature (22)..(289): NCBI GI NO: 18407959 NR Description: respiratory burst oxidase protein F
  misc_feature (24)..(289): NCBI GI NO: 16549087 NR Description: respiratory burst oxidase homolog
  misc_feature (64)..(289): NCBI GI NO: 28268678 NR Description: respiratory burst oxidase homolog
  misc_feature (39)..(289): NCBI GI NO: 17384016 NR Description: NADPH oxidase [Nicotiana tabacum]
  misc_feature (22)..(289): NCBI GI NO: 18389310 NR Description: respiratory burst oxidase protein F
MAFVSAGTSPGTEYNSVTDEYVEVTLDVHDDHTIVLRDVEPVTVVNIDDGVATSGNETPTSSAWSPSIRRSSPNRWRQFSQELKAEAVAKARQFSQELKAELRWFSWSQGGSETALVARDLRKQRAQLDRNRSGTKKALRGLKFISSKSNGADAWNEVQSNFYSLAKDGYLYRTDFAQCIGMKDSKEFALELFDALSRRRRLKVEKISRDELNEFWSQITDQSFDSRLQIFFDMVDKNEDGRITEEEVKEIIMLSASANKLSRLKEQAEEYAALIMEELDPERLGYIEVGVLYK

SEQ ID NO: 8800 - DNA, 1628 bp, Glycine max
  misc_feature (1)..(1628): Ceres Seq. ID no. 14315196
tccattttgtttggaacactgcgtaaggctgcgccaccacctccgcctccgtcgtccacggccagttgcttgcgttcctttcactttttttataattggctaagaataataatggcgtaccggcgctgcctcttgataagagggagcctcgtggatcggaggtgccatctgtctttcagttatgttctccacagcaacgaggggaagcgcgaacgcaccaatgaaaaatcatcttcaggaggggttggtgattttactcaaacaaggtcctttggaagctctcttaatggacagatgcggttcttctcgccttcccgagatagatttctttctccatgcaccggatatggtttctgccaatatatgtcgacggtgaatcggggttcagataagattggcagtgatgtaatgactgatgtggctgatgtcctcgctgacacgaccatggattctgtagcttctcaggctcctgttgttaatgaggttgctattgctgctgctgattcttttttgcctgtacaggccttgcagtacgtgatagatgctgtgcatttctacactggcttaaattggtgggcagccatagttctaacaaccctgttgattcgaaccgctacagttccactcttaataaatcaacttaaggccacttctaaacttacgttaatgaggcctcacttagaagagataaagcaagaaatggagggactgactatggatcctgtagctgttgctaaaggtcagcagcagatgaagaagctatttaaggaatatggtgtgagtccttttacgccattgaaaggactctttattcaaggccctatttttgttagtttttttcttgcgataacaaatatggctgaaaaagtgccgtcattcaagcatggtggagcttcttggtttattgatctctcaactcctgatgccctgtacgtttttccagttttgacagcattgtcattcttaataacagtagagtgtaatatgcaagaagggatggaaggaaatcctgtggctggtaccatgaaaaatgtctctaggggtcttgctgttcttacagttcctttcaccatgggatttccaaaggcaatattctgttactgggttacatcaaatttgttttcacttgtgtatggacttgtgcttaaagttcctggcgtaaagaaaactttgggtattcctgaaatacctgttgctccacccaccacgaccagtgctactcaatctcccttttctatatttcctgctctaaaacaagctacatctgcaacaacaaatgggtcaagctcaataccagatgaagcttcaaaacattcaaataaaaagatatcttctgcttctgttattagtcaaaggcttagaagtttagagaaacaagtgaaaggaagaaagaagaacaagaagtgaggaaaatttacaataatcctaaattataacatctatacatggagcaattgtgctcagcattttgttatattttattatcctgggatgagggagaaattagttcgaactttgtatgtttagtctacactcgattcatcggtttctcaattcttgtgtaaaacttggtccctatcagaaagggcggcctcaataattttatataacttttcatccttcatttt

SEQ ID NO: 8801 - protein, 468 aa, Glycine max
  peptide (1)..(468): Ceres Seq. ID no. 14315197
  misc_feature (191)..(387): Pfam Name: Pfam Description:  60Kd inner membrane protein
  misc_feature (38)..(466): NCBI GI NO: 15241690 NR Description: OXA1 protein (OXA1p) [Arabidopsis thaliana]
  misc_feature (47)..(467): NCBI GI NO: 15225991 NR Description: OXA1 protein (OXA1p), putative
  misc_feature (127)..(468): NCBI GI NO: 22122905 NR Description: putative cytochrome oxidase assembly protein
  misc_feature (127)..(468): NCBI GI NO: 37536158 NR Description: putative Oxa1 protein
  misc_feature (163)..(409): NCBI GI NO: 11359300 NR Description: respiratory protein oxa1-2 - fission yeast
  misc_feature (163)..(409): NCBI GI NO: 19112969 NR Description: oxa1sp2 protein [Schizosaccharomyces pombe]
  misc_feature (138)..(395): NCBI GI NO: 4826880 NR Description: oxidase (cytochrome c) assembly 1-like
  misc_feature (138)..(395): NCBI GI NO: 28193182 NR Description: unnamed protein product [Homo sapiens]
  misc_feature (138)..(395): NCBI GI NO: 37589026 NR Description: Oxidase (cytochrome c) assembly 1-like
  misc_feature (138)..(395): NCBI GI NO: 38372882 NR Description: Inner membrane protein OXA1L
SILFGTLRKAAPPPPPPSSTASCLRSFHFFYNWLRIIMAYRRCLLIRGSLVDRRCHLSFSYVLHSNEGKRERTNEKSSSGGVGDFTQTRSFGSSLNGQMRFFSPSRDRFLSPCTGYGFCQYMSTVNRGSDKIGSDVMTDVADVLADTTMDSVASQAPVVNEVAIAAADSFLPVQALQYVIDAVHFYTGLNWWAAIVLTTLLIRTATVPLLINQLKATSKLTLMRPHLEEIKQEMEGLTMDPVAVAKGQQQMKKLFKEYGVSPFTPLKGLFIQGPIFVSFFLAITNMAEKVPSFKHGGASWFIDLSTPDALYVFPVLTALSFLITVECNMQEGMEGNPVAGTMKNVSRGLAVLTVPFTMGFPKAIFCYWVTSNLFSLVYGLVLKVPGVKKTLGIPEIPVAPPTTTSATQSPFSIFPALKQATSATTNGSSSIPDEASKHSNKKISSASVISQRLRSLEKQVKGRKKNKK

SEQ ID NO: 8802 - protein, 431 aa, Glycine max
  peptide (1)..(431): Ceres Seq. ID no. 14315198
  misc_feature (154)..(350): Pfam Name: Pfam Description:  60Kd inner membrane protein
  misc_feature (1)..(429): NCBI GI NO: 15241690 NR Description: OXA1 protein (OXA1p) [Arabidopsis thaliana]
  misc_feature (10)..(430): NCBI GI NO: 15225991 NR Description: OXA1 protein (OXA1p), putative
  misc_feature (90)..(431): NCBI GI NO: 22122905 NR Description: putative cytochrome oxidase assembly protein
  misc_feature (90)..(431): NCBI GI NO: 37536158 NR Description: putative Oxa1 protein
  misc_feature (126)..(372): NCBI GI NO: 11359300 NR Description: respiratory protein oxa1-2 - fission yeast
  misc_feature (126)..(372): NCBI GI NO: 19112969 NR Description: oxa1sp2 protein [Schizosaccharomyces pombe]
  misc_feature (101)..(358): NCBI GI NO: 4826880 NR Description: oxidase (cytochrome c) assembly 1-like
  misc_feature (101)..(358): NCBI GI NO: 28193182 NR Description: unnamed protein product [Homo sapiens]
  misc_feature (101)..(358): NCBI GI NO: 37589026 NR Description: Oxidase (cytochrome c) assembly 1-like
  misc_feature (101)..(358): NCBI GI NO: 38372882 NR Description: Inner membrane protein OXA1L
MAYRRCLLIRGSLVDRRCHLSFSYVLHSNEGKRERTNEKSSSGGVGDFTQTRSFGSSLNGQMRFFSPSRDRFLSPCTGYGFCQYMSTVNRGSDKIGSDVMTDVADVLADTTMDSVASQAPVVNEVAIAAADSFLPVQALQYVIDAVHFYTGLNWWAAIVLTTLLIRTATVPLLINQLKATSKLTLMRPHLEEIKQEMEGLTMDPVAVAKGQQQMKKLFKEYGVSPFTPLKGLFIQGPIFVSFFLAITNMAEKVPSFKHGGASWFIDLSTPDALYVFPVLTALSFLITVECNMQEGMEGNPVAGTMKNVSRGLAVLTVPFTMGFPKAIFCYWVTSNLFSLVYGLVLKVPGVKKTLGIPEIPVAPPTTTSATQSPFSIFPALKQATSATTNGSSSIPDEASKHSNKKISSASVISQRLRSLEKQVKGRKKNKK

SEQ ID NO: 8803 - protein, 370 aa, Glycine max
  peptide (1)..(370): Ceres Seq. ID no. 14315199
  misc_feature (93)..(289): Pfam Name: Pfam Description:  60Kd inner membrane protein
  misc_feature (1)..(368): NCBI GI NO: 15241690 NR Description: OXA1 protein (OXA1p) [Arabidopsis thaliana]
  misc_feature (1)..(369): NCBI GI NO: 15225991 NR Description: OXA1 protein (OXA1p), putative
  misc_feature (29)..(370): NCBI GI NO: 22122905 NR Description: putative cytochrome oxidase assembly protein
  misc_feature (29)..(370): NCBI GI NO: 37536158 NR Description: putative Oxa1 protein
  misc_feature (65)..(311): NCBI GI NO: 11359300 NR Description: respiratory protein oxa1-2 - fission yeast
  misc_feature (65)..(311): NCBI GI NO: 19112969 NR Description: oxa1sp2 protein [Schizosaccharomyces pombe]
  misc_feature (40)..(297): NCBI GI NO: 4826880 NR Description: oxidase (cytochrome c) assembly 1-like
  misc_feature (40)..(297): NCBI GI NO: 28193182 NR Description: unnamed protein product [Homo sapiens]
  misc_feature (40)..(297): NCBI GI NO: 37589026 NR Description: Oxidase (cytochrome c) assembly 1-like
  misc_feature (40)..(297): NCBI GI NO: 38372882 NR Description: Inner membrane protein OXA1L
MRFFSPSRDRFLSPCTGYGFCQYMSTVNRGSDKIGSDVMTDVADVLADTTMDSVASQAPVVNEVAIAAADSFLPVQALQYVIDAVHFYTGLNWWAAIVLTTLLIRTATVPLLINQLKATSKLTLMRPHLEEIKQEMEGLTMDPVAVAKGQQQMKKLFKEYGVSPFTPLKGLFIQGPIFVSFFLAITNMAEKVPSFKHGGASWFIDLSTPDALYVFPVLTALSFLITVECNMQEGMEGNPVAGTMKNVSRGLAVLTVPFTMGFPKAIFCYWVTSNLFSLVYGLVLKVPGVKKTLGIPEIPVAPPTTTSATQSPFSIFPALKQATSATTNGSSSIPDEASKHSNKKISSASVISQRLRSLEKQVKGRKKNKK

SEQ ID NO: 8804 - DNA, 1024 bp, Glycine max
  misc_feature (1)..(1024): Ceres Seq. ID no. 14315060
ttttctgccattcattataccaacgtataagcatctctctctctctctctgtgttgtgccttttcactactactttgttcggtagctacttcgcttctaccctccattccattctctggaacaatgtctgagaaaatcacagctgaaaaccttttaaacacccttgtggaaacacttactgagaagcaaaaatctggatcattttttgaagaagacaagtcaagctcagtgagctaccaattcaacagactgtttggacgccagaaacctgtgcaccatattttagggggtggaaaatctgctgatgtcttgttatggaggaacaagaagatctctgctagcgttttatcggcagcaacagctatatgggtgctttttgaatggcttaattataatttcataactattttattctttgttgtggctcttggtatgcttggacagtttctttggacaaatgtttctggcttgtttagcaggaagccatctaaagttccccgttttgtcctcccagatgatatcttcgtgaatattgcaactgtagttggtgctgaggttaaccgtggtttgaggtttctccaagatgtttcttgtggaggaagcctaaaacaatttcttattgttgtagtaagcttatgggctggtgctgtgattgggagctggtgcaattttttgactgtcatgtatattggttttgttgctgcacatacactcccagttctctatgaaaggtatgaggatcaagttgacaactttgtgtacaaggtctttgatcagatgcaaaatcactatcagaagctggatactggtttgctcagcaaaatccccaagggaaagctcaaaggaaagaagtatgaatagactcttccttttgtaaatggtttgattttcaatatctctttctctcacttgtgatggaattgggaaaggctgaaggatgtgatgtaactagggaacaaatctatgttggggtctttaaaatttgttgtatctcttctgtcaaaaaaaaaaaaagttttatcac

SEQ ID NO: 8805 - protein, 245 aa, Glycine max
  peptide (1)..(245): Ceres Seq. ID no. 14315061
  misc_feature (1)..(245): NCBI GI NO: 18398810 NR Description: expressed protein [Arabidopsis thaliana]
  misc_feature (1)..(245): NCBI GI NO: 30681227 NR Description: expressed protein [Arabidopsis thaliana]
  misc_feature (1)..(245): NCBI GI NO: 34897094 NR Description: unknown protein
  misc_feature (7)..(243): NCBI GI NO: 34899590 NR Description: hypothetical protein~similar to Oryza sativachromosome3
  misc_feature (42)..(244): NCBI GI NO: 34904202 NR Description: P0492F05.25
  misc_feature (1)..(244): NCBI GI NO: 34909318 NR Description: OSJNBb0021A09.5
  misc_feature (47)..(245): NCBI GI NO: 38345298 NR Description: OSJNBa0043A12.26
  misc_feature (55)..(245): NCBI GI NO: 38605970 NR Description: TPA: RTN3.1 [Xenopus laevis]
  misc_feature (120)..(245): NCBI GI NO: 38605972 NR Description: TPA: RTN3 [Silurana tropicalis]
MSEKITAENLLNTLVETLTEKQKSGSFFEEDKSSSVSYQFNRLFGRQKPVHHILGGGKSADVLLWRNKKISASVLSAATAIWVLFEWLNYNFITILFFVVALGMLGQFLWTNVSGLFSRKPSKVPRFVLPDDIFVNIATVVGAEVNRGLRFLQDVSCGGSLKQFLIVVVSLWAGAVIGSWCNFLTVMYIGFVAAHTLPVLYERYEDQVDNFVYKVFDQMQNHYQKLDTGLLSKIPKGKLKGKKYE

SEQ ID NO: 8806 - protein, 142 aa, Glycine max
  peptide (1)..(142): Ceres Seq. ID no. 14315062
  misc_feature (1)..(142): NCBI GI NO: 18398810 NR Description: expressed protein [Arabidopsis thaliana]
  misc_feature (1)..(142): NCBI GI NO: 30681227 NR Description: expressed protein [Arabidopsis thaliana]
  misc_feature (1)..(142): NCBI GI NO: 34897094 NR Description: unknown protein
  misc_feature (1)..(140): NCBI GI NO: 34899590 NR Description: hypothetical protein~similar to Oryza sativachromosome3
  misc_feature (1)..(141): NCBI GI NO: 34904202 NR Description: P0492F05.25
  misc_feature (1)..(141): NCBI GI NO: 34909318 NR Description: OSJNBb0021A09.5
  misc_feature (1)..(142): NCBI GI NO: 38345298 NR Description: OSJNBa0043A12.26
  misc_feature (1)..(142): NCBI GI NO: 38605970 NR Description: TPA: RTN3.1 [Xenopus laevis]
  misc_feature (17)..(142): NCBI GI NO: 38605972 NR Description: TPA: RTN3 [Silurana tropicalis]
MLGQFLWTNVSGLFSRKPSKVPRFVLPDDIFVNIATVVGAEVNRGLRFLQDVSCGGSLKQFLIVVVSLWAGAVIGSWCNFLTVMYIGFVAAHTLPVLYERYEDQVDNFVYKVFDQMQNHYQKLDTGLLSKIPKGKLKGKKYE

SEQ ID NO: 8807 - DNA, 1129 bp, Glycine max
  misc_feature (1)..(1129): Ceres Seq. ID no. 14315189
atcaaatcctcaatacttgtttatcactatcacttccccttcctatctctgaagccattctcgttcattttgtttttttatcttctctttatctccctcaacaagattcctataaagttcgtagcggctttcacacaactttaagaaaatctcgtgaatccgtgatcgcaaacaaaacaatgtctcccccttctatgttaggcaaccgcaaagacggttctgaaatggactctttgaggggctaaaagcacatagaactgaagatgggcatgtacttttatttcgaccagatgagaatgctcaacgcatgaaacgaggtgcagatagattgtgtatgccatccccatctcctggccaatttgttaatgctgtaaagcagatagttattgccaacaaacgttgggtgcctccaccagggaaagggtcactatatattaggccattgctgataggaacaggagcattgttaggggtggcacctgcccctgagtatacatttcttatttattgttctccagttggcagctaccagaagggtgcactaaatttaaaggttgaggataaactatatagagcaatatctggctgtggtggaactggagggatcaaaagtgtcaccaattatgcccctgtttatactgcaatggctgatgcaaaggccaacggattctctgatgtgctgttcttagactcagcaactggaaaacatatagaggaggcctcagcatgcaatgtatttgttttgaaggacaatgctatctccactcctgcaatagatggaaccatcctacctggtatcacccgaaaatccatcattgacattgccattgatttgggttatcaggtcatggaacgttccgtatcagtggaggagatgctaggtgctgatgaaatgttctgcactggaactgcagttgttgtcaactctgttgcatctgtaacttataaggaaacaagggtggattacaaaacaggcccagcaacattgtcctcaaaactacggaaaacacttgttggaattcaaacagggtgtcttgaggacaaaaaatcatggacagtccgagtagattcaacaatatagcaccgtttccgtcacaaataaaaagagaaaaatattgcaccgtttgtc

SEQ ID NO: 8808 - protein, 257 aa, Glycine max
  peptide (1)..(257): Ceres Seq. ID no. 14315190
  misc_feature (1)..(235): Pfam Name: Pfam Description:  Aminotransferase class IV
  misc_feature (1)..(257): NCBI GI NO: 15222881 NR Description: branched-chain amino acid aminotransferase -related
  misc_feature (1)..(254): NCBI GI NO: 15222882 NR Description: branched-chain amino acid aminotransferase -related
  misc_feature (1)..(254): NCBI GI NO: 21617893 NR Description: branched-chain amino acid aminotransferase
  misc_feature (1)..(254): NCBI GI NO: 27311239 NR Description: Unknown protein
  misc_feature (1)..(254): NCBI GI NO: 7450517 NR Description: branched-chain amino acid aminotransferase homologT27I1
  misc_feature (1)..(254): NCBI GI NO: 15218409 NR Description: tat-binding protein -related
  misc_feature (1)..(256): NCBI GI NO: 14280354 NR Description: branched-chain amino acid aminotransferase
  misc_feature (1)..(254): NCBI GI NO: 15230923 NR Description: branched-chain amino acid aminotransferase -related
  misc_feature (1)..(253): NCBI GI NO: 6319167 NR Description: branched-chain amino acid aminotransferase
  misc_feature (1)..(253): NCBI GI NO: 18408919 NR Description: branched-chain-amino-acid transaminase -related
MKRGADRLCMPSPSPGQFVNAVKQIVIANKRWVPPPGKGSLYIRPLLIGTGALLGVAPAPEYTFLIYCSPVGSYQKGALNLKVEDKLYRAISGCGGTGGIKSVTNYAPVYTAMADAKANGFSDVLFLDSATGKHIEEASACNVFVLKDNAISTPAIDGTILPGITRKSIIDIAIDLGYQVMERSVSVEEMLGADEMFCTGTAVVVNSVASVTYKETRVDYKTGPATLSSKLRKTLVGIQTGCLEDKKSWTVRVDSTI

SEQ ID NO: 8809 - protein, 248 aa, Glycine max
  peptide (1)..(248): Ceres Seq. ID no. 14315191
  misc_feature (1)..(226): Pfam Name: Pfam Description:  Aminotransferase class IV
  misc_feature (1)..(248): NCBI GI NO: 15222881 NR Description: branched-chain amino acid aminotransferase -related
  misc_feature (1)..(245): NCBI GI NO: 15222882 NR Description: branched-chain amino acid aminotransferase -related
  misc_feature (1)..(245): NCBI GI NO: 21617893 NR Description: branched-chain amino acid aminotransferase
  misc_feature (1)..(245): NCBI GI NO: 27311239 NR Description: Unknown protein
  misc_feature (1)..(245): NCBI GI NO: 7450517 NR Description: branched-chain amino acid aminotransferase homologT27I1
  misc_feature (1)..(245): NCBI GI NO: 15218409 NR Description: tat-binding protein -related
  misc_feature (1)..(247): NCBI GI NO: 14280354 NR Description: branched-chain amino acid aminotransferase
  misc_feature (1)..(245): NCBI GI NO: 15230923 NR Description: branched-chain amino acid aminotransferase -related
  misc_feature (1)..(244): NCBI GI NO: 6319167 NR Description: branched-chain amino acid aminotransferase
  misc_feature (1)..(244): NCBI GI NO: 18408919 NR Description: branched-chain-amino-acid transaminase -related
MPSPSPGQFVNAVKQIVIANKRWVPPPGKGSLYIRPLLIGTGALLGVAPAPEYTFLIYCSPVGSYQKGALNLKVEDKLYRAISGCGGTGGIKSVTNYAPVYTAMADAKANGFSDVLFLDSATGKHIEEASACNVFVLKDNAISTPAIDGTILPGITRKSIIDIAIDLGYQVMERSVSVEEMLGADEMFCTGTAVVVNSVASVTYKETRVDYKTGPATLSSKLRKTLVGIQTGCLEDKKSWTVRVDSTI

SEQ ID NO: 8810 - protein, 145 aa, Glycine max
  peptide (1)..(145): Ceres Seq. ID no. 14315192
  misc_feature (1)..(123): Pfam Name: Pfam Description:  Aminotransferase class IV
  misc_feature (1)..(145): NCBI GI NO: 15222881 NR Description: branched-chain amino acid aminotransferase -related
  misc_feature (1)..(142): NCBI GI NO: 15222882 NR Description: branched-chain amino acid aminotransferase -related
  misc_feature (1)..(142): NCBI GI NO: 21617893 NR Description: branched-chain amino acid aminotransferase
  misc_feature (1)..(142): NCBI GI NO: 27311239 NR Description: Unknown protein
  misc_feature (1)..(142): NCBI GI NO: 7450517 NR Description: branched-chain amino acid aminotransferase homologT27I1
  misc_feature (1)..(142): NCBI GI NO: 15218409 NR Description: tat-binding protein -related
  misc_feature (1)..(144): NCBI GI NO: 14280354 NR Description: branched-chain amino acid aminotransferase
  misc_feature (1)..(142): NCBI GI NO: 15230923 NR Description: branched-chain amino acid aminotransferase -related
  misc_feature (1)..(141): NCBI GI NO: 6319167 NR Description: branched-chain amino acid aminotransferase
  misc_feature (1)..(141): NCBI GI NO: 18408919 NR Description: branched-chain-amino-acid transaminase -related
MADAKANGFSDVLFLDSATGKHIEEASACNVFVLKDNAISTPAIDGTILPGITRKSIIDIAIDLGYQVMERSVSVEEMLGADEMFCTGTAVVVNSVASVTYKETRVDYKTGPATLSSKLRKTLVGIQTGCLEDKKSWTVRVDSTI

SEQ ID NO: 8811 - DNA, 1294 bp, Glycine max
  misc_feature (1)..(1294): Ceres Seq. ID no. 13594308
attcaaccaaataaccactccccccttcgtagtagtgggtgcacccatccacgcaccacaaaattaataacccaaaaaatacaaaaacaactttgcaatttcgtaggagatgctcaggagcagcacgctaacacagagtgttacagtcacctgtgttcgtcacagtcacagacaatggttccaatcaattcccgtaaattatagattctttgacgctgctcggaactctctatcatcacccaactccgcgatcttcaaatggaaaagaaaggccaattataaccgtcatagttctggaatggggaccttcaccactcgcgcgttggcgcagccgcttcagaacgccgacgaactcatcgactccgtcgagacatttatcttcgattgtgacggagttatatggaaaggtgataaattaatagacggagtgcctgaaacgcttgacatgcttcggtcaaagggcaaaagattagtttttgtcaccaataactcaacaaagtctaggaagcaatatggaaagaagtttgaaacacttggcctgaatgtcagcgaggaggagattttcgcatcattctttgcagctgctgcatatctgaagtccattgatttcccaaaagataaaaaggtttatgtcatcggagaagatggcatcttgaaggagcttgagcttgctggataccagtaccttggtgggccggaagatggtgggaaaaaaatagaactgaagccaggatttttgatggagcatgatgaagatgttggagcagttgttgttgggtttgatcgctacttcaactactataaaatccagtatgggacactctgtatacgtgaaaaccctggatgtcttttcattgctacaaaccgagatgctgttactcatctcacagatgctcaagaatgggcaggtgggggctcaatggttggcgctctcagtggatctactcaacgtgagccattagttgttggaaaaccctcaacgtttatgatggattacttggcaaacaaatttggcatttcgaagtcacagatatgtatggttggggacagattagacactgatatcttgtttggacaaaatggtggttgcaaaactcttcttgtgctctcaggggtcaccacactggccatgcttcagagccctaacaactccatacagccagacttttataccaataaaatttcagattttctttccctgaaagctgcagctgtatgactataatatttatacattatccccacacgatggtgggaaaagccatgtatttaagaagtaagttgaattttatcc

SEQ ID NO: 8812 - protein, 369 aa, Glycine max
  peptide (1)..(369): Ceres Seq. ID no. 13594309
  misc_feature (86)..(335): Pfam Name: Pfam Description:  haloacid dehalogenase-like hydrolase
  misc_feature (53)..(369): NCBI GI NO: 15239406 NR Description: phosphoglycolate phosphatase, putative
  misc_feature (73)..(369): NCBI GI NO: 38345235 NR Description: OSJNBa0084K20.14
  misc_feature (68)..(369): NCBI GI NO: 26450878 NR Description: putative p-nitrophenylphosphatase
  misc_feature (192)..(369): NCBI GI NO: 8885622 NR Description: N-glyceraldehyde-2-phosphotransferase-like
  misc_feature (68)..(196): NCBI GI NO: 8885622 NR Description: N-glyceraldehyde-2-phosphotransferase-like
  misc_feature (53)..(339): NCBI GI NO: 8953699 NR Description: 4-nitrophenylphosphatase-like
  misc_feature (78)..(369): NCBI GI NO: 10177912 NR Description: 4-nitrophenylphosphatase-like protein
  misc_feature (78)..(364): NCBI GI NO: 21593203 NR Description: 4-nitrophenylphosphatase-like protein
  misc_feature (78)..(364): NCBI GI NO: 15238800 NR Description: phosphoglycolate phosphatase, putative
  misc_feature (70)..(369): NCBI GI NO: 15982558 NR Description: phosphoglycolate phosphatase precursor
MLRSSTLTQSVTVTCVRHSHRQWFQSIPVNYRFFDAARNSLSSPNSAIFKWKRKANYNRHSSGMGTFTTRALAQPLQNADELIDSVETFIFDCDGVIWKGDKLIDGVPETLDMLRSKGKRLVFVTNNSTKSRKQYGKKFETLGLNVSEEEIFASFFAAAAYLKSIDFPKDKKVYVIGEDGILKELELAGYQYLGGPEDGGKKIELKPGFLMEHDEDVGAVVVGFDRYFNYYKIQYGTLCIRENPGCLFIATNRDAVTHLTDAQEWAGGGSMVGALSGSTQREPLVVGKPSTFMMDYLANKFGISKSQICMVGDRLDTDILFGQNGGCKTLLVLSGVTTLAMLQSPNNSIQPDFYTNKISDFLSLKAAAV

SEQ ID NO: 8813 - protein, 306 aa, Glycine max
  peptide (1)..(306): Ceres Seq. ID no. 13594310
  misc_feature (23)..(272): Pfam Name: Pfam Description:  haloacid dehalogenase-like hydrolase
  misc_feature (1)..(306): NCBI GI NO: 15239406 NR Description: phosphoglycolate phosphatase, putative
  misc_feature (10)..(306): NCBI GI NO: 38345235 NR Description: OSJNBa0084K20.14
  misc_feature (5)..(306): NCBI GI NO: 26450878 NR Description: putative p-nitrophenylphosphatase
  misc_feature (129)..(306): NCBI GI NO: 8885622 NR Description: N-glyceraldehyde-2-phosphotransferase-like
  misc_feature (5)..(133): NCBI GI NO: 8885622 NR Description: N-glyceraldehyde-2-phosphotransferase-like
  misc_feature (1)..(276): NCBI GI NO: 8953699 NR Description: 4-nitrophenylphosphatase-like
  misc_feature (15)..(306): NCBI GI NO: 10177912 NR Description: 4-nitrophenylphosphatase-like protein
  misc_feature (15)..(301): NCBI GI NO: 21593203 NR Description: 4-nitrophenylphosphatase-like protein
  misc_feature (15)..(301): NCBI GI NO: 15238800 NR Description: phosphoglycolate phosphatase, putative
  misc_feature (7)..(306): NCBI GI NO: 15982558 NR Description: phosphoglycolate phosphatase precursor
MGTFTTRALAQPLQNADELIDSVETFIFDCDGVIWKGDKLIDGVPETLDMLRSKGKRLVFVTNNSTKSRKQYGKKFETLGLNVSEEEIFASFFAAAAYLKSIDFPKDKKVYVIGEDGILKELELAGYQYLGGPEDGGKKIELKPGFLMEHDEDVGAVVVGFDRYFNYYKIQYGTLCIRENPGCLFIATNRDAVTHLTDAQEWAGGGSMVGALSGSTQREPLVVGKPSTFMMDYLANKFGISKSQICMVGDRLDTDILFGQNGGCKTLLVLSGVTTLAMLQSPNNSIQPDFYTNKISDFLSLKAAAV

SEQ ID NO: 8814 - protein, 257 aa, Glycine max
  peptide (1)..(257): Ceres Seq. ID no. 13594311
  misc_feature (1)..(223): Pfam Name: Pfam Description:  haloacid dehalogenase-like hydrolase
  misc_feature (1)..(257): NCBI GI NO: 15239406 NR Description: phosphoglycolate phosphatase, putative
  misc_feature (1)..(257): NCBI GI NO: 38345235 NR Description: OSJNBa0084K20.14
  misc_feature (1)..(257): NCBI GI NO: 26450878 NR Description: putative p-nitrophenylphosphatase
  misc_feature (80)..(257): NCBI GI NO: 8885622 NR Description: N-glyceraldehyde-2-phosphotransferase-like
  misc_feature (1)..(84): NCBI GI NO: 8885622 NR Description: N-glyceraldehyde-2-phosphotransferase-like
  misc_feature (1)..(227): NCBI GI NO: 8953699 NR Description: 4-nitrophenylphosphatase-like
  misc_feature (1)..(257): NCBI GI NO: 10177912 NR Description: 4-nitrophenylphosphatase-like protein
  misc_feature (1)..(252): NCBI GI NO: 21593203 NR Description: 4-nitrophenylphosphatase-like protein
  misc_feature (1)..(252): NCBI GI NO: 15238800 NR Description: phosphoglycolate phosphatase, putative
  misc_feature (1)..(257): NCBI GI NO: 15982558 NR Description: phosphoglycolate phosphatase precursor
MLRSKGKRLVFVTNNSTKSRKQYGKKFETLGLNVSEEEIFASFFAAAAYLKSIDFPKDKKVYVIGEDGILKELELAGYQYLGGPEDGGKKIELKPGFLMEHDEDVGAVVVGFDRYFNYYKIQYGTLCIRENPGCLFIATNRDAVTHLTDAQEWAGGGSMVGALSGSTQREPLVVGKPSTFMMDYLANKFGISKSQICMVGDRLDTDILFGQNGGCKTLLVLSGVTTLAMLQSPNNSIQPDFYTNKISDFLSLKAAAV

SEQ ID NO: 8815 - DNA, 1251 bp, Glycine max
  misc_feature (1)..(1251): Ceres Seq. ID no. 14316312
aacgtatggatcgaaggactatgtctatgatgtctagcaaagttgatcccttccagcatctcaaactcgtccccaattccgacggcacgatcactcgccagcgtgatgacccacccatctcaccctcactcaatcccacccttcccgtcctcacccaagacgcaaccatcaaccgatcaaacaacaccttcgcccgcatattcctaccccgcgaagcactcgattcctccccctccaacaacctccctctcgtcgtttacttccacggcggcggcttcgtcctcttcagcgccgcctctgacttcttccacgacgcatgcgtaaacctcgcagacgacaccaactccatcgtcgtttccgtggagtaccgcctcgcaccggaacacagactccccgcggcgtacgaagatgccgtcgaagcgctgcactggatcaaagcacagtcaaacgattggttgcgcaaccacgcggatttttccaactgttaccttatgggaagtagcgccggagcaaacatcgcgtaccacgtgggtctacgtgtagctgcggagcttaacgtttatggagacaattatctggcgccacttaagatcagagggctgatattgagtcagccgttcttcggaggaacgaagagggtgccttctgaggtgaggcttgtggacgatccggttttgccgccgcacgtgtgtgacttactgtgggagttgtcgctgcccctgggggttgaccgtgatcacgagtattgcaatccgacggctggcgatgggcctgtgattctggatcgggtgaggcagcttgcgtggcgggtgctggtgagtgggtgccatggggacccacttctggatcatcagatggctctggcaagactgatagaggagaagggtgtggctgtggtcacccgttttgaccaagggggatgtcatgggattgaggttcgtgctcgtaagcaccaaaaccaactctataacctagtcaaagattttattgcataatttctgacatggaactaccatttctttttaagctctatactgtataattacattttcaaaatattgctacaaataaatgttattttctctcttttgatactctcctccacccctcacttagagactgtttggtattacgaaaatagagagggagattaaggaagaaagtgaaaatgagttgtttaataatgtaacggaattgaaggtgtgtataatggcacacatagtatttcagtagcctacatttttaaatttg

SEQ ID NO: 8816 - protein, 330 aa, Glycine max
  peptide (1)..(330): Ceres Seq. ID no. 14316313
  misc_feature (7)..(329): NCBI GI NO: 15241725 NR Description: expressed protein [Arabidopsis thaliana]
  misc_feature (15)..(329): NCBI GI NO: 18406834 NR Description: expressed protein [Arabidopsis thaliana]
  misc_feature (15)..(329): NCBI GI NO: 21593183 NR Description: unknown [Arabidopsis thaliana]
  misc_feature (15)..(329): NCBI GI NO: 8574455 NR Description: pepper esterase [Capsicum annuum]
  misc_feature (15)..(330): NCBI GI NO: 15225521 NR Description: expressed protein [Arabidopsis thaliana]
  misc_feature (26)..(251): NCBI GI NO: 15237267 NR Description: expressed protein [Arabidopsis thaliana]
  misc_feature (26)..(251): NCBI GI NO: 21593215 NR Description: unknown [Arabidopsis thaliana]
  misc_feature (26)..(312): NCBI GI NO: 34895916 NR Description: P0030H07.24
  misc_feature (26)..(309): NCBI GI NO: 34899932 NR Description: putative cell death associated protein
  misc_feature (27)..(312): NCBI GI NO: 5487873 NR Description: PrMC3 [Pinus radiata]
RMDRRTMSMMSSKVDPFQHLKLVPNSDGTITRQRDDPPISPSLNPTLPVLTQDATINRSNNTFARIFLPREALDSSPSNNLPLVVYFHGGGFVLFSAASDFFHDACVNLADDTNSIVVSVEYRLAPEHRLPAAYEDAVEALHWIKAQSNDWLRNHADFSNCYLMGSSAGANIAYHVGLRVAAELNVYGDNYLAPLKIRGLILSQPFFGGTKRVPSEVRLVDDPVLPPHVCDLLWELSLPLGVDRDHEYCNPTAGDGPVILDRVRQLAWRVLVSGCHGDPLLDHQMALARLIEEKGVAVVTRFDQGGCHGIEVRARKHQNQLYNLVKDFIA

SEQ ID NO: 8817 - protein, 329 aa, Glycine max
  peptide (1)..(329): Ceres Seq. ID no. 14316314
  misc_feature (6)..(328): NCBI GI NO: 15241725 NR Description: expressed protein [Arabidopsis thaliana]
  misc_feature (14)..(328): NCBI GI NO: 18406834 NR Description: expressed protein [Arabidopsis thaliana]
  misc_feature (14)..(328): NCBI GI NO: 21593183 NR Description: unknown [Arabidopsis thaliana]
  misc_feature (14)..(328): NCBI GI NO: 8574455 NR Description: pepper esterase [Capsicum annuum]
  misc_feature (14)..(329): NCBI GI NO: 15225521 NR Description: expressed protein [Arabidopsis thaliana]
  misc_feature (25)..(250): NCBI GI NO: 15237267 NR Description: expressed protein [Arabidopsis thaliana]
  misc_feature (25)..(250): NCBI GI NO: 21593215 NR Description: unknown [Arabidopsis thaliana]
  misc_feature (25)..(311): NCBI GI NO: 34895916 NR Description: P0030H07.24
  misc_feature (25)..(308): NCBI GI NO: 34899932 NR Description: putative cell death associated protein
  misc_feature (26)..(311): NCBI GI NO: 5487873 NR Description: PrMC3 [Pinus radiata]
MDRRTMSMMSSKVDPFQHLKLVPNSDGTITRQRDDPPISPSLNPTLPVLTQDATINRSNNTFARIFLPREALDSSPSNNLPLVVYFHGGGFVLFSAASDFFHDACVNLADDTNSIVVSVEYRLAPEHRLPAAYEDAVEALHWIKAQSNDWLRNHADFSNCYLMGSSAGANIAYHVGLRVAAELNVYGDNYLAPLKIRGLILSQPFFGGTKRVPSEVRLVDDPVLPPHVCDLLWELSLPLGVDRDHEYCNPTAGDGPVILDRVRQLAWRVLVSGCHGDPLLDHQMALARLIEEKGVAVVTRFDQGGCHGIEVRARKHQNQLYNLVKDFIA

SEQ ID NO: 8818 - protein, 324 aa, Glycine max
  peptide (1)..(324): Ceres Seq. ID no. 14316315
  misc_feature (1)..(323): NCBI GI NO: 15241725 NR Description: expressed protein [Arabidopsis thaliana]
  misc_feature (9)..(323): NCBI GI NO: 18406834 NR Description: expressed protein [Arabidopsis thaliana]
  misc_feature (9)..(323): NCBI GI NO: 21593183 NR Description: unknown [Arabidopsis thaliana]
  misc_feature (9)..(323): NCBI GI NO: 8574455 NR Description: pepper esterase [Capsicum annuum]
  misc_feature (9)..(324): NCBI GI NO: 15225521 NR Description: expressed protein [Arabidopsis thaliana]
  misc_feature (20)..(245): NCBI GI NO: 15237267 NR Description: expressed protein [Arabidopsis thaliana]
  misc_feature (20)..(245): NCBI GI NO: 21593215 NR Description: unknown [Arabidopsis thaliana]
  misc_feature (20)..(306): NCBI GI NO: 34895916 NR Description: P0030H07.24
  misc_feature (20)..(303): NCBI GI NO: 34899932 NR Description: putative cell death associated protein
  misc_feature (21)..(306): NCBI GI NO: 5487873 NR Description: PrMC3 [Pinus radiata]
MSMMSSKVDPFQHLKLVPNSDGTITRQRDDPPISPSLNPTLPVLTQDATINRSNNTFARIFLPREALDSSPSNNLPLVVYFHGGGFVLFSAASDFFHDACVNLADDTNSIVVSVEYRLAPEHRLPAAYEDAVEALHWIKAQSNDWLRNHADFSNCYLMGSSAGANIAYHVGLRVAAELNVYGDNYLAPLKIRGLILSQPFFGGTKRVPSEVRLVDDPVLPPHVCDLLWELSLPLGVDRDHEYCNPTAGDGPVILDRVRQLAWRVLVSGCHGDPLLDHQMALARLIEEKGVAVVTRFDQGGCHGIEVRARKHQNQLYNLVKDFIA

SEQ ID NO: 8819 - DNA, 1120 bp, Glycine max
  misc_feature (1)..(1120): Ceres Seq. ID no. 14305353
aaaaaaaaaaatatatgctctcaataaacacacacgcaccggcagcacccgccgccggtggaacccattaacaaacaccacaagaaacttatcattcccttgttcttctccttcctcctcatcttctcttacccattttccatctaataaaaattcgaatacccaattggaaaaagcaatcaactttgcaaacactcggtggaaaaaacgcattccacctccaatcttcattcgcattgagctctgtttcttttccacatgaaacggcgatgaagtagctgtcgtttttcgattcagaacgccgccgcagaatgctgtgcaggaagagctccaaaaacgacgtcggctcgggatcggtgccggtgcacctcaacgtctacgatttgacacccatcaacggttacgcttattggttcggcctcggagtgtatcattccggcgtgcaagttcacggcgttgagttcgcgttcggggctcacgagtactcgttgacggggatattcgaaggagaaccgaagaggtgcgaaggtttcgcgttcaggaaaacgattctgatcggaaaaaccgatatgagacccggtgaggttaaggcggtgatggaagaacttgctgctaagtacagaggtaatgcttacaatctcatcacaaagaattgcaaccatttctgtaacgatgcttgtcttagactcaccggaaatcctattccaagttgggtcaatcgtcttgctcgaattggatttatgtgcaattgtgttcttccggtgacattgaactcaacaaaagttaggcatcacaagatggaagaaaagcaatgtgaaggagagaaacaagcattagcgactaaggcaaagaaacttagtgcttcaaattcatcatcatcttcccctgagggactgcgcaggggaaggagtagaaaccgacgtgcccttcctccatcttcacctttgattattggatcttcttcatcttgatgcccaaactcttaatttttatttatttttttatctttaatatggccaattacagaagttgctctaaggaagaaaggcaacagattggattttcaatttaaaattgttttttttcattcttttcatccaatgaccatataaagttatgg

SEQ ID NO: 8820 - protein, 219 aa, Glycine max
  peptide (1)..(219): Ceres Seq. ID no. 14305354
  misc_feature (16)..(139): Pfam Name: DUF862 Pfam Description: Eukaryotic protein of unknown function
  misc_feature (1)..(218): NCBI GI NO: 18412886 NR Description: expressed protein [Arabidopsis thaliana]
  misc_feature (1)..(218): NCBI GI NO: 25354458 NR Description: hypothetical protein F23A5.4
  misc_feature (1)..(209): NCBI GI NO: 18420889 NR Description: expressed protein [Arabidopsis thaliana]
  misc_feature (1)..(219): NCBI GI NO: 18400749 NR Description: expressed protein [Arabidopsis thaliana]
  misc_feature (1)..(219): NCBI GI NO: 15236618 NR Description: expressed protein [Arabidopsis thaliana]
  misc_feature (1)..(219): NCBI GI NO: 17529024 NR Description: unknown protein [Arabidopsis thaliana]
  misc_feature (5)..(184): NCBI GI NO: 18401869 NR Description: expressed protein [Arabidopsis thaliana]
  misc_feature (5)..(184): NCBI GI NO: 21593644 NR Description: unknown [Arabidopsis thaliana]
  misc_feature (5)..(184): NCBI GI NO: 9802596 NR Description: T2E6.19 [Arabidopsis thaliana]
  misc_feature (2)..(177): NCBI GI NO: 15238059 NR Description: expressed protein [Arabidopsis thaliana]
MLCRKSSKNDVGSGSVPVHLNVYDLTPINGYAYWFGLGVYHSGVQVHGVEFAFGAHEYSLTGIFEGEPKRCEGFAFRKTILIGKTDMRPGEVKAVMEELAAKYRGNAYNLITKNCNHFCNDACLRLTGNPIPSWVNRLARIGFMCNCVLPVTLNSTKVRHHKMEEKQCEGEKQALATKAKKLSASNSSSSSPEGLRRGRSRNRRALPPSSPLIIGSSSS

SEQ ID NO: 8821 - protein, 133 aa, Glycine max
  peptide (1)..(133): Ceres Seq. ID no. 14305355
  misc_feature (1)..(53): Pfam Name: DUF862 Pfam Description: Eukaryotic protein of unknown function
  misc_feature (1)..(132): NCBI GI NO: 18412886 NR Description: expressed protein [Arabidopsis thaliana]
  misc_feature (1)..(132): NCBI GI NO: 25354458 NR Description: hypothetical protein F23A5.4
  misc_feature (1)..(123): NCBI GI NO: 18420889 NR Description: expressed protein [Arabidopsis thaliana]
  misc_feature (1)..(133): NCBI GI NO: 18400749 NR Description: expressed protein [Arabidopsis thaliana]
  misc_feature (1)..(133): NCBI GI NO: 15236618 NR Description: expressed protein [Arabidopsis thaliana]
  misc_feature (1)..(133): NCBI GI NO: 17529024 NR Description: unknown protein [Arabidopsis thaliana]
  misc_feature (1)..(98): NCBI GI NO: 18401869 NR Description: expressed protein [Arabidopsis thaliana]
  misc_feature (1)..(98): NCBI GI NO: 21593644 NR Description: unknown [Arabidopsis thaliana]
  misc_feature (1)..(98): NCBI GI NO: 9802596 NR Description: T2E6.19 [Arabidopsis thaliana]
  misc_feature (1)..(91): NCBI GI NO: 15238059 NR Description: expressed protein [Arabidopsis thaliana]
MRPGEVKAVMEELAAKYRGNAYNLITKNCNHFCNDACLRLTGNPIPSWVNRLARIGFMCNCVLPVTLNSTKVRHHKMEEKQCEGEKQALATKAKKLSASNSSSSSPEGLRRGRSRNRRALPPSSPLIIGSSSS

SEQ ID NO: 8822 - protein, 124 aa, Glycine max
  peptide (1)..(124): Ceres Seq. ID no. 14305356
  misc_feature (1)..(123): NCBI GI NO: 18412886 NR Description: expressed protein [Arabidopsis thaliana]
  misc_feature (1)..(123): NCBI GI NO: 25354458 NR Description: hypothetical protein F23A5.4
  misc_feature (1)..(114): NCBI GI NO: 18420889 NR Description: expressed protein [Arabidopsis thaliana]
  misc_feature (1)..(124): NCBI GI NO: 18400749 NR Description: expressed protein [Arabidopsis thaliana]
  misc_feature (1)..(124): NCBI GI NO: 15236618 NR Description: expressed protein [Arabidopsis thaliana]
  misc_feature (1)..(124): NCBI GI NO: 17529024 NR Description: unknown protein [Arabidopsis thaliana]
  misc_feature (1)..(89): NCBI GI NO: 18401869 NR Description: expressed protein [Arabidopsis thaliana]
  misc_feature (1)..(89): NCBI GI NO: 21593644 NR Description: unknown [Arabidopsis thaliana]
  misc_feature (1)..(89): NCBI GI NO: 9802596 NR Description: T2E6.19 [Arabidopsis thaliana]
  misc_feature (1)..(82): NCBI GI NO: 15238059 NR Description: expressed protein [Arabidopsis thaliana]
MEELAAKYRGNAYNLITKNCNHFCNDACLRLTGNPIPSWVNRLARIGFMCNCVLPVTLNSTKVRHHKMEEKQCEGEKQALATKAKKLSASNSSSSSPEGLRRGRSRNRRALPPSSPLIIGSSSS

SEQ ID NO: 8823 - DNA, 1054 bp, Glycine max
  misc_feature (1)..(1054): Ceres Seq. ID no. 14305357
aaaaaaagcttctttgtctctcgtgccgattctccaccacaattcccttcaccccaatcacactttccggtagttgttgctattagtgtagaagatgagtacgctggatgcaacaagggctgaacttggtcttcttgttttatatttgggcaaggctgaagcaagggacaaaatatgcagggcaatacaatatggttccaaatttttgagtaatggggaacctggtactgctcagaatgtagacaaaacaaccagcttggcacgaaaagtcttccgtctctttaagtttgtcaatgacctacatgctttgataagtccaacaccacaggggacacccctccccctagctctgttggacttatcaaagcatgtagtcactgagcaaaccaaggaggaaagtactgaggccccacgacctgcagcttcagaagacaagccctcggttgaagttcagactaaagaggtggcagaggaagttgtgtctgagaccgtcacacaagagccaacagttgagaaacaagaagctgctgagggaacaaaagaaaatgccgatcctgctgagattaagacaccagaagctgcagaagatgttaatgttaaggaagagaaagaagctgaggctgaagctaggagggaagaggccccggcagagaaaagtgaggagaaggttgagacagaagggtcagctgaaaagaaagaggaggaagtgattgcagaagctgaagctgagaagaaggaggaggtcacagtcacagacacagaggctccaacagagtaaaagaatgtgaagaggggaaatgtgcagtttaagtgagtgtttgagagggtatttttttcttagttgcatcgtgtcttgttgctccatgcatgtcttttctttgtttagtggtctaataaaaagtctagctagggaagggatgagtgatgcgaatgccaaccactcagtacaagaaccacatggcatgtagtctttcaatctgatctatggggtgtgcatggctagctctccatccaatgaattatgttatggtcctttgtgtgattcaaaaaaaat

SEQ ID NO: 8824 - protein, 227 aa, Glycine max
  peptide (1)..(227): Ceres Seq. ID no. 14305358
  misc_feature (11)..(94): Pfam Name: PEX11 Pfam Description: Peroxisomal biogenesis factor 11
  misc_feature (1)..(94): NCBI GI NO: 18378887 NR Description: expressed protein [Arabidopsis thaliana]
  misc_feature (1)..(94): NCBI GI NO: 30695340 NR Description: expressed protein [Arabidopsis thaliana]
  misc_feature (2)..(94): NCBI GI NO: 7486466 NR Description: hypothetical protein At2g45740
  misc_feature (2)..(94): NCBI GI NO: 18406877 NR Description: expressed protein [Arabidopsis thaliana]
  misc_feature (1)..(94): NCBI GI NO: 8489788 NR Description: unknown [Lycopersicon esculentum]
  misc_feature (1)..(94): NCBI GI NO: 25553559 NR Description: OSJNBa0038F22.7
  misc_feature (1)..(94): NCBI GI NO: 34898026 NR Description: ESTs AU064537
  misc_feature (1)..(94): NCBI GI NO: 11358250 NR Description: hypothetical protein T27I15_160 - Arabidopsisthaliana
  misc_feature (94)..(227): NCBI GI NO: 2367429 NR Description: Nlj21 [Lotus japonicus]
  misc_feature (76)..(215): NCBI GI NO: 2367429 NR Description: Nlj21 [Lotus japonicus]
MSTLDATRAELGLLVLYLGKAEARDKICRAIQYGSKFLSNGEPGTAQNVDKTTSLARKVFRLFKFVNDLHALISPTPQGTPLPLALLDLSKHVVTEQTKEESTEAPRPAASEDKPSVEVQTKEVAEEVVSETVTQEPTVEKQEAAEGTKENADPAEIKTPEAAEDVNVKEEKEAEAEARREEAPAEKSEEKVETEGSAEKKEEEVIAEAEAEKKEEVTVTDTEAPTE

SEQ ID NO: 8825 - DNA, 1406 bp, Glycine max
  misc_feature (1)..(1406): Ceres Seq. ID no. 14315889
ctctctctcaattgcattcccccttcccatttctgagaaggtgggagagaaaccccagagaaattcaatccacccctttctctgggtctgatcccatatctctctccagatttgctcgcccttttacttcaatttctcaaaaccggcacgcattcttttgtcttctaatttctggtggctgaatatcaaaaaccctagagagcactgttttggggctacgtttctgtttcggacggagaacgagaaaaggcgagggttttgcgcccgacccatttcgactggaaggccctagattcaaagggatcgtttgatttcattggataatcccccgacacgaaagggggtagttgcggagaaaccccctctgaaaactggaagccctaattgagagattcaaatcgttcttctaaatcgatggattcagcgttttcgcccttgagtttggttattttcggtatttcaattagcttttacgcatttattgtccaatcgcagacgcaaaatgggaacaatggcgctgaattagcaccaccggcgtattgggtgtcaagtccaccgctgcctccgcctcctccgccacctcctccgccgttgtcactgtctcctccgccgccaccctcaaaatctatgacactcagtttcgttcccccgccgggagcgccgccgccctatcctaacaatatgcccaacgtgagaagacctcctcaccgccgccgccgccaccgcagaccgcctccgccgccgccaccaccaccaccgcacaagatgaatgccggtaaaaaggttggacttttgtttgtgggcattgcggcaatcatgcaagttggcgtggttgggttcttggtaatcaagagaagacaacttttgaagagcgatgacagatacgagagttgttcttgaacgagattttccacggttttcttatcaaattctttttttattttaatttaatgggttgaaattctttgctgaacgaggtttggttcgaggaaggggaatattggttggattttgcagaatctggtgggaggaacatgaaaaaggcaagcatggaaagacatggagaatttgaggaatcattggaacatgaattgtgcaattgatgccatcatttcggcccctttggcgttactgtgtatattggtactgctagttcacgtttccttcacgtttcaagttgtgttgcccctttttcccttagttccattacattggctggcttataatggaaaagaaaaagtagccctcatgtacctttttatttattatttttttttttaatttgatttttctctaacatgttccgtgtacaatgatgttaggaatccttaaaggattaacaatgacacaatcttatattctttggcttttcacctcgaattgatgatgtcaggttcaatgttctc

SEQ ID NO: 8826 - protein, 161 aa, Glycine max
  peptide (1)..(161): Ceres Seq. ID no. 14315890
  misc_feature (39)..(115): Pfam Name: Pfam Description:  Extensin-like region
  misc_feature (1)..(155): NCBI GI NO: 22330241 NR Description: proline-rich protein family [Arabidopsis thaliana]
  misc_feature (47)..(157): NCBI GI NO: 30682911 NR Description: proline-rich protein family [Arabidopsis thaliana]
  misc_feature (46)..(157): NCBI GI NO: 15218534 NR Description: proline-rich protein family [Arabidopsis thaliana]
  misc_feature (40)..(117): NCBI GI NO: 7442094 NR Description: extensin CYC15 precursor - Madagascar periwinkle
  misc_feature (39)..(117): NCBI GI NO: 7442094 NR Description: extensin CYC15 precursor - Madagascar periwinkle
  misc_feature (37)..(115): NCBI GI NO: 11068076 NR Description: PxORF73 peptide [Plutella xylostella granulovirus]
  misc_feature (39)..(115): NCBI GI NO: 15235668 NR Description: leucine-rich repeat extensin family
  misc_feature (39)..(115): NCBI GI NO: 6523547 NR Description: hydroxyproline-rich glycoprotein DZ-HRGP
  misc_feature (21)..(115): NCBI GI NO: 7442094 NR Description: extensin CYC15 precursor - Madagascar periwinkle
  misc_feature (38)..(153): NCBI GI NO: 28950342 NR Description: probable Cytokinesis protein sepA
MDSAFSPLSLVIFGISISFYAFIVQSQTQNGNNGAELAPPAYWVSSPPLPPPPPPPPPPLSLSPPPPPSKSMTLSFVPPPGAPPPYPNNMPNVRRPPHRRRRHRRPPPPPPPPPPHKMNAGKKVGLLFVGIAAIMQVGVVGFLVIKRRQLLKSDDRYESCS

SEQ ID NO: 8827 - protein, 90 aa, Glycine max
  peptide (1)..(90): Ceres Seq. ID no. 14315891
  misc_feature (1)..(51): Pfam Name: Pfam Description:  Formin Homology 2 Domain
  misc_feature (1)..(84): NCBI GI NO: 22330241 NR Description: proline-rich protein family [Arabidopsis thaliana]
  misc_feature (1)..(86): NCBI GI NO: 30682911 NR Description: proline-rich protein family [Arabidopsis thaliana]
  misc_feature (1)..(86): NCBI GI NO: 15218534 NR Description: proline-rich protein family [Arabidopsis thaliana]
  misc_feature (1)..(46): NCBI GI NO: 7442094 NR Description: extensin CYC15 precursor - Madagascar periwinkle
  misc_feature (1)..(46): NCBI GI NO: 7442094 NR Description: extensin CYC15 precursor - Madagascar periwinkle
  misc_feature (1)..(44): NCBI GI NO: 11068076 NR Description: PxORF73 peptide [Plutella xylostella granulovirus]
  misc_feature (1)..(44): NCBI GI NO: 15235668 NR Description: leucine-rich repeat extensin family
  misc_feature (1)..(44): NCBI GI NO: 6523547 NR Description: hydroxyproline-rich glycoprotein DZ-HRGP
  misc_feature (1)..(44): NCBI GI NO: 7442094 NR Description: extensin CYC15 precursor - Madagascar periwinkle
  misc_feature (1)..(82): NCBI GI NO: 28950342 NR Description: probable Cytokinesis protein sepA
MTLSFVPPPGAPPPYPNNMPNVRRPPHRRRRHRRPPPPPPPPPPHKMNAGKKVGLLFVGIAAIMQVGVVGFLVIKRRQLLKSDDRYESCS

SEQ ID NO: 8828 - DNA, 1145 bp, Glycine max
  misc_feature (1)..(1145): Ceres Seq. ID no. 14314390
agtggagtggaagtagtagcaagtacgtcgtatatgtggttgatcttttgctggttgtttgttttgttccttccaattgtcagatctgaatcaccggactcactcttcacactcactcacactgaatggcttctgaaggcgaccatcaccaccaccaccaccaccatcaagatcacgatcatcatcatcatgatcatgatcaccatcatcatcacgatggagagggagagaccaactcatgggtaggtaaggatgggaaggtgtaccatagccacgatggtctggcgccgcattctcacgaacccatttactcccccggctacttcaccagaagagctccaccgcttctcaacagaaacttcaacgaaagagccttcaccgtcggaatcggtggacccgtcggtactggcaaaacagctctcatgttggccctttgtgaactcttgcgcgaaaactacagtctcgcagctgtgacaaatgatatattcactaaagaggatggtgagttcttggtgaagcacaaagcacttcctgaggaaaggatacgcgctgtagaaactgggggttgcccacatgctgctattcgggaggacatcagtattaatcttggaccgctggaggagctttctaacctcttcaaagcagatatacttctttgtgaatctgggggagataacctggctgccaatttcagcagggaattggctgactatattatttacataatagacgtgtctggcggtgataaaattcctcggaaaggtggtcctggaatcacgcaagctgatctccttgtgataaacaagactgaccttgctcctgcaattggggctgatttggcagtcatgcagcgggatgctctgcggatgagagatggagggccatttgtctttgcacaggtgaagcataagattggagtagaagaaattgggaatcttgtcttgcaggcatgggaagcagccacagggaataagcgtcattaacatttctttgaaaaacggtttcctttgtgttgtatattttcttagcatgtttagtaataactccagaaacatgatgttcacgacgtggattcgagttcttatgttgtgtctgttcctgcatgttacagtatcaagttcataaacatgttactacttggacat

SEQ ID NO: 8829 - protein, 285 aa, Glycine max
  peptide (1)..(285): Ceres Seq. ID no. 14314391
  misc_feature (73)..(209): Pfam Name: Pfam Description:  HypB/UreG nucleotide-binding domain
  misc_feature (1)..(273): NCBI GI NO: 5524682 NR Description: Ni-binding urease accessory protein UreG
  misc_feature (1)..(284): NCBI GI NO: 13161908 NR Description: urease accessory protein G [Solanum tuberosum]
  misc_feature (1)..(284): NCBI GI NO: 13161912 NR Description: urease accessory protein G [Solanum tuberosum]
  misc_feature (1)..(284): NCBI GI NO: 13161906 NR Description: urease accessory protein G [Solanum tuberosum]
  misc_feature (1)..(284): NCBI GI NO: 13161910 NR Description: urease accessory protein G [Solanum tuberosum]
  misc_feature (16)..(284): NCBI GI NO: 13161904 NR Description: urease accessory protein G [Solanum tuberosum]
  misc_feature (17)..(284): NCBI GI NO: 15226754 NR Description: urease accessory protein -related
  misc_feature (16)..(284): NCBI GI NO: 25313831 NR Description: urease accessory protein UREG
  misc_feature (8)..(284): NCBI GI NO: 32414941 NR Description: probable Ni-binding urease accessory protein
  misc_feature (6)..(279): NCBI GI NO: 19075529 NR Description: putative urease accessory protein UREG
MASEGDHHHHHHHHQDHDHHHHDHDHHHHHDGEGETNSWVGKDGKVYHSHDGLAPHSHEPIYSPGYFTRRAPPLLNRNFNERAFTVGIGGPVGTGKTALMLALCELLRENYSLAAVTNDIFTKEDGEFLVKHKALPEERIRAVETGGCPHAAIREDISINLGPLEELSNLFKADILLCESGGDNLAANFSRELADYIIYIIDVSGGDKIPRKGGPGITQADLLVINKTDLAPAIGADLAVMQRDALRMRDGGPFVFAQVKHKIGVEEIGNLVLQAWEAATGNKRH

SEQ ID NO: 8830 - protein, 186 aa, Glycine max
  peptide (1)..(186): Ceres Seq. ID no. 14314392
  misc_feature (1)..(110): Pfam Name: Pfam Description:  HypB/UreG nucleotide-binding domain
  misc_feature (1)..(174): NCBI GI NO: 5524682 NR Description: Ni-binding urease accessory protein UreG
  misc_feature (1)..(185): NCBI GI NO: 13161908 NR Description: urease accessory protein G [Solanum tuberosum]
  misc_feature (1)..(185): NCBI GI NO: 13161912 NR Description: urease accessory protein G [Solanum tuberosum]
  misc_feature (1)..(185): NCBI GI NO: 13161906 NR Description: urease accessory protein G [Solanum tuberosum]
  misc_feature (1)..(185): NCBI GI NO: 13161910 NR Description: urease accessory protein G [Solanum tuberosum]
  misc_feature (1)..(185): NCBI GI NO: 13161904 NR Description: urease accessory protein G [Solanum tuberosum]
  misc_feature (1)..(185): NCBI GI NO: 15226754 NR Description: urease accessory protein -related
  misc_feature (1)..(185): NCBI GI NO: 25313831 NR Description: urease accessory protein UREG
  misc_feature (1)..(185): NCBI GI NO: 32414941 NR Description: probable Ni-binding urease accessory protein
  misc_feature (1)..(180): NCBI GI NO: 19075529 NR Description: putative urease accessory protein UREG
MLALCELLRENYSLAAVTNDIFTKEDGEFLVKHKALPEERIRAVETGGCPHAAIREDISINLGPLEELSNLFKADILLCESGGDNLAANFSRELADYIIYIIDVSGGDKIPRKGGPGITQADLLVINKTDLAPAIGADLAVMQRDALRMRDGGPFVFAQVKHKIGVEEIGNLVLQAWEAATGNKRH

SEQ ID NO: 8831 - DNA, 1182 bp, Glycine max
  misc_feature (1)..(1182): Ceres Seq. ID no. 14314396
atatacaccccattgctacgaagggctatatagcataaacattttagtcttcattgcacaatgtcgacctcttccattaacgggtggtgcctctcttccatctccccagccaaaacctctctcaagaaggccacattaggcccttctgtcttcgcaaccagagaggatatggcaaaggaatacgagcaagctattgaagaactccagaaattgttgagggagaagagtgaactcaaagccacagctgctgagaaagtggagcagataacagcttctctgggaacatcatcatctgatggcatcccatcatcagaagcctcagacaggatcaaagctggtttcattcacttcaagaaggagaaatatgacaagaatccagctttgtatggtgaacttgccaaaggccagagccccaagtttatggtgtttgcttgctcagactcaagggtgtgcccatctcatgtgctagatttccaaccaggagaggcctttgtggtcagaaatgttgctaacattgtcccaccatatgaccagtcaaaatacgctggaactggggcagcagttgagtatgctgttttgcatcttaaggtgtctgagattgtggtcattggacacagtgcttgtggtggtattaaggggcttctgtctttcccatatgatggaacctactctactgattttattgaggagtgggtcaaaattggcttgcctgcaaaggcaaaggtgaagacacaacatggggatgcaccttttgctgagttgtgctcacactgtgagaaggaagctgtgaatgtttcccttggaaaccttctaacatacccatttgttagagatggcttggtgaacaagacattgtcactaaaaggaggatactatgactttgttaagggatcttttgagctctggggccttcagtttggccttgcatcctctttctccgtatgaacatcaaccattatcaatgacctcatcttggttccctaagttaaagatgtggccaccattctgcattggaagctataggggccatgcttagaggtcgtgtgtatctgcaatgaagaggcctagccaccttcatcaccatatgatatttataaaaatatatatatatgaaactatgaactgcgtttatgcatgtcggaaaatcttcttttgataagagtttggaaatcctcttgtaac

SEQ ID NO: 8832 - protein, 294 aa, Glycine max
  peptide (1)..(294): Ceres Seq. ID no. 14314397
  misc_feature (113)..(282): Pfam Name: Pfam Description:  Carbonic anhydrase
  misc_feature (1)..(294): NCBI GI NO: 8954289 NR Description: carbonic anhydrase [Vigna radiata]
  misc_feature (1)..(294): NCBI GI NO: 115471 NR Description: Carbonic anhydrase, chloroplast precursor
  misc_feature (1)..(294): NCBI GI NO: 169057 NR Description: carbonic anhydrase
  misc_feature (12)..(294): NCBI GI NO: 7436820 NR Description: carbonate dehydratase (EC 4
  misc_feature (1)..(33): NCBI GI NO: 7436820 NR Description: carbonate dehydratase (EC 4
  misc_feature (12)..(294): NCBI GI NO: 7436819 NR Description: carbonate dehydratase (EC 4
  misc_feature (1)..(33): NCBI GI NO: 7436819 NR Description: carbonate dehydratase (EC 4
  misc_feature (75)..(294): NCBI GI NO: 8569250 NR Description: Chain A
  misc_feature (34)..(294): NCBI GI NO: 4754913 NR Description: carbonic anhydrase isoform 1 [Gossypium hirsutum]
  misc_feature (34)..(294): NCBI GI NO: 20502881 NR Description: carbonic anhydrase [Gossypium hirsutum]
MSTSSINGWCLSSISPAKTSLKKATLGPSVFATREDMAKEYEQAIEELQKLLREKSELKATAAEKVEQITASLGTSSSDGIPSSEASDRIKAGFIHFKKEKYDKNPALYGELAKGQSPKFMVFACSDSRVCPSHVLDFQPGEAFVVRNVANIVPPYDQSKYAGTGAAVEYAVLHLKVSEIVVIGHSACGGIKGLLSFPYDGTYSTDFIEEWVKIGLPAKAKVKTQHGDAPFAELCSHCEKEAVNVSLGNLLTYPFVRDGLVNKTLSLKGGYYDFVKGSFELWGLQFGLASSFSV

SEQ ID NO: 8833 - protein, 258 aa, Glycine max
  peptide (1)..(258): Ceres Seq. ID no. 14314398
  misc_feature (77)..(246): Pfam Name: Pfam Description:  Carbonic anhydrase
  misc_feature (1)..(258): NCBI GI NO: 8954289 NR Description: carbonic anhydrase [Vigna radiata]
  misc_feature (1)..(258): NCBI GI NO: 115471 NR Description: Carbonic anhydrase, chloroplast precursor
  misc_feature (1)..(258): NCBI GI NO: 169057 NR Description: carbonic anhydrase
  misc_feature (1)..(258): NCBI GI NO: 7436820 NR Description: carbonate dehydratase (EC 4
  misc_feature (1)..(258): NCBI GI NO: 7436819 NR Description: carbonate dehydratase (EC 4
  misc_feature (39)..(258): NCBI GI NO: 8569250 NR Description: Chain A
  misc_feature (1)..(258): NCBI GI NO: 4754913 NR Description: carbonic anhydrase isoform 1 [Gossypium hirsutum]
  misc_feature (1)..(258): NCBI GI NO: 20502881 NR Description: carbonic anhydrase [Gossypium hirsutum]
  misc_feature (1)..(258): NCBI GI NO: 4754915 NR Description: carbonic anhydrase isoform 2 [Gossypium hirsutum]
  misc_feature (1)..(258): NCBI GI NO: 30678350 NR Description: carbonic anhydrase, chloroplast precursor
MAKEYEQAIEELQKLLREKSELKATAAEKVEQITASLGTSSSDGIPSSEASDRIKAGFIHFKKEKYDKNPALYGELAKGQSPKFMVFACSDSRVCPSHVLDFQPGEAFVVRNVANIVPPYDQSKYAGTGAAVEYAVLHLKVSEIVVIGHSACGGIKGLLSFPYDGTYSTDFIEEWVKIGLPAKAKVKTQHGDAPFAELCSHCEKEAVNVSLGNLLTYPFVRDGLVNKTLSLKGGYYDFVKGSFELWGLQFGLASSFSV

SEQ ID NO: 8834 - protein, 174 aa, Glycine max
  peptide (1)..(174): Ceres Seq. ID no. 14314399
  misc_feature (1)..(162): Pfam Name: Pfam Description:  Carbonic anhydrase
  misc_feature (1)..(174): NCBI GI NO: 8954289 NR Description: carbonic anhydrase [Vigna radiata]
  misc_feature (1)..(174): NCBI GI NO: 115471 NR Description: Carbonic anhydrase, chloroplast precursor
  misc_feature (1)..(174): NCBI GI NO: 169057 NR Description: carbonic anhydrase
  misc_feature (1)..(174): NCBI GI NO: 7436820 NR Description: carbonate dehydratase (EC 4
  misc_feature (1)..(174): NCBI GI NO: 7436819 NR Description: carbonate dehydratase (EC 4
  misc_feature (1)..(174): NCBI GI NO: 8569250 NR Description: Chain A
  misc_feature (1)..(174): NCBI GI NO: 4754913 NR Description: carbonic anhydrase isoform 1 [Gossypium hirsutum]
  misc_feature (1)..(174): NCBI GI NO: 4754915 NR Description: carbonic anhydrase isoform 2 [Gossypium hirsutum]
  misc_feature (1)..(174): NCBI GI NO: 20502881 NR Description: carbonic anhydrase [Gossypium hirsutum]
  misc_feature (1)..(174): NCBI GI NO: 30678350 NR Description: carbonic anhydrase, chloroplast precursor
MVFACSDSRVCPSHVLDFQPGEAFVVRNVANIVPPYDQSKYAGTGAAVEYAVLHLKVSEIVVIGHSACGGIKGLLSFPYDGTYSTDFIEEWVKIGLPAKAKVKTQHGDAPFAELCSHCEKEAVNVSLGNLLTYPFVRDGLVNKTLSLKGGYYDFVKGSFELWGLQFGLASSFSV

SEQ ID NO: 8835 - DNA, 1749 bp, Glycine max
  misc_feature (1)..(1749): Ceres Seq. ID no. 14315985
actctggagaatttatgaaccggagtttgtatttttctctgttaattctataatttttttctcaaaattttgtgttaatttcgaagctttctgtgttctctgcaatggtgcagatttgagctcacagcactgcgattttctcggtggccaagctcaaactgctccaatttcatttctgggtttcatcttttcaccattttagacaaaaaaaattgtgtttttaaagtttcctgtaagattataaattttttctgcacccaaatctgtttcctcttaaataaagttagtatttaccccctttaaaaaaattcaatttttttgtgatttttttgggtgattgggtgtggaagagcccgaatcttcaatggatagggtttaagtgaagttttgaggttttggggtatcttagttttttttctttgatttgcataaaaatggagggaagagagaattttggtgttgtggtgggtgatgaggccccagagagcttccatgtggctcctagaattgagaacaacttggacttttcaagggccaccgtgccggcgccggcgccggccacggaggggaagaagaagagagggaggccgaggaagtatgggccggatgggaagccggcgttgggggcggtgacagcgctttcgccgatgccgatttcttcgtcgattccgttgaccggcgagttctctgcttggaagagtggtagagggaggcctgttgaatctatcaagaagtcatcgtttaagtttgaggttgaaagccctggaccagttgagggaatagcatactcagttggtgccaatttcacaccacatgtgctcacagtaaatgctggcgaggatgtcactatgaaaattatgaccttctctcaacaaggatcacgtgctatatgcattctctcagcaactgggacaatttcaaatgttactcttcgtcaaccgtcttcttgtgggggtactttaacgtatgagggactgtttgagattctttccttgtctggttcctttatgccaactgagaatggagttacaagaagtagatctggtgggatgagtgtctctttggctggtccagatggtcgagtaatggggggcggacttgctggtttgttggtagctgctggtccagtgcaggttgtggtggccagttttcttcctggtcaccagttggagcataaaaccaaaaagcaaagggtggagcatgtatcaactattagcccttcacctgttaatcttatcactagtgaggaaataaaagtaagttttggtggagtaaagcctattatgacccctgctgcttttcaagaagagaatattgcttcttttaacaatgttcaagactctaggaactcatctgctgatgacaaagatcctttgcctgaaaaggagtctaacctaagccaatcaaatgctgaggctgcatgctaaacatattccctgtgaattatttgatgttatgcagagtcaacctcatttaggctctcactcatgcttgactgacagctgacaattaacttacaaagacaactctgatggtcagatgagtgtcacacgatggttttgactcaacagttgcactctttggttggtactaggtgttagttggcaaatctgtttgttaggttttccacgtgtcatttctccagatgtatctgtagtattgtttactcattgttgtatcaattagatataggatatatgttgtgccattttctcccttatttatattctatatggatatgtatgttat

SEQ ID NO: 8836 - protein, 330 aa, Glycine max
  peptide (1)..(330): Ceres Seq. ID no. 14315986
  misc_feature (103)..(284): NCBI GI NO: 15242131 NR Description: expressed protein [Arabidopsis thaliana]
  misc_feature (11)..(93): NCBI GI NO: 15242131 NR Description: expressed protein [Arabidopsis thaliana]
  misc_feature (37)..(252): NCBI GI NO: 8809639 NR Description: contains similarity to DNA-bindingprotein~gene_id:MMI9
  misc_feature (16)..(313): NCBI GI NO: 15235023 NR Description: expressed protein [Arabidopsis thaliana]
  misc_feature (112)..(252): NCBI GI NO: 15241763 NR Description: expressed protein [Arabidopsis thaliana]
  misc_feature (37)..(110): NCBI GI NO: 15241763 NR Description: expressed protein [Arabidopsis thaliana]
  misc_feature (16)..(270): NCBI GI NO: 22328578 NR Description: DNA-binding protein -related
  misc_feature (3)..(285): NCBI GI NO: 15235790 NR Description: DNA binding protein -related
  misc_feature (46)..(270): NCBI GI NO: 7485570 NR Description: hypothetical protein F16J13
  misc_feature (11)..(315): NCBI GI NO: 15236743 NR Description: transcription factor -related
MEGRENFGVVVGDEAPESFHVAPRIENNLDFSRATVPAPAPATEGKKKRGRPRKYGPDGKPALGAVTALSPMPISSSIPLTGEFSAWKSGRGRPVESIKKSSFKFEVESPGPVEGIAYSVGANFTPHVLTVNAGEDVTMKIMTFSQQGSRAICILSATGTISNVTLRQPSSCGGTLTYEGLFEILSLSGSFMPTENGVTRSRSGGMSVSLAGPDGRVMGGGLAGLLVAAGPVQVVVASFLPGHQLEHKTKKQRVEHVSTISPSPVNLITSEEIKVSFGGVKPIMTPAAFQEENIASFNNVQDSRNSSADDKDPLPEKESNLSQSNAEAAC

SEQ ID NO: 8837 - protein, 259 aa, Glycine max
  peptide (1)..(259): Ceres Seq. ID no. 14315987
  misc_feature (32)..(213): NCBI GI NO: 15242131 NR Description: expressed protein [Arabidopsis thaliana]
  misc_feature (1)..(22): NCBI GI NO: 15242131 NR Description: expressed protein [Arabidopsis thaliana]
  misc_feature (1)..(181): NCBI GI NO: 8809639 NR Description: contains similarity to DNA-bindingprotein~gene_id:MMI9
  misc_feature (1)..(242): NCBI GI NO: 15235023 NR Description: expressed protein [Arabidopsis thaliana]
  misc_feature (41)..(181): NCBI GI NO: 15241763 NR Description: expressed protein [Arabidopsis thaliana]
  misc_feature (1)..(39): NCBI GI NO: 15241763 NR Description: expressed protein [Arabidopsis thaliana]
  misc_feature (1)..(199): NCBI GI NO: 22328578 NR Description: DNA-binding protein -related
  misc_feature (1)..(214): NCBI GI NO: 15235790 NR Description: DNA binding protein -related
  misc_feature (1)..(199): NCBI GI NO: 7485570 NR Description: hypothetical protein F16J13
  misc_feature (1)..(244): NCBI GI NO: 15236743 NR Description: transcription factor -related
MPISSSIPLTGEFSAWKSGRGRPVESIKKSSFKFEVESPGPVEGIAYSVGANFTPHVLTVNAGEDVTMKIMTFSQQGSRAICILSATGTISNVTLRQPSSCGGTLTYEGLFEILSLSGSFMPTENGVTRSRSGGMSVSLAGPDGRVMGGGLAGLLVAAGPVQVVVASFLPGHQLEHKTKKQRVEHVSTISPSPVNLITSEEIKVSFGGVKPIMTPAAFQEENIASFNNVQDSRNSSADDKDPLPEKESNLSQSNAEAAC

SEQ ID NO: 8838 - protein, 192 aa, Glycine max
  peptide (1)..(192): Ceres Seq. ID no. 14315988
  misc_feature (1)..(146): NCBI GI NO: 15242131 NR Description: expressed protein [Arabidopsis thaliana]
  misc_feature (1)..(114): NCBI GI NO: 8809639 NR Description: contains similarity to DNA-bindingprotein~gene_id:MMI9
  misc_feature (1)..(175): NCBI GI NO: 15235023 NR Description: expressed protein [Arabidopsis thaliana]
  misc_feature (1)..(114): NCBI GI NO: 15241763 NR Description: expressed protein [Arabidopsis thaliana]
  misc_feature (1)..(132): NCBI GI NO: 22328578 NR Description: DNA-binding protein -related
  misc_feature (1)..(147): NCBI GI NO: 15235790 NR Description: DNA binding protein -related
  misc_feature (1)..(132): NCBI GI NO: 7485570 NR Description: hypothetical protein F16J13
  misc_feature (1)..(177): NCBI GI NO: 15236743 NR Description: transcription factor -related
  misc_feature (1)..(124): NCBI GI NO: 14326504 NR Description: At2g33620/F4P9.39 [Arabidopsis thaliana]
  misc_feature (1)..(124): NCBI GI NO: 2598227 NR Description: AT-hook protein 1 [Arabidopsis thaliana]
MKIMTFSQQGSRAICILSATGTISNVTLRQPSSCGGTLTYEGLFEILSLSGSFMPTENGVTRSRSGGMSVSLAGPDGRVMGGGLAGLLVAAGPVQVVVASFLPGHQLEHKTKKQRVEHVSTISPSPVNLITSEEIKVSFGGVKPIMTPAAFQEENIASFNNVQDSRNSSADDKDPLPEKESNLSQSNAEAAC

SEQ ID NO: 8839 - DNA, 1202 bp, Glycine max
  misc_feature (1)..(1202): Ceres Seq. ID no. 13582538
taatcgaaaagtcgaggtctaaactctcaagcaaaatattattttcttgtaaaaaaacaagcatgtgaagaacaaaaaaacaaaaatctaaactagatcctcacatgtctgtttaatatggttgcaagggacagaatcacataggcaagctcgtgtaaccctctcattcctcttatcttgcttcattttcatgtggttaacatccttctcctgctaaaaacaacatatataggttgaaatgtacaccctgtcttatccacattccttggaaaatctcaagtaatgctaacgtggccttatccaaatatttttcaaaccatcttcaactcttcatacataaaatctatgctatgtctcatattagcattcaagaccaagaacacaaaaaccacttaattagtccttctcacatccaaaatcttgtgccagcaaatcaaacatggcatccatgactatgcttcagaccatgattcctaagaatgcaccgaacctccctcctcgtgttggtgcttcttccaacaacactactaagatctcatttggtggctcaggtagggtactgtggaccgggattcagaggaacaggaataataggtcttcttcgattgtagttgctgcagttggagatgtttcatctgatggcactgcgtaccttgttgctggtgccattgctgtggctctagttggaacggccttccccatcttcttctctcgcaaagacacatgccctgaatgtgatggagcagggtttgtgcggaaggctaatgtgacattgagagcaaatgcagcacgaaaggatcaaacccaaatcgtttgtgctcgctgcaatggtttgggcaaacttaaccaaattgacaaatagacaacattatgctccctacattgcccctttctttcttttcttattactatgtaattatttaaggataatatattattgatatcccctcctcgtgtttcttcgtcctatgagatgaacattataatatatcatgataggagagaaaagcacaaatttcacttgttcagaaacctaccattttgattttgcattgcgtatctgatttgtgtttttctctcccgtatcatgataccccgatgttcctaatctgttgtttaattgtgcatatgttgtatgtacttgaagtacacttgacaacaagaaagtccaataaatatgatatatgttcgtcctttcttcc

SEQ ID NO: 8840 - protein, 140 aa, Glycine max
  peptide (1)..(140): Ceres Seq. ID no. 13582539
  misc_feature (15)..(140): NCBI GI NO: 11762216 NR Description: AT5g02160 [Arabidopsis thaliana]
  misc_feature (38)..(139): NCBI GI NO: 14719330 NR Description: unknown protein [Oryza sativa]
  misc_feature (15)..(93): NCBI GI NO: 15241706 NR Description: expressed protein [Arabidopsis thaliana]
MASMTMLQTMIPKNAPNLPPRVGASSNNTTKISFGGSGRVLWTGIQRNRNNRSSSIVVAAVGDVSSDGTAYLVAGAIAVALVGTAFPIFFSRKDTCPECDGAGFVRKANVTLRANAARKDQTQIVCARCNGLGKLNQIDK

SEQ ID NO: 8841 - protein, 137 aa, Glycine max
  peptide (1)..(137): Ceres Seq. ID no. 13582540
  misc_feature (12)..(137): NCBI GI NO: 11762216 NR Description: AT5g02160 [Arabidopsis thaliana]
  misc_feature (35)..(136): NCBI GI NO: 14719330 NR Description: unknown protein [Oryza sativa]
  misc_feature (12)..(90): NCBI GI NO: 15241706 NR Description: expressed protein [Arabidopsis thaliana]
MTMLQTMIPKNAPNLPPRVGASSNNTTKISFGGSGRVLWTGIQRNRNNRSSSIVVAAVGDVSSDGTAYLVAGAIAVALVGTAFPIFFSRKDTCPECDGAGFVRKANVTLRANAARKDQTQIVCARCNGLGKLNQIDK

SEQ ID NO: 8842 - protein, 135 aa, Glycine max
  peptide (1)..(135): Ceres Seq. ID no. 13582541
  misc_feature (10)..(135): NCBI GI NO: 11762216 NR Description: AT5g02160 [Arabidopsis thaliana]
  misc_feature (33)..(134): NCBI GI NO: 14719330 NR Description: unknown protein [Oryza sativa]
  misc_feature (10)..(88): NCBI GI NO: 15241706 NR Description: expressed protein [Arabidopsis thaliana]
MLQTMIPKNAPNLPPRVGASSNNTTKISFGGSGRVLWTGIQRNRNNRSSSIVVAAVGDVSSDGTAYLVAGAIAVALVGTAFPIFFSRKDTCPECDGAGFVRKANVTLRANAARKDQTQIVCARCNGLGKLNQIDK

SEQ ID NO: 8843 - DNA, 1785 bp, Glycine max
  misc_feature (1)..(1785): Ceres Seq. ID no. 15226659
gttacaacagactctgactctctctctcaagattcctctccgcgcaaagaatcttcatttctgtttcgcttccaacactccaaattccatttcattttcatctctctctgtatctgatgctcagaacaaatttcgattccgaaaatggcactagcaagtaccaacactgatcaatccacaatcaccactccttcaaagaaaccctcaaaaaactccgagaatctgaaccctaacgtgcctcatcatcgaagcccttcttcaaagtcccctgctttgcgatcctccaagccaaacaacagcaacccaattgcgcaatcgccgcagaacaggatccggcagaggaagttcgtggtggcaaagaagaaaaatcagaagggtacccaaaacgacgccgtttcgtgcaagtgcaaacacaatggtggcgccaagtgtgtttgtgtagctttccagactctgagggcttctcaggaagagtttttcctcaaagaaaagaaggattgtgattatgattttgaagaagaaagagaagaagaagcaaaagctgtgaatgctattgaaatctatggaacaaaaagtgaaacagtgcaaggagaagaagaaaaagaagaaggaggttccacagtgaaacgaaggagggagagagataggttgttggaagaggcaaggaatagtgttcctgaaaatgggtttgggagggttatgcatttggtgaaagcctttgagaagcttctcactatacctaagagttcaaaggagaaagatcacaaggaggagcatgatcatgagcatgaagagcaaaagaataagagccaggtgatgaaatgggcattgccagggttgcaatttcaacaacatcctaagcctaagacacttgaagctactactgatgatgcttctgtttcgggttcttcttcattttgttgtacttctgatttggttttgacatccaagaaccttggtattggtcaagggatttcagtttcttcatcttgggattgtaaccgtgcaagtgtatctagtaggacttctgggggtagaaggagcaggagaaatagctcggagtcatctgggacttttggagggaggaggtggaagcagaaggagaagctaaaagtcactaggcaaaaaccatttaagttaagaacagagcaaaggggaaagttgaaagaggaagaatttgtgaagaaagtacaagagatgatgactgaagaagagaagatgaggataccaattgctcaggggcttccatggacaacagatgaacctgagtgcttgttaaaacctacagttaaagaaagcacaaggcctattgacctaaagcttcatagtgatattcgggcaattgatcgtgctgaatttgaccaacaggtggcagaaaaaatgaacttcatagaacaactcaagttggaaaaggaaagacaacaaaagttagaagaagaagaagaaatcaggaggttgaggaaggaactcattccaaaagctcaaccaatgccttattttgacagaccatttgtcccaaggaggtcaatgaagcatcccactatacctagagaacccaagttccacatgccccaacataagaagatcaagtgtttggtcatggaatgacatgtcctatctcaacataagaaatcaatgaatgcttcatttctccatcattctctccacaatataattataaaaatgcaaattaatggtagtgtattgagatattataaaaaaatacaaactaatgtgttccaaacaagttcaaattaatgatgactaattatgtttttagttctc

SEQ ID NO: 8844 - protein, 487 aa, Glycine max
  peptide (1)..(487): Ceres Seq. ID no. 15226660
  misc_feature (64)..(412): Pfam Name: Pfam Description:  Caldesmon
  misc_feature (9)..(483): NCBI GI NO: 30685394 NR Description: expressed protein [Arabidopsis thaliana]
  misc_feature (9)..(483): NCBI GI NO: 11358122 NR Description: hypothetical protein T20K14_120 - Arabidopsisthaliana
  misc_feature (141)..(483): NCBI GI NO: 15232025 NR Description: hypothetical protein [Arabidopsis thaliana]
  misc_feature (9)..(206): NCBI GI NO: 15232025 NR Description: hypothetical protein [Arabidopsis thaliana]
  misc_feature (390)..(475): NCBI GI NO: 15241452 NR Description: hypothetical protein [Arabidopsis thaliana]
  misc_feature (379)..(479): NCBI GI NO: 28453880 NR Description: WAVE-DAMPENED2 [Arabidopsis thaliana]
  misc_feature (319)..(473): NCBI GI NO: 8926136 NR Description: targeting protein for Xklp2; TPX2 [Xenopus laevis]
MALASTNTDQSTITTPSKKPSKNSENLNPNVPHHRSPSSKSPALRSSKPNNSNPIAQSPQNRIRQRKFVVAKKKNQKGTQNDAVSCKCKHNGGAKCVCVAFQTLRASQEEFFLKEKKDCDYDFEEEREEEAKAVNAIEIYGTKSETVQGEEEKEEGGSTVKRRRERDRLLEEARNSVPENGFGRVMHLVKAFEKLLTIPKSSKEKDHKEEHDHEHEEQKNKSQVMKWALPGLQFQQHPKPKTLEATTDDASVSGSSSFCCTSDLVLTSKNLGIGQGISVSSSWDCNRASVSSRTSGGRRSRRNSSESSGTFGGRRWKQKEKLKVTRQKPFKLRTEQRGKLKEEEFVKKVQEMMTEEEKMRIPIAQGLPWTTDEPECLLKPTVKESTRPIDLKLHSDIRAIDRAEFDQQVAEKMNFIEQLKLEKERQQKLEEEEEIRRLRKELIPKAQPMPYFDRPFVPRRSMKHPTIPREPKFHMPQHKKIKCLVME

SEQ ID NO: 8845 - protein, 302 aa, Glycine max
  peptide (1)..(302): Ceres Seq. ID no. 15226661
  misc_feature (1)..(227): Pfam Name: Pfam Description:  Caldesmon
  misc_feature (1)..(298): NCBI GI NO: 30685394 NR Description: expressed protein [Arabidopsis thaliana]
  misc_feature (1)..(298): NCBI GI NO: 11358122 NR Description: hypothetical protein T20K14_120 - Arabidopsisthaliana
  misc_feature (1)..(298): NCBI GI NO: 15232025 NR Description: hypothetical protein [Arabidopsis thaliana]
  misc_feature (1)..(21): NCBI GI NO: 15232025 NR Description: hypothetical protein [Arabidopsis thaliana]
  misc_feature (205)..(290): NCBI GI NO: 15241452 NR Description: hypothetical protein [Arabidopsis thaliana]
  misc_feature (194)..(294): NCBI GI NO: 28453880 NR Description: WAVE-DAMPENED2 [Arabidopsis thaliana]
  misc_feature (134)..(288): NCBI GI NO: 8926136 NR Description: targeting protein for Xklp2; TPX2 [Xenopus laevis]
MHLVKAFEKLLTIPKSSKEKDHKEEHDHEHEEQKNKSQVMKWALPGLQFQQHPKPKTLEATTDDASVSGSSSFCCTSDLVLTSKNLGIGQGISVSSSWDCNRASVSSRTSGGRRSRRNSSESSGTFGGRRWKQKEKLKVTRQKPFKLRTEQRGKLKEEEFVKKVQEMMTEEEKMRIPIAQGLPWTTDEPECLLKPTVKESTRPIDLKLHSDIRAIDRAEFDQQVAEKMNFIEQLKLEKERQQKLEEEEEIRRLRKELIPKAQPMPYFDRPFVPRRSMKHPTIPREPKFHMPQHKKIKCLVME

SEQ ID NO: 8846 - protein, 263 aa, Glycine max
  peptide (1)..(263): Ceres Seq. ID no. 15226662
  misc_feature (1)..(188): Pfam Name: Pfam Description:  Caldesmon
  misc_feature (1)..(259): NCBI GI NO: 30685394 NR Description: expressed protein [Arabidopsis thaliana]
  misc_feature (1)..(259): NCBI GI NO: 11358122 NR Description: hypothetical protein T20K14_120 - Arabidopsisthaliana
  misc_feature (1)..(259): NCBI GI NO: 15232025 NR Description: hypothetical protein [Arabidopsis thaliana]
  misc_feature (166)..(251): NCBI GI NO: 15241452 NR Description: hypothetical protein [Arabidopsis thaliana]
  misc_feature (155)..(255): NCBI GI NO: 28453880 NR Description: WAVE-DAMPENED2 [Arabidopsis thaliana]
  misc_feature (95)..(249): NCBI GI NO: 8926136 NR Description: targeting protein for Xklp2; TPX2 [Xenopus laevis]
MKWALPGLQFQQHPKPKTLEATTDDASVSGSSSFCCTSDLVLTSKNLGIGQGISVSSSWDCNRASVSSRTSGGRRSRRNSSESSGTFGGRRWKQKEKLKVTRQKPFKLRTEQRGKLKEEEFVKKVQEMMTEEEKMRIPIAQGLPWTTDEPECLLKPTVKESTRPIDLKLHSDIRAIDRAEFDQQVAEKMNFIEQLKLEKERQQKLEEEEEIRRLRKELIPKAQPMPYFDRPFVPRRSMKHPTIPREPKFHMPQHKKIKCLVME

SEQ ID NO: 8847 - DNA, 632 bp, Glycine max
  misc_feature (1)..(632): Ceres Seq. ID no. 13594276
gctctttgcagtacatgtttagttgtttgctgaagccaaaccaaataattcttcatttgatcactgtgtctttattttgattcaaaggctacaagacttcataactacctactaaatgcttatcttgttcctcatttcctggatcataacccaacctcttcattttgcctcatcaattcctcttcttagagatggcttgtgaaaccaagacatggttggttatggttcttcttttcttggctgctaactacttgcaagattgtgttcatggggtatcccaagttccttgccttttcatctttggggactctttatctgacagtggaaacaacaatgaacttccaacctctgcaaaatctaattacagaccatatgggatcgactttccattaggaccaacaggaagatttaccaatggcagaacagaaattgacataattactcaacttctgggatttgagaaattcatcccaccctttgcaaacactagtggttcagacatacttaaaggtgtgaactatgcatcaggtggagctggaatacgcgttgaaaccagctcgcatttgggtgctactatcagctttggattacagttagcaaatcacagagtcatagtttctcaaattgctagc

SEQ ID NO: 8848 - protein, 147 aa, Glycine max
  peptide (1)..(147): Ceres Seq. ID no. 13594277
  misc_feature (35)..(146): Pfam Name: Pfam Description:  GDSL-like Lipase/Acylhydrolase
  misc_feature (8)..(144): NCBI GI NO: 15224697 NR Description: GDSL-motif lipase hydrolase protein
  misc_feature (11)..(146): NCBI GI NO: 18415211 NR Description: GDSL-motif lipase/hydrolase protein
  misc_feature (11)..(146): NCBI GI NO: 21618199 NR Description: GDSL-motif lipase/hydrolase-like protein
  misc_feature (10)..(146): NCBI GI NO: 15242458 NR Description: GDSL-motif lipase/hydrolase protein
  misc_feature (10)..(146): NCBI GI NO: 21553940 NR Description: GDSL-motif lipase/hydrolase-like protein
  misc_feature (11)..(146): NCBI GI NO: 7485419 NR Description: hypothetical protein F13C5
  misc_feature (5)..(145): NCBI GI NO: 15220514 NR Description: GDSL-motif lipase/hydrolase protein
  misc_feature (5)..(145): NCBI GI NO: 21592417 NR Description: lipase/hydrolase, putative [Arabidopsis thaliana]
  misc_feature (30)..(146): NCBI GI NO: 34910808 NR Description: GDSL-motif lipase/hydrolase-like protein
  misc_feature (6)..(145): NCBI GI NO: 15220512 NR Description: GDSL-motif lipase/hydrolase protein
MACETKTWLVMVLLFLAANYLQDCVHGVSQVPCLFIFGDSLSDSGNNNELPTSAKSNYRPYGIDFPLGPTGRFTNGRTEIDIITQLLGFEKFIPPFANTSGSDILKGVNYASGGAGIRVETSSHLGATISFGLQLANHRVIVSQIAS

SEQ ID NO: 8849 - protein, 137 aa, Glycine max
  peptide (1)..(137): Ceres Seq. ID no. 13594278
  misc_feature (25)..(136): Pfam Name: Pfam Description:  GDSL-like Lipase/Acylhydrolase
  misc_feature (1)..(134): NCBI GI NO: 15224697 NR Description: GDSL-motif lipase hydrolase protein
  misc_feature (1)..(136): NCBI GI NO: 18415211 NR Description: GDSL-motif lipase/hydrolase protein
  misc_feature (1)..(136): NCBI GI NO: 21618199 NR Description: GDSL-motif lipase/hydrolase-like protein
  misc_feature (1)..(136): NCBI GI NO: 15242458 NR Description: GDSL-motif lipase/hydrolase protein
  misc_feature (1)..(136): NCBI GI NO: 21553940 NR Description: GDSL-motif lipase/hydrolase-like protein
  misc_feature (1)..(136): NCBI GI NO: 7485419 NR Description: hypothetical protein F13C5
  misc_feature (1)..(135): NCBI GI NO: 15220514 NR Description: GDSL-motif lipase/hydrolase protein
  misc_feature (1)..(135): NCBI GI NO: 21592417 NR Description: lipase/hydrolase, putative [Arabidopsis thaliana]
  misc_feature (20)..(136): NCBI GI NO: 34910808 NR Description: GDSL-motif lipase/hydrolase-like protein
  misc_feature (1)..(135): NCBI GI NO: 15220512 NR Description: GDSL-motif lipase/hydrolase protein
MVLLFLAANYLQDCVHGVSQVPCLFIFGDSLSDSGNNNELPTSAKSNYRPYGIDFPLGPTGRFTNGRTEIDIITQLLGFEKFIPPFANTSGSDILKGVNYASGGAGIRVETSSHLGATISFGLQLANHRVIVSQIAS

SEQ ID NO: 8850 - DNA, 1275 bp, Glycine max
  misc_feature (1)..(1275): Ceres Seq. ID no. 15177246
agtgaaggcagaagaagaagattcctggattgattgtgaagatggctgagtcggacaacgactcgggaggggcgcagaacgcgggaaacagtggaaacttgagcgagttgtcgcctcgggaacaggaccggtttctccccatagcgaacgtgagcaggatcatgaagaaggccttgccggcgaacgcgaagatctcgaaggacgcgaaggagacggtgcaggaatgcgtgtcggagttcatcagcttcataacgggtgaggcgtcggacaagtgccagagggagaagcgcaagaccatcaacggcgacgatcttctctgggccatgacaaccctgggattcgaagagtacgtggagcctctgaagatttacctccagcgcttccgcgagatggagggagagaagaccgtggccgcccgcgactcttctaaggactcggcctccgcctcctcctatcatcagggacacgtgtacggctcccctgcctaccatcatcaagtgcctgggcccacttatcctgcccctggtagacccagatgacgtgctcctctattcgccactccctagactttttatattatattatttaattaaactctcttctccactcaacctttgcaagatcactgggttggttagtcttgttacttgttactgtttctctctatcatacctatactcactcttcctcctcatctattatttacatccaatgcaaattctcaaatattcctttttcaaaaaaaaaaaaaaaaaaaaaaaaaaaaaaaaaaaatagatagctccttcaattagggtttttgtgatctgcaagctacgatgggtaagggaacggggagtttcggtaagagaaggaacaagacccacaccctctgtgtgaggtgtggccgccgcagtttccacctccagaagagtcgttgcgccgcgtgcgctttccccgctgcgcgcaccaggaaatataactggagcgtgaaggccattaggagaaagaccaccggaactggaaggatgaggtacttgcgtaacgtgccccgtagatttaagagtggcttcagagacggtaccgaagctgcacccaggaagagaggagctgctgcctctacctaagctttgaataatagcaatttttgctgggtcagtgaattatataggatttaatgtttctatgttgatgccgagctctttggaacacgtttctttctgtcgttttaatttcatttaatatgtagtggctttgtatttcgacgtgaggattgcaaggaatttttgttttttc

SEQ ID NO: 8851 - protein, 165 aa, Glycine max
  peptide (1)..(165): Ceres Seq. ID no. 15177247
  misc_feature (30)..(95): Pfam Name: CBF/NF-Y Pfam Description: Histone-like transcription factor
  misc_feature (1)..(126): NCBI GI NO: 15238156 NR Description: expressed protein [Arabidopsis thaliana]
  misc_feature (1)..(149): NCBI GI NO: 15233475 NR Description: CCAAT-binding transcription factor subunit A
  misc_feature (5)..(126): NCBI GI NO: 2398529 NR Description: Transcription factor [Arabidopsis thaliana]
  misc_feature (1)..(146): NCBI GI NO: 22380 NR Description: CAAT-box DNA binding protein subunit B (NF-YB)
  misc_feature (1)..(146): NCBI GI NO: 115840 NR Description: CCAAT-BINDING TRANSCRIPTION FACTOR SUBUNIT A
  misc_feature (1)..(156): NCBI GI NO: 17979253 NR Description: At2g37060/T2N18.18 [Arabidopsis thaliana]
  misc_feature (26)..(159): NCBI GI NO: 30409461 NR Description: NF-YB [Oryza sativa (japonica cultivar-group)]
  misc_feature (1)..(133): NCBI GI NO: 15231796 NR Description: transcription factor NF-Y
  misc_feature (4)..(137): NCBI GI NO: 18404885 NR Description: CCAAT-binding transcription factor subunit -related
  misc_feature (3)..(142): NCBI GI NO: 15225440 NR Description: CCAAT-box binding trancription factor -related
MAESDNDSGGAQNAGNSGNLSELSPREQDRFLPIANVSRIMKKALPANAKISKDAKETVQECVSEFISFITGEASDKCQREKRKTINGDDLLWAMTTLGFEEYVEPLKIYLQRFREMEGEKTVAARDSSKDSASASSYHQGHVYGSPAYHHQVPGPTYPAPGRPR

SEQ ID NO: 8852 - protein, 125 aa, Glycine max
  peptide (1)..(125): Ceres Seq. ID no. 15177248
  misc_feature (1)..(55): Pfam Name: CBF/NF-Y Pfam Description: Histone-like transcription factor
  misc_feature (1)..(86): NCBI GI NO: 15238156 NR Description: expressed protein [Arabidopsis thaliana]
  misc_feature (1)..(109): NCBI GI NO: 15233475 NR Description: CCAAT-binding transcription factor subunit A
  misc_feature (1)..(86): NCBI GI NO: 2398529 NR Description: Transcription factor [Arabidopsis thaliana]
  misc_feature (1)..(106): NCBI GI NO: 22380 NR Description: CAAT-box DNA binding protein subunit B (NF-YB)
  misc_feature (1)..(106): NCBI GI NO: 115840 NR Description: CCAAT-BINDING TRANSCRIPTION FACTOR SUBUNIT A
  misc_feature (1)..(116): NCBI GI NO: 17979253 NR Description: At2g37060/T2N18.18 [Arabidopsis thaliana]
  misc_feature (1)..(119): NCBI GI NO: 30409461 NR Description: NF-YB [Oryza sativa (japonica cultivar-group)]
  misc_feature (1)..(93): NCBI GI NO: 15231796 NR Description: transcription factor NF-Y
  misc_feature (1)..(97): NCBI GI NO: 18404885 NR Description: CCAAT-binding transcription factor subunit -related
  misc_feature (1)..(102): NCBI GI NO: 15225440 NR Description: CCAAT-box binding trancription factor -related
MKKALPANAKISKDAKETVQECVSEFISFITGEASDKCQREKRKTINGDDLLWAMTTLGFEEYVEPLKIYLQRFREMEGEKTVAARDSSKDSASASSYHQGHVYGSPAYHHQVPGPTYPAPGRPR

SEQ ID NO: 8853 - protein, 95 aa, Glycine max
  peptide (1)..(95): Ceres Seq. ID no. 15177249
  misc_feature (2)..(55): Pfam Name: Pfam Description:  Ribosomal protein L37e
  misc_feature (1)..(94): NCBI GI NO: 18401007 NR Description: 60S ribosomal protein L37 (RPL37C)
  misc_feature (1)..(95): NCBI GI NO: 15218094 NR Description: 60S ribosomal protein L37 (RPL37A)
  misc_feature (1)..(95): NCBI GI NO: 19852052 NR Description: 60S ribosomal protein L37 [Aplysia californica]
MGKGTGSFGKRRNKTHTLCVRCGRRSFHLQKSRCAACAFPAARTRKYNWSVKAIRRKTTGTGRMRYLRNVPRRFKSGFRDGTEAAPRKRGAAAST

SEQ ID NO: 8854 - DNA, 1214 bp, Glycine max
  misc_feature (1)..(1214): Ceres Seq. ID no. 14305398
aaaaaaaggtttgttcttagcaattcctctgtgttctcaaaggccgttttttttagtgtgtgtgtttcacttttatttccttttcggttccaatctatgtttgagtcgtattgtaatcatgttgagtcttggtcgatgccttgtataatgtgtatggtgggttgtatcttccttggattttattgaacatgcctgcctgcccgccacctgtttgatgaaatgcttgaacttttcagaaatgaactagtgtgtgatatattggcgcttgaatttgtgatgctacacctgttggctttcttgtttgcatctgaattacaaaagaagtgactgtgaatccgaatccaaatctgaatgggttatcttcaatttggcagacatggtgttaggcaggtccttagatttagagatgctagttgtgataatgttgtggtaaacccactcttatatgcttcccaaggacttcgttacaagaggaagctccaagtcatccttacaactgacatagataagctgggaaaggcaggtgacactgtcaaagttgcccctggatattttcgcaaccacctaatgcccaagctccttgctttccctaacattgataagtttgcttatctcctcaatgagcagcgcaagatctatcaaccaactgaagaagaaaaacaagaagatgtcactctagttaaagagtccaaggaagatatgatgaaagagtatgaaaaggcagcattacgtcttgataaagctcagctggttttgcggaggttaattaatgttcaaaaagccaagtcacgtgaatcaaaagaagaccccttggagttacgttatcctgtgacaaaagatactcttgtggctgaggtggcaagacaactttgtgtgaacgttgcacctgataacctgcatcttccatcacctctatccacattaggagaatatgaggtgccactgcgtataccaaggtccatcccgttgccagagggcaaggttaactggagtttgaaagttaaagtcaggagtaaataaatcactcatcttgttgaattcaagttcacaagggatggaatagtggttttatgctaataaatcattaaattgaatccgaggattataagattttgacattgcttttatttatagaaacagaaacgccactcatttaacaatgtctcttgaatagtctgtttttattgagtggagtctcatgtgttattgacaag

SEQ ID NO: 8855 - protein, 222 aa, Glycine max
  peptide (1)..(222): Ceres Seq. ID no. 14305399
  misc_feature (43)..(92): Pfam Name: Pfam Description:  Ribosomal protein L9, N-terminal domain
  misc_feature (1)..(220): NCBI GI NO: 15237342 NR Description: expressed protein [Arabidopsis thaliana]
MGYLQFGRHGVRQVLRFRDASCDNVVVNPLLYASQGLRYKRKLQVILTTDIDKLGKAGDTVKVAPGYFRNHLMPKLLAFPNIDKFAYLLNEQRKIYQPTEEEKQEDVTLVKESKEDMMKEYEKAALRLDKAQLVLRRLINVQKAKSRESKEDPLELRYPVTKDTLVAEVARQLCVNVAPDNLHLPSPLSTLGEYEVPLRIPRSIPLPEGKVNWSLKVKVRSK

SEQ ID NO: 8856 - protein, 150 aa, Glycine max
  peptide (1)..(150): Ceres Seq. ID no. 14305400
  misc_feature (1)..(148): NCBI GI NO: 15237342 NR Description: expressed protein [Arabidopsis thaliana]
MPKLLAFPNIDKFAYLLNEQRKIYQPTEEEKQEDVTLVKESKEDMMKEYEKAALRLDKAQLVLRRLINVQKAKSRESKEDPLELRYPVTKDTLVAEVARQLCVNVAPDNLHLPSPLSTLGEYEVPLRIPRSIPLPEGKVNWSLKVKVRSK

SEQ ID NO: 8857 - DNA, 884 bp, Glycine max
  misc_feature (1)..(884): Ceres Seq. ID no. 13595752
acctagaacatcctaatcgaaaaattatcattgccgttcattttccttcttatcactactcagacaataaacgcctcagtctctcatttcagggtgcaaaatcttccatgtataaatattactatgtgcttgcattaactgattgatttactccaaaatttaggttctaatgattataaaaggattgtttggaaggtacgaaagatggaaccctgttcatccaactcatggagccttttggggaatgggtgtgggcgttggttgtggtgtcggatggggtcctgggtttggccctgaagtgataggctatgttggagctggttgtggcattggattcaatgtaggcatcacttttgctggtgttggagttggcctacctgctaattttatctttgaaggtccatataatggggttagctggattggaaatttaccttgtatctctgacttgcaaagagaagccaatggaaaattgtttgaatttaggcaaaagcatttatcaataaagggaattaacttctttgacaagaagaacagcttgcctttgctcacttctgccagtaaaagtatacaagcattccgtaaccaaatattcagctctcataaagggaaagattgatgacttccaccactgtcagttttgtgcttacattttttgacacattttgtattttgttgggtcggaggcgaagctcttgttttcacagttaaccagataatctattattgttctgctctatctctccccacatggccacattcaaattcagttgtattttatagtcttgttacatgtgtttcttcagaaaatctcagccaaattttgtaaccaatatattaaaagcatatttatactagtaagaaataagatttcctactgtggg

SEQ ID NO: 8858 - protein, 149 aa, Glycine max
  peptide (1)..(149): Ceres Seq. ID no. 13595753
  misc_feature (1)..(82): NCBI GI NO: 15234117 NR Description: cadmium-induced protein [Arabidopsis thaliana]
  misc_feature (1)..(89): NCBI GI NO: 34899622 NR Description: cadmium-induced protein-like
MIIKGLFGRYERWNPVHPTHGAFWGMGVGVGCGVGWGPGFGPEVIGYVGAGCGIGFNVGITFAGVGVGLPANFIFEGPYNGVSWIGNLPCISDLQREANGKLFEFRQKHLSIKGINFFDKKNSLPLLTSASKSIQAFRNQIFSSHKGKD

SEQ ID NO: 8859 - protein, 124 aa, Glycine max
  peptide (1)..(124): Ceres Seq. ID no. 13595754
  misc_feature (1)..(57): NCBI GI NO: 15234117 NR Description: cadmium-induced protein [Arabidopsis thaliana]
  misc_feature (1)..(64): NCBI GI NO: 34899622 NR Description: cadmium-induced protein-like
MGVGVGCGVGWGPGFGPEVIGYVGAGCGIGFNVGITFAGVGVGLPANFIFEGPYNGVSWIGNLPCISDLQREANGKLFEFRQKHLSIKGINFFDKKNSLPLLTSASKSIQAFRNQIFSSHKGKD

SEQ ID NO: 8860 - DNA, 1401 bp, Glycine max
  misc_feature (1)..(1401): Ceres Seq. ID no. 13638292
  misc_feature (1285)..(1285): n is a, c, t, g, unknown, or other
  misc_feature (1284)..(1284): n is a, c, t, g, unknown, or other
  misc_feature (1283)..(1283): n is a, c, t, g, unknown, or other
atgaccattcaaagaaatgttatctttaccgaactgagctggaaaagactgaacaatattggaaaggctggtatgaaggcctctcagataaatttttgtcatgtcctgtgccaaaactgttgttattagccggaacagatagattggacaggtctctcacaattggtcaaatgcaagggaagtttcaaatggtagttgtaaggcatacagggcatgctattcaggaagatgtacctgatgaatttgcaactctgattgttaacttcatttctcgtaaccgaataggccctcatggaattgagatacctggccttcgcaagccagccttttccaaaccttgaatctggtattagataaaccaagaatgaccaccactgcaagatgaagatgatgaattttttttttttttttttcttaaaaaacttaaaatattattattccttgtttttttttttcctcctcctcctccctactactaccactctccaccaccaccatccccatcaccgccgtctccatattattacaaatcccctccacctccatctccatctccaccacctccttactactatcaaagtcctcctccaccatctcccacttctcatcctccctattactacaaatcccctccaccaccaacgtcatatcctccacctccttaccactacgtgagccctccaccaccttctccatctcctcccccaccataccattacacatcaccacctcctccttccccagctcctgctcccaagtacatttacaaatcacctccacctccggtttatatctatgcttccccacctccacctatctacaagtaagctcaaattgtgaaagcaccattcatgatgaatcatgttctagttttcatcgaggaataaaggcaagctctattttgagccaagtgaaacatctatcttcctgtctaagttctttgaataaaagtctgaatgtgtcatctctatgctacaatgtttatgattcagatcaggttgattctatttgtttgatggccatcttgcacgtcctgatcttattgtgttcaagtgacggacaaatccaaacaggaaagagagatttgaaatgtaaatgccaagtaaatgtgaaaagtacagtccatttttagtgatctctttaatttatttgttcatagattaatatggtcgtgtatgattgcttttctatttattgtggcatttttgtgttgtaccctgttgttgtgtttgcaataattattagtaataaagcagcaaatttcaatttgtgttcatgcatcnnnaaaaaaaaaaaaaaaaaaaaaaaaaaaaaaaaaaaaaaaaaaaaaaaaaaaaaaaaaaaaaaaaaaaaaaaaaaaaaaaagtttatcgatcccgccaacctcaaggggggccccgg

SEQ ID NO: 8861 - protein, 112 aa, Glycine max
  peptide (1)..(112): Ceres Seq. ID no. 15219405
  misc_feature (1)..(87): Pfam Name: Pfam Description:  alpha/beta hydrolase fold
  misc_feature (1)..(108): NCBI GI NO: 18413291 NR Description: hydrolase, alpha/beta fold  family
  misc_feature (1)..(106): NCBI GI NO: 32479665 NR Description: P0041A24.6
  misc_feature (7)..(98): NCBI GI NO: 6560626 NR Description: PRO0750 [Homo sapiens]
  misc_feature (7)..(98): NCBI GI NO: 20809834 NR Description: Protein phosphatase methylesterase 1
  misc_feature (7)..(98): NCBI GI NO: 7706645 NR Description: protein phosphatase methylesterase-1
  misc_feature (7)..(98): NCBI GI NO: 7022606 NR Description: unnamed protein product [Homo sapiens]
  misc_feature (7)..(93): NCBI GI NO: 28277941 NR Description: Similar to RIKEN cDNA 2700017M01 gene
  misc_feature (7)..(94): NCBI GI NO: 17551890 NR Description: Predicted CDS, alpha beta hydrolase fold
  misc_feature (7)..(79): NCBI GI NO: 26345806 NR Description: unnamed protein product [Mus musculus]
  misc_feature (7)..(93): NCBI GI NO: 19112983 NR Description: putative methyltransferase
DHSKKCYLYRTELEKTEQYWKGWYEGLSDKFLSCPVPKLLLLAGTDRLDRSLTIGQMQGKFQMVVVRHTGHAIQEDVPDEFATLIVNFISRNRIGPHGIEIPGLRKPAFSKP

SEQ ID NO: 8862 - protein, 97 aa, Glycine max
  peptide (1)..(97): Ceres Seq. ID no. 15219406
MKMMNFFFFFFLKNLKYYYSLFFFFLLLLPTTTTLHHHHPHHRRLHIITNPLHLHLHLHHLLTTIKVLLHHLPLLILPITTNPLHHQRHILHLLTTT

SEQ ID NO: 8863 - protein, 95 aa, Glycine max
  peptide (1)..(95): Ceres Seq. ID no. 15219407
MMNFFFFFFLKNLKYYYSLFFFFLLLLPTTTTLHHHHPHHRRLHIITNPLHLHLHLHHLLTTIKVLLHHLPLLILPITTNPLHHQRHILHLLTTT

SEQ ID NO: 8864 - protein, 56 aa, Glycine max
  peptide (1)..(56): Ceres Seq. ID no. 15219408
  misc_feature (1)..(52): NCBI GI NO: 18413291 NR Description: hydrolase, alpha/beta fold  family
  misc_feature (1)..(50): NCBI GI NO: 32479665 NR Description: P0041A24.6
  misc_feature (1)..(42): NCBI GI NO: 6560626 NR Description: PRO0750 [Homo sapiens]
  misc_feature (1)..(42): NCBI GI NO: 7706645 NR Description: protein phosphatase methylesterase-1
  misc_feature (1)..(42): NCBI GI NO: 20809834 NR Description: Protein phosphatase methylesterase 1
  misc_feature (1)..(42): NCBI GI NO: 7022606 NR Description: unnamed protein product [Homo sapiens]
  misc_feature (1)..(37): NCBI GI NO: 28277941 NR Description: Similar to RIKEN cDNA 2700017M01 gene
  misc_feature (1)..(38): NCBI GI NO: 17551890 NR Description: Predicted CDS, alpha beta hydrolase fold
  misc_feature (1)..(23): NCBI GI NO: 26345806 NR Description: unnamed protein product [Mus musculus]
  misc_feature (1)..(37): NCBI GI NO: 19112983 NR Description: putative methyltransferase
MQGKFQMVVVRHTGHAIQEDVPDEFATLIVNFISRNRIGPHGIEIPGLRKPAFSKP

SEQ ID NO: 8865 - DNA, 1266 bp, Glycine max
  misc_feature (1)..(1266): Ceres Seq. ID no. 14316075
atccgttacccttcctttcacaagtcataaaactcccttcacttgctctgaaattttcatgtatcactttcccttcactggttctattatcgttcttcttcttcactaagaatccaaaaaaaaatgaacgatcttatgacgaaatccttcaccagctacgtggagctgaagaaggtcgcaatgaaagaagacgttgatttggaagccggtggtcctggtgatcgcaaggtggaactgagctcttccacgacccacttggacacagacatgggcctcttcctagaagaggccgagaaggtgaaggccgagatggggtccctccgagacatcctgggccggctccagcaggccaacgaggagagcaagtccctccacaagcctgaagcccacaaggccctcagaagccgaatcaacgctgaaatccttgccgtactcaagaaggcccgggccatccggacccagctggaggagatggaccgcgccaatgccgccaacaggcgcctctccgccctcaaggacgggacccccgccatctaccggacccggattgctgtcaccaatggcctcaggaagaagctgaaggagctcatgatggactttcaggatctgaggcagaggatgatgactgagtacaaggatactgtgtgtagaaggtacttcacagttactggggagcacccagatgaggatgtgattgagaagatcatcgccaacgggaacgaggaagaggttcttgctaaggccatagaggaacacgggagagggaaggttctggataccgtgctggaaattcaggacaggcatgatgctgccaaggaggttgagaagagtctgcttgagctgcaccaggtgtttcttgacatggctgtcatggtggaggcacagggtgagaagatggacgacatcgagcatcacgtcttccacgcttcccactatgtcaaggatggaaccaagagtctccagagtgcaaaggagtaccagaagaggagcaggaagtggatgtgcattgggatcattcttctgctcattcttattctggttattgttattcctattgtcaccagtttaagcagttcttgagcttagtaaggaggagactttggatgatgatgatgatgattcttcttgactcatcgtgtttagagtgcttgatgggagataatgattcatctttttttcttttcctgcagatttgtttaattgttgttaaggtgttaccttaaccatgatttttctatctttgcgaaattgaaatataattcaatc

SEQ ID NO: 8866 - protein, 318 aa, Glycine max
  peptide (1)..(318): Ceres Seq. ID no. 14316076
  misc_feature (52)..(156): Pfam Name: Pfam Description:  Syntaxin
  misc_feature (1)..(318): NCBI GI NO: 5912543 NR Description: Knolle [Capsicum annuum]
  misc_feature (1)..(318): NCBI GI NO: 28974542 NR Description: knolle [Antirrhinum majus]
  misc_feature (1)..(318): NCBI GI NO: 15223261 NR Description: syntaxin of plants SYP111 (KNOLLE)
  misc_feature (1)..(318): NCBI GI NO: 29788865 NR Description: putative cytokinesis-specific syntaxin-relatedprotein
  misc_feature (11)..(264): NCBI GI NO: 25311687 NR Description: protein F22O13.4 [imported] - Arabidopsis thaliana
  misc_feature (1)..(318): NCBI GI NO: 15229865 NR Description: syntaxin of plants SYP121 [Arabidopsis thaliana]
  misc_feature (1)..(312): NCBI GI NO: 15236285 NR Description: syntaxin of plants SYP123 [Arabidopsis thaliana]
  misc_feature (36)..(311): NCBI GI NO: 4206787 NR Description: syntaxin-related protein Nt-syr1
  misc_feature (32)..(312): NCBI GI NO: 15220328 NR Description: syntaxin of plants SYP125 [Arabidopsis thaliana]
  misc_feature (14)..(310): NCBI GI NO: 15219900 NR Description: syntaxin of plants SYP124 [Arabidopsis thaliana]
MNDLMTKSFTSYVELKKVAMKEDVDLEAGGPGDRKVELSSSTTHLDTDMGLFLEEAEKVKAEMGSLRDILGRLQQANEESKSLHKPEAHKALRSRINAEILAVLKKARAIRTQLEEMDRANAANRRLSALKDGTPAIYRTRIAVTNGLRKKLKELMMDFQDLRQRMMTEYKDTVCRRYFTVTGEHPDEDVIEKIIANGNEEEVLAKAIEEHGRGKVLDTVLEIQDRHDAAKEVEKSLLELHQVFLDMAVMVEAQGEKMDDIEHHVFHASHYVKDGTKSLQSAKEYQKRSRKWMCIGIILLLILILVIVIPIVTSLSSS

SEQ ID NO: 8867 - protein, 314 aa, Glycine max
  peptide (1)..(314): Ceres Seq. ID no. 14316077
  misc_feature (48)..(152): Pfam Name: Pfam Description:  Syntaxin
  misc_feature (1)..(314): NCBI GI NO: 5912543 NR Description: Knolle [Capsicum annuum]
  misc_feature (1)..(314): NCBI GI NO: 28974542 NR Description: knolle [Antirrhinum majus]
  misc_feature (1)..(314): NCBI GI NO: 15223261 NR Description: syntaxin of plants SYP111 (KNOLLE)
  misc_feature (1)..(314): NCBI GI NO: 29788865 NR Description: putative cytokinesis-specific syntaxin-relatedprotein
  misc_feature (7)..(260): NCBI GI NO: 25311687 NR Description: protein F22O13.4 [imported] - Arabidopsis thaliana
  misc_feature (1)..(314): NCBI GI NO: 15229865 NR Description: syntaxin of plants SYP121 [Arabidopsis thaliana]
  misc_feature (1)..(308): NCBI GI NO: 15236285 NR Description: syntaxin of plants SYP123 [Arabidopsis thaliana]
  misc_feature (32)..(307): NCBI GI NO: 4206787 NR Description: syntaxin-related protein Nt-syr1
  misc_feature (28)..(308): NCBI GI NO: 15220328 NR Description: syntaxin of plants SYP125 [Arabidopsis thaliana]
  misc_feature (10)..(306): NCBI GI NO: 15219900 NR Description: syntaxin of plants SYP124 [Arabidopsis thaliana]
MTKSFTSYVELKKVAMKEDVDLEAGGPGDRKVELSSSTTHLDTDMGLFLEEAEKVKAEMGSLRDILGRLQQANEESKSLHKPEAHKALRSRINAEILAVLKKARAIRTQLEEMDRANAANRRLSALKDGTPAIYRTRIAVTNGLRKKLKELMMDFQDLRQRMMTEYKDTVCRRYFTVTGEHPDEDVIEKIIANGNEEEVLAKAIEEHGRGKVLDTVLEIQDRHDAAKEVEKSLLELHQVFLDMAVMVEAQGEKMDDIEHHVFHASHYVKDGTKSLQSAKEYQKRSRKWMCIGIILLLILILVIVIPIVTSLSSS

SEQ ID NO: 8868 - protein, 299 aa, Glycine max
  peptide (1)..(299): Ceres Seq. ID no. 14316078
  misc_feature (33)..(137): Pfam Name: Pfam Description:  Syntaxin
  misc_feature (1)..(299): NCBI GI NO: 5912543 NR Description: Knolle [Capsicum annuum]
  misc_feature (1)..(299): NCBI GI NO: 28974542 NR Description: knolle [Antirrhinum majus]
  misc_feature (1)..(299): NCBI GI NO: 15223261 NR Description: syntaxin of plants SYP111 (KNOLLE)
  misc_feature (1)..(299): NCBI GI NO: 29788865 NR Description: putative cytokinesis-specific syntaxin-relatedprotein
  misc_feature (1)..(245): NCBI GI NO: 25311687 NR Description: protein F22O13.4 [imported] - Arabidopsis thaliana
  misc_feature (1)..(299): NCBI GI NO: 15229865 NR Description: syntaxin of plants SYP121 [Arabidopsis thaliana]
  misc_feature (1)..(293): NCBI GI NO: 15236285 NR Description: syntaxin of plants SYP123 [Arabidopsis thaliana]
  misc_feature (17)..(292): NCBI GI NO: 4206787 NR Description: syntaxin-related protein Nt-syr1
  misc_feature (13)..(293): NCBI GI NO: 15220328 NR Description: syntaxin of plants SYP125 [Arabidopsis thaliana]
  misc_feature (1)..(291): NCBI GI NO: 15219900 NR Description: syntaxin of plants SYP124 [Arabidopsis thaliana]
MKEDVDLEAGGPGDRKVELSSSTTHLDTDMGLFLEEAEKVKAEMGSLRDILGRLQQANEESKSLHKPEAHKALRSRINAEILAVLKKARAIRTQLEEMDRANAANRRLSALKDGTPAIYRTRIAVTNGLRKKLKELMMDFQDLRQRMMTEYKDTVCRRYFTVTGEHPDEDVIEKIIANGNEEEVLAKAIEEHGRGKVLDTVLEIQDRHDAAKEVEKSLLELHQVFLDMAVMVEAQGEKMDDIEHHVFHASHYVKDGTKSLQSAKEYQKRSRKWMCIGIILLLILILVIVIPIVTSLSSS

SEQ ID NO: 8869 - DNA, 1290 bp, Glycine max
  misc_feature (1)..(1290): Ceres Seq. ID no. 14315193
attctattctctcgtgtctctctctctctctctgaaaccatgcctgtcacaaacacaacaacacctacagtggcagaacacatcaaatggagaaggcccagaaaccaattcaaccaccaccatcatcaccatcaccaccccatttcagaaacagatccaaaccctcaaatcccttccataatccaatccactaggtgcaagtccaccatttcctccctgctcctctccactttctccaacaacacctccaataatgccactgcccacagcaagaaaaaaagcaacttttctgcatcaaccttcagagggttgggctgcactgctggctcgtcgcagcaggtgtcggtgccggcggtgattcgctcctccgccgattggcaagggaagaaaacaagaaaaaagaagcacaagagaagcaacagaagcagcaagaacaagactttccatggtggggttctggaaggttccaatccagggtgtgtggattttcaagatgtttggtgtggccctggaattgggttctcaacagatgctgctgcctctgttgattgtgttgtggccaggaagaatgtctcttctgcaagagggaaaattgatgtggataagatcactcacagggagataatgatgcttcaagggagtctactaatgggtggacaactaaattcacatgatcatttcagagactggagactggatgttgataacatgtcctatgagcaattgctagagcttggtgagagaattggtcatgtgaacactggactcaaggaagatgagatgggacggaacataaggaagactaggattcaattttgggatgatacatcaaagcttcaagtagataaagagtgcagcatttgtcaggaggagtatgaagcgggtgatgagttggggaggctaaattgtgagcacagttatcactttcagtgtataaaacaatgggttgcacaaaaaaatttctgcccagtatgtaagcaacaagttgcggctcgacactgagtgactcaacccttctgtttttttggacagcttccattctcatccataaatttgtgtatagtttttcatatccaatacaagcaagagttttcattctttgctgtcaattatcatttcatctttcaaaattcctgcatcctctgcgaggaatcggcaattatatgttatcgagtaaaggtttatattcgggctgagacctttgcatattatacgcaagagttgccttgcttaagagcagttattattatttttttgttttgggtttttaatgaagttgtgtctgtgacc

SEQ ID NO: 8870 - protein, 333 aa, Glycine max
  peptide (1)..(333): Ceres Seq. ID no. 14315194
  misc_feature (285)..(325): Pfam Name: RING finger Pfam Description: Zinc finger, C3HC4 type
  misc_feature (41)..(226): NCBI GI NO: 15219544 NR Description: RING zinc finger protein -related
  misc_feature (207)..(326): NCBI GI NO: 15219544 NR Description: RING zinc finger protein -related
  misc_feature (201)..(327): NCBI GI NO: 15220912 NR Description: zinc-finger protein (C-terminal) -related
  misc_feature (201)..(327): NCBI GI NO: 21554695 NR Description: zinc-finger protein (C-terminal), putative
  misc_feature (88)..(302): NCBI GI NO: 34911396 NR Description: RING zinc finger protein-like
  misc_feature (289)..(329): NCBI GI NO: 34911396 NR Description: RING zinc finger protein-like
  misc_feature (210)..(327): NCBI GI NO: 25511721 NR Description: F2H15.19 protein - Arabidopsis thaliana
  misc_feature (201)..(326): NCBI GI NO: 10129643 NR Description: Pspzf zinc finger protein-like
  misc_feature (201)..(326): NCBI GI NO: 20466428 NR Description: Pspzf zinc finger protein-like
  misc_feature (201)..(326): NCBI GI NO: 22326712 NR Description: Pspzf zinc finger protein - like
ILFSRVSLSLSETMPVTNTTTPTVAEHIKWRRPRNQFNHHHHHHHHPISETDPNPQIPSIIQSTRCKSTISSLLLSTFSNNTSNNATAHSKKKSNFSASTFRGLGCTAGSSQQVSVPAVIRSSADWQGKKTRKKKHKRSNRSSKNKTFHGGVLEGSNPGCVDFQDVWCGPGIGFSTDAAASVDCVVARKNVSSARGKIDVDKITHREIMMLQGSLLMGGQLNSHDHFRDWRLDVDNMSYEQLLELGERIGHVNTGLKEDEMGRNIRKTRIQFWDDTSKLQVDKECSICQEEYEAGDELGRLNCEHSYHFQCIKQWVAQKNFCPVCKQQVAARH

SEQ ID NO: 8871 - protein, 320 aa, Glycine max
  peptide (1)..(320): Ceres Seq. ID no. 14315195
  misc_feature (272)..(312): Pfam Name: RING finger Pfam Description: Zinc finger, C3HC4 type
  misc_feature (28)..(213): NCBI GI NO: 15219544 NR Description: RING zinc finger protein -related
  misc_feature (194)..(313): NCBI GI NO: 15219544 NR Description: RING zinc finger protein -related
  misc_feature (188)..(314): NCBI GI NO: 15220912 NR Description: zinc-finger protein (C-terminal) -related
  misc_feature (188)..(314): NCBI GI NO: 21554695 NR Description: zinc-finger protein (C-terminal), putative
  misc_feature (75)..(289): NCBI GI NO: 34911396 NR Description: RING zinc finger protein-like
  misc_feature (276)..(316): NCBI GI NO: 34911396 NR Description: RING zinc finger protein-like
  misc_feature (197)..(314): NCBI GI NO: 25511721 NR Description: F2H15.19 protein - Arabidopsis thaliana
  misc_feature (188)..(313): NCBI GI NO: 10129643 NR Description: Pspzf zinc finger protein-like
  misc_feature (188)..(313): NCBI GI NO: 20466428 NR Description: Pspzf zinc finger protein-like
  misc_feature (188)..(313): NCBI GI NO: 22326712 NR Description: Pspzf zinc finger protein - like
MPVTNTTTPTVAEHIKWRRPRNQFNHHHHHHHHPISETDPNPQIPSIIQSTRCKSTISSLLLSTFSNNTSNNATAHSKKKSNFSASTFRGLGCTAGSSQQVSVPAVIRSSADWQGKKTRKKKHKRSNRSSKNKTFHGGVLEGSNPGCVDFQDVWCGPGIGFSTDAAASVDCVVARKNVSSARGKIDVDKITHREIMMLQGSLLMGGQLNSHDHFRDWRLDVDNMSYEQLLELGERIGHVNTGLKEDEMGRNIRKTRIQFWDDTSKLQVDKECSICQEEYEAGDELGRLNCEHSYHFQCIKQWVAQKNFCPVCKQQVAARH

SEQ ID NO: 8872 - DNA, 1227 bp, Glycine max
  misc_feature (1)..(1227): Ceres Seq. ID no. 14316378
gttctatttttccgctctgctgtacatggcgtcggctgcaggtgaggggaggagccgggtgctggtgataggcggcacgggctacatcggccgcttcatcgtcgccgccagcgcacgcgagggccaccccaccgccgtcctcgtccgcgacgccgcgcccgccgacccagccaaggccgccgtcctccagggattccgggatgccggcgtcaccatcgtcaagggtgatatgtatgatcatgagagcctggtgacagccattaaatcagcagatgttgtgatctcggccgtaggttatcaacagctaccggatcaaactctcattatctcggcaattaaggaagttgggcatgtaaagagattcttcccatcagagtatggtaatgatgtggatcgtaaccatgcagttgaacctgcaaagacagtattcggtgggaaagctcgtataaggcgtgccattgaggctgaggggattccctacacatatgtctcttccaacttctttgctggtcgtttcttgcgaagccttgcgcagattgggatcatggagcctccaactgagaaggttctcattatgggtgatggaaatgtaaaaggaatctttgcggcggaagaagacgtgggaacctacactattaaagctgtagatgatccaaggaccctgaacaaaattctgtatctgagaccacgaagcaacactttgtcccataacgagcttgtctcactctgggagaagaaacttggtaagacacttgagagggtgtacctcccagaggacgaactcctgaataagattcaagagtcgtcagcgccgctgaatgtagcactggcaatcagccactctgtctggttgaagggggaccacactaactttgagatcgacccatcatttggagttgaagcaactgagctttaccccgatgtgcattatattaccgtggatgaatacctaaataggttcctttaaactcctaaatcctatcgtccccaatattcatatactttgaataagtgttggaggttgtgtatttttattagaatggcacgtgaattacgtaatcagagtgtgagacctcaatcatgtgaggaatgcatcttgcattcccttgagcttagaatatataaactgaggttgtataaatttggaaattttagcttgatggaacatgataccgtatgtaacagcccgggggtttatgccaaattagaaattgtttgttatttaac

SEQ ID NO: 8873 - protein, 321 aa, Glycine max
  peptide (1)..(321): Ceres Seq. ID no. 14316379
  misc_feature (17)..(321): Pfam Name: Pfam Description:  Isoflavone reductase
  misc_feature (17)..(321): NCBI GI NO: 3243234 NR Description: isoflavone reductase related protein
  misc_feature (13)..(321): NCBI GI NO: 6573171 NR Description: isoflavone reductase homolog 2 [Glycine max]
  misc_feature (17)..(321): NCBI GI NO: 10764491 NR Description: allergenic isoflavone reductase-like protein Bet v6
  misc_feature (17)..(313): NCBI GI NO: 4731376 NR Description: isoflavone reductase homolog Bet v 6.0101
  misc_feature (17)..(313): NCBI GI NO: 7484603 NR Description: 2'-hydroxyisoflavone reductase (EC 1
  misc_feature (17)..(321): NCBI GI NO: 7578895 NR Description: phenylcoumaran benzylic ether reductase homolog Fi1
  misc_feature (17)..(321): NCBI GI NO: 7578897 NR Description: phenylcoumaran benzylic ether reductase homolog Fi2
  misc_feature (16)..(321): NCBI GI NO: 1708422 NR Description: ISOFLAVONE REDUCTASE HOMOLOG (CP100)
  misc_feature (17)..(321): NCBI GI NO: 15234993 NR Description: isoflavone reductase, putative
  misc_feature (17)..(321): NCBI GI NO: 19310585 NR Description: putative NAD
FYFSALLYMASAAGEGRSRVLVIGGTGYIGRFIVAASAREGHPTAVLVRDAAPADPAKAAVLQGFRDAGVTIVKGDMYDHESLVTAIKSADVVISAVGYQQLPDQTLIISAIKEVGHVKRFFPSEYGNDVDRNHAVEPAKTVFGGKARIRRAIEAEGIPYTYVSSNFFAGRFLRSLAQIGIMEPPTEKVLIMGDGNVKGIFAAEEDVGTYTIKAVDDPRTLNKILYLRPRSNTLSHNELVSLWEKKLGKTLERVYLPEDELLNKIQESSAPLNVALAISHSVWLKGDHTNFEIDPSFGVEATELYPDVHYITVDEYLNRFL

SEQ ID NO: 8874 - protein, 313 aa, Glycine max
  peptide (1)..(313): Ceres Seq. ID no. 14316380
  misc_feature (9)..(313): Pfam Name: Pfam Description:  Isoflavone reductase
  misc_feature (9)..(313): NCBI GI NO: 3243234 NR Description: isoflavone reductase related protein
  misc_feature (5)..(313): NCBI GI NO: 6573171 NR Description: isoflavone reductase homolog 2 [Glycine max]
  misc_feature (9)..(313): NCBI GI NO: 10764491 NR Description: allergenic isoflavone reductase-like protein Bet v6
  misc_feature (9)..(305): NCBI GI NO: 4731376 NR Description: isoflavone reductase homolog Bet v 6.0101
  misc_feature (9)..(305): NCBI GI NO: 7484603 NR Description: 2'-hydroxyisoflavone reductase (EC 1
  misc_feature (9)..(313): NCBI GI NO: 7578895 NR Description: phenylcoumaran benzylic ether reductase homolog Fi1
  misc_feature (9)..(313): NCBI GI NO: 7578897 NR Description: phenylcoumaran benzylic ether reductase homolog Fi2
  misc_feature (8)..(313): NCBI GI NO: 1708422 NR Description: ISOFLAVONE REDUCTASE HOMOLOG (CP100)
  misc_feature (9)..(313): NCBI GI NO: 15234993 NR Description: isoflavone reductase, putative
  misc_feature (9)..(313): NCBI GI NO: 19310585 NR Description: putative NAD
MASAAGEGRSRVLVIGGTGYIGRFIVAASAREGHPTAVLVRDAAPADPAKAAVLQGFRDAGVTIVKGDMYDHESLVTAIKSADVVISAVGYQQLPDQTLIISAIKEVGHVKRFFPSEYGNDVDRNHAVEPAKTVFGGKARIRRAIEAEGIPYTYVSSNFFAGRFLRSLAQIGIMEPPTEKVLIMGDGNVKGIFAAEEDVGTYTIKAVDDPRTLNKILYLRPRSNTLSHNELVSLWEKKLGKTLERVYLPEDELLNKIQESSAPLNVALAISHSVWLKGDHTNFEIDPSFGVEATELYPDVHYITVDEYLNRFL

SEQ ID NO: 8875 - protein, 245 aa, Glycine max
  peptide (1)..(245): Ceres Seq. ID no. 14316381
  misc_feature (1)..(245): Pfam Name: Pfam Description:  Isoflavone reductase
  misc_feature (1)..(245): NCBI GI NO: 3243234 NR Description: isoflavone reductase related protein
  misc_feature (1)..(245): NCBI GI NO: 6573171 NR Description: isoflavone reductase homolog 2 [Glycine max]
  misc_feature (1)..(245): NCBI GI NO: 10764491 NR Description: allergenic isoflavone reductase-like protein Bet v6
  misc_feature (1)..(237): NCBI GI NO: 4731376 NR Description: isoflavone reductase homolog Bet v 6.0101
  misc_feature (1)..(237): NCBI GI NO: 7484603 NR Description: 2'-hydroxyisoflavone reductase (EC 1
  misc_feature (1)..(245): NCBI GI NO: 7578895 NR Description: phenylcoumaran benzylic ether reductase homolog Fi1
  misc_feature (1)..(245): NCBI GI NO: 7578897 NR Description: phenylcoumaran benzylic ether reductase homolog Fi2
  misc_feature (1)..(245): NCBI GI NO: 1708422 NR Description: ISOFLAVONE REDUCTASE HOMOLOG (CP100)
  misc_feature (1)..(245): NCBI GI NO: 15234993 NR Description: isoflavone reductase, putative
  misc_feature (1)..(245): NCBI GI NO: 19310585 NR Description: putative NAD
MYDHESLVTAIKSADVVISAVGYQQLPDQTLIISAIKEVGHVKRFFPSEYGNDVDRNHAVEPAKTVFGGKARIRRAIEAEGIPYTYVSSNFFAGRFLRSLAQIGIMEPPTEKVLIMGDGNVKGIFAAEEDVGTYTIKAVDDPRTLNKILYLRPRSNTLSHNELVSLWEKKLGKTLERVYLPEDELLNKIQESSAPLNVALAISHSVWLKGDHTNFEIDPSFGVEATELYPDVHYITVDEYLNRFL

SEQ ID NO: 8876 - DNA, 1341 bp, Glycine max
  misc_feature (1)..(1341): Ceres Seq. ID no. 15171708
aaagactaatattctcattctccccaaaacctctgctagtttttggttttgcttcaacaccctcgtcctccttcttcttcacactcccccagaaatcccaattttgcccctaccctcttccccaatttacctacgatgtacagcaacatgctggtcaactgctccaactgccgcacccctctgcagctgccacctggcgcgggatccatccgctgcgccctctgccgcgctgtcactctcatcggcgatccacgcgccctcccttcgcagccaccggcctccacccacgcgcctcctcctccgtcctctccctacagccacgcgccgcccccgcccaacccccacggccgcaagaaggccgtcatcgtcggcatctcctaccgcttctcgcgacacgagctcaagggatgcatcaacgacgccaagtgcatgaagtacctcctcatcaacaagttcagctttccagaatcttccatcatcatgctcaccgaagaagaagatccccatggccccaaatttccaacgaagcacaacatcaggatggcaatgtattggcttgcacaaggatgtcaacctggagactccctggtttttcattattctggtcatggatcacagcaaaggaactatagtggtgatgaagctgatggatatgatgaaactctatgtccccttgattttgaaacacagggtatgattgtagatgatgagatcaatgccgcacttgttagacctattcctcatggagctaagctacatgcactaattgatgcctgccatagtggcactgttctagatttgccatttctttgcagaatgaacaggagtgggcaatatgtatgggaggaccatcgccctagatccggtgtatggaagggatctagtggtggagaagttatctgcttcagtggatgcgacgatcatcaaacttcagctgatacatctgctctatcaaaaattacatcgactggggcaatgacattttgcttcatccaagccatagagcgtggccatggggctacctatggcagcattcttactgcaatgcgcacttccatcagaaatgttggcggcggcggcggcggtaccgggggtggtgatgtggtaacatcccttctctccatgcttttgactggagggagtctcagcggtgtcggtggactgggacaggaaccacagttaacagcttgcgaagcatttgatgtgcatagaaaacctttttcattatgatactcaatattctttattctgcaatttgttttcctaggctctgcccctgtatacgactacattgattacaatgattaatatattataaagtagagaggattcttttttcgc

SEQ ID NO: 8877 - protein, 364 aa, Glycine max
  peptide (1)..(364): Ceres Seq. ID no. 15171709
  misc_feature (73)..(364): Pfam Name: Pfam Description:  Caspase domain
  misc_feature (1)..(364): NCBI GI NO: 30678252 NR Description: expressed protein [Arabidopsis thaliana]
  misc_feature (43)..(364): NCBI GI NO: 37536924 NR Description: hypothetical protein
  misc_feature (39)..(364): NCBI GI NO: 32482814 NR Description: metacaspase 2 [Arabidopsis thaliana]
  misc_feature (5)..(69): NCBI GI NO: 32482814 NR Description: metacaspase 2 [Arabidopsis thaliana]
  misc_feature (1)..(343): NCBI GI NO: 3258570 NR Description: Unknown protein [Arabidopsis thaliana]
  misc_feature (39)..(364): NCBI GI NO: 30686772 NR Description: expressed protein [Arabidopsis thaliana]
  misc_feature (5)..(69): NCBI GI NO: 30686772 NR Description: expressed protein [Arabidopsis thaliana]
  misc_feature (39)..(336): NCBI GI NO: 7485453 NR Description: hypothetical protein F13M23
  misc_feature (5)..(69): NCBI GI NO: 7485453 NR Description: hypothetical protein F13M23
  misc_feature (52)..(309): NCBI GI NO: 11358463 NR Description: hypothetical protein
MYSNMLVNCSNCRTPLQLPPGAGSIRCALCRAVTLIGDPRALPSQPPASTHAPPPPSSPYSHAPPPPNPHGRKKAVIVGISYRFSRHELKGCINDAKCMKYLLINKFSFPESSIIMLTEEEDPHGPKFPTKHNIRMAMYWLAQGCQPGDSLVFHYSGHGSQQRNYSGDEADGYDETLCPLDFETQGMIVDDEINAALVRPIPHGAKLHALIDACHSGTVLDLPFLCRMNRSGQYVWEDHRPRSGVWKGSSGGEVICFSGCDDHQTSADTSALSKITSTGAMTFCFIQAIERGHGATYGSILTAMRTSIRNVGGGGGGTGGGDVVTSLLSMLLTGGSLSGVGGLGQEPQLTACEAFDVHRKPFSL

SEQ ID NO: 8878 - protein, 360 aa, Glycine max
  peptide (1)..(360): Ceres Seq. ID no. 15171710
  misc_feature (69)..(360): Pfam Name: Pfam Description:  Caspase domain
  misc_feature (1)..(360): NCBI GI NO: 30678252 NR Description: expressed protein [Arabidopsis thaliana]
  misc_feature (39)..(360): NCBI GI NO: 37536924 NR Description: hypothetical protein
  misc_feature (35)..(360): NCBI GI NO: 32482814 NR Description: metacaspase 2 [Arabidopsis thaliana]
  misc_feature (1)..(65): NCBI GI NO: 32482814 NR Description: metacaspase 2 [Arabidopsis thaliana]
  misc_feature (1)..(339): NCBI GI NO: 3258570 NR Description: Unknown protein [Arabidopsis thaliana]
  misc_feature (35)..(360): NCBI GI NO: 30686772 NR Description: expressed protein [Arabidopsis thaliana]
  misc_feature (1)..(65): NCBI GI NO: 30686772 NR Description: expressed protein [Arabidopsis thaliana]
  misc_feature (35)..(332): NCBI GI NO: 7485453 NR Description: hypothetical protein F13M23
  misc_feature (1)..(65): NCBI GI NO: 7485453 NR Description: hypothetical protein F13M23
  misc_feature (48)..(305): NCBI GI NO: 11358463 NR Description: hypothetical protein
MLVNCSNCRTPLQLPPGAGSIRCALCRAVTLIGDPRALPSQPPASTHAPPPPSSPYSHAPPPPNPHGRKKAVIVGISYRFSRHELKGCINDAKCMKYLLINKFSFPESSIIMLTEEEDPHGPKFPTKHNIRMAMYWLAQGCQPGDSLVFHYSGHGSQQRNYSGDEADGYDETLCPLDFETQGMIVDDEINAALVRPIPHGAKLHALIDACHSGTVLDLPFLCRMNRSGQYVWEDHRPRSGVWKGSSGGEVICFSGCDDHQTSADTSALSKITSTGAMTFCFIQAIERGHGATYGSILTAMRTSIRNVGGGGGGTGGGDVVTSLLSMLLTGGSLSGVGGLGQEPQLTACEAFDVHRKPFSL

SEQ ID NO: 8879 - protein, 266 aa, Glycine max
  peptide (1)..(266): Ceres Seq. ID no. 15171711
  misc_feature (1)..(266): Pfam Name: Pfam Description:  Caspase domain
  misc_feature (1)..(266): NCBI GI NO: 30678252 NR Description: expressed protein [Arabidopsis thaliana]
  misc_feature (1)..(266): NCBI GI NO: 37536924 NR Description: hypothetical protein
  misc_feature (1)..(266): NCBI GI NO: 32482814 NR Description: metacaspase 2 [Arabidopsis thaliana]
  misc_feature (1)..(245): NCBI GI NO: 3258570 NR Description: Unknown protein [Arabidopsis thaliana]
  misc_feature (1)..(266): NCBI GI NO: 30686772 NR Description: expressed protein [Arabidopsis thaliana]
  misc_feature (1)..(238): NCBI GI NO: 7485453 NR Description: hypothetical protein F13M23
  misc_feature (1)..(211): NCBI GI NO: 11358463 NR Description: hypothetical protein
  misc_feature (1)..(211): NCBI GI NO: 15237654 NR Description: expressed protein [Arabidopsis thaliana]
  misc_feature (1)..(211): NCBI GI NO: 37788549 NR Description: metacaspase 3 [Arabidopsis thaliana]
  misc_feature (1)..(171): NCBI GI NO: 30697974 NR Description: expressed protein [Arabidopsis thaliana]
MKYLLINKFSFPESSIIMLTEEEDPHGPKFPTKHNIRMAMYWLAQGCQPGDSLVFHYSGHGSQQRNYSGDEADGYDETLCPLDFETQGMIVDDEINAALVRPIPHGAKLHALIDACHSGTVLDLPFLCRMNRSGQYVWEDHRPRSGVWKGSSGGEVICFSGCDDHQTSADTSALSKITSTGAMTFCFIQAIERGHGATYGSILTAMRTSIRNVGGGGGGTGGGDVVTSLLSMLLTGGSLSGVGGLGQEPQLTACEAFDVHRKPFSL

SEQ ID NO: 8880 - DNA, 809 bp, Glycine max
  misc_feature (1)..(809): Ceres Seq. ID no. 15168553
atcctcatccaaattatcccatcatacctttactttaccccacccaaagcgaaaaaaaaaaggattcaaacatatttgccttatacaattcaaatggcacacacaaaagtggatatgggtttggttttggtggtaatggccatgctatgcgcaggagctgcagctcaatctcaatcgagttgcacaaatgtgttagtgagcctgtcaccgtgccttaactatatcacagggaattcttcaaccccatcttcaggatgctgctcacagcttgccagtgtggtgcgctcacaaccacaatgcctatgtcaggttcttagcggcggtggatcatcactggggatcaacattaaccaaactcaggctctggctttgcctgttgcttgcaaggtgcagaccccacccaccagtcaatgtaacaatgctgctgcttcaccaccaacaggaacagttgcggaatctccaaattcagctccatcaggaaccggaggatccaaaaacctacccacaactgataatggctcatccagcgggaattccatcaagttatcgattcctctgatacttattttggcagcaacatacgtgtcaactttcacaacatactgattctatattcggtcgattttccatttgctattttttgcttgtttgccaattgtccttgtttaatcatttgctattattgagcttccttagtctgaagggttcaatctattcattcgtgacccctactgggatacattgttttgtataatctgagacatgtgttctctcatttatcaataaaatgggttgtaacttggtttgct

SEQ ID NO: 8881 - protein, 201 aa, Glycine max
  peptide (1)..(201): Ceres Seq. ID no. 15168554
  misc_feature (61)..(138): Pfam Name: Pfam Description:  Protease inhibitor/seed storage/LTP family
  misc_feature (36)..(198): NCBI GI NO: 18403453 NR Description: protease inhibitor/seed storage/lipid transfer
  misc_feature (37)..(198): NCBI GI NO: 24417478 NR Description: unknown [Arabidopsis thaliana]
  misc_feature (39)..(198): NCBI GI NO: 21554014 NR Description: unknown [Arabidopsis thaliana]
  misc_feature (42)..(192): NCBI GI NO: 25553595 NR Description: OJ1656_E11.26
  misc_feature (36)..(196): NCBI GI NO: 21592722 NR Description: unknown [Arabidopsis thaliana]
  misc_feature (43)..(194): NCBI GI NO: 25553602 NR Description: OJ1656_E11.34
  misc_feature (36)..(196): NCBI GI NO: 18414320 NR Description: protease inhibitor/seed storage/lipid transfer
  misc_feature (41)..(195): NCBI GI NO: 28269454 NR Description: putative protease inhibitor
  misc_feature (43)..(195): NCBI GI NO: 21592774 NR Description: unknown [Arabidopsis thaliana]
  misc_feature (43)..(195): NCBI GI NO: 18407534 NR Description: protease inhibitor/seed storage/lipid transfer
ILIQIIPSYLYFTPPKAKKKRIQTYLPYTIQMAHTKVDMGLVLVVMAMLCAGAAAQSQSSCTNVLVSLSPCLNYITGNSSTPSSGCCSQLASVVRSQPQCLCQVLSGGGSSLGININQTQALALPVACKVQTPPTSQCNNAAASPPTGTVAESPNSAPSGTGGSKNLPTTDNGSSSGNSIKLSIPLILILAATYVSTFTTY

SEQ ID NO: 8882 - protein, 170 aa, Glycine max
  peptide (1)..(170): Ceres Seq. ID no. 15168555
  misc_feature (30)..(107): Pfam Name: Pfam Description:  Protease inhibitor/seed storage/LTP family
  misc_feature (5)..(167): NCBI GI NO: 18403453 NR Description: protease inhibitor/seed storage/lipid transfer
  misc_feature (6)..(167): NCBI GI NO: 24417478 NR Description: unknown [Arabidopsis thaliana]
  misc_feature (8)..(167): NCBI GI NO: 21554014 NR Description: unknown [Arabidopsis thaliana]
  misc_feature (11)..(161): NCBI GI NO: 25553595 NR Description: OJ1656_E11.26
  misc_feature (5)..(165): NCBI GI NO: 21592722 NR Description: unknown [Arabidopsis thaliana]
  misc_feature (12)..(163): NCBI GI NO: 25553602 NR Description: OJ1656_E11.34
  misc_feature (5)..(165): NCBI GI NO: 18414320 NR Description: protease inhibitor/seed storage/lipid transfer
  misc_feature (10)..(164): NCBI GI NO: 28269454 NR Description: putative protease inhibitor
  misc_feature (12)..(164): NCBI GI NO: 21592774 NR Description: unknown [Arabidopsis thaliana]
  misc_feature (12)..(164): NCBI GI NO: 18407534 NR Description: protease inhibitor/seed storage/lipid transfer
MAHTKVDMGLVLVVMAMLCAGAAAQSQSSCTNVLVSLSPCLNYITGNSSTPSSGCCSQLASVVRSQPQCLCQVLSGGGSSLGININQTQALALPVACKVQTPPTSQCNNAAASPPTGTVAESPNSAPSGTGGSKNLPTTDNGSSSGNSIKLSIPLILILAATYVSTFTTY

SEQ ID NO: 8883 - protein, 163 aa, Glycine max
  peptide (1)..(163): Ceres Seq. ID no. 15168556
  misc_feature (23)..(100): Pfam Name: Pfam Description:  Protease inhibitor/seed storage/LTP family
  misc_feature (1)..(160): NCBI GI NO: 18403453 NR Description: protease inhibitor/seed storage/lipid transfer
  misc_feature (1)..(160): NCBI GI NO: 24417478 NR Description: unknown [Arabidopsis thaliana]
  misc_feature (1)..(160): NCBI GI NO: 21554014 NR Description: unknown [Arabidopsis thaliana]
  misc_feature (4)..(154): NCBI GI NO: 25553595 NR Description: OJ1656_E11.26
  misc_feature (1)..(158): NCBI GI NO: 21592722 NR Description: unknown [Arabidopsis thaliana]
  misc_feature (5)..(156): NCBI GI NO: 25553602 NR Description: OJ1656_E11.34
  misc_feature (1)..(158): NCBI GI NO: 18414320 NR Description: protease inhibitor/seed storage/lipid transfer
  misc_feature (3)..(157): NCBI GI NO: 28269454 NR Description: putative protease inhibitor
  misc_feature (5)..(157): NCBI GI NO: 21592774 NR Description: unknown [Arabidopsis thaliana]
  misc_feature (5)..(157): NCBI GI NO: 18407534 NR Description: protease inhibitor/seed storage/lipid transfer
MGLVLVVMAMLCAGAAAQSQSSCTNVLVSLSPCLNYITGNSSTPSSGCCSQLASVVRSQPQCLCQVLSGGGSSLGININQTQALALPVACKVQTPPTSQCNNAAASPPTGTVAESPNSAPSGTGGSKNLPTTDNGSSSGNSIKLSIPLILILAATYVSTFTTY

SEQ ID NO: 8884 - DNA, 1107 bp, Glycine max
  misc_feature (1)..(1107): Ceres Seq. ID no. 14316459
atctctcataattgaaactaagctacctaccattctttcccattcctgagtttccattgccgcgacatctgaattcctccttgtcactcataatcaccaaatagaagccataaacaaatgaatgccatagcagcagaacaagtgctggagccatggcacaagctagacgacaaagtcgttttggtgacgggtgcttcctcggggctcgggcgagatttctgcatcgacctcgccaaagctggctgctgtgtcgtcgcggcagctcgtcgcctcgatcgcctcacttccctctgccacgaaatcaaccaccgatggccctcgaacgtcggaatccaccgcgcggtggcggtggagcttgatgtcgccgccgatggccccgccatcgacagggctgtgcagaaggcctgggacgcctttggccgcgttgattccttgattaacaacgctggtgtcagaggaagtgttaaatcacccttgaaattgtctgaagaggaatgggatcatgtcttcaagactaacctaactggttgttggttggtgtcaaaatatgtatgcaaacgcatgtgtgatatccagcttaagggatcaattattaatatttcttcagtttctggtttaaatcgggggcaattgcctggagctgctgcatatgcatcttcgaaggcaggggtaaacatgctgactaaggtcatggctatggaattggggatgcacaaaattagagtaaattccatatcccctggaattttcaaatctgaaataactgaaaatttattacaaaaagattggctgaatgatgtggtcaggaaaataatgcctttgagaagattaggtacttcagatccagcattaacatctctagctcgttatcttattcatgattcttctgagtacgtcacgggcaacaattttattgtcgattatggaggcaccttaccaggtgtaccaatttattcttctctgtaaattttggtacattatgcactaacgaaaagtaatactatgaattattccattacatatcttcaaattagacaatatggagttctgaagtctatgtatatggagaattattgtgaagtggctaccaccttgatcttaccatgt

SEQ ID NO: 8885 - protein, 282 aa, Glycine max
  peptide (1)..(282): Ceres Seq. ID no. 14316460
  misc_feature (10)..(282): NCBI GI NO: 13549123 NR Description: putative short-chain type alcohol dehydrogenase
  misc_feature (12)..(282): NCBI GI NO: 28411870 NR Description: putative 3-ketoacyl-acyl carrier protein reductase
  misc_feature (10)..(282): NCBI GI NO: 23451057 NR Description: putative short-chain type alcohol dehydrogenase
  misc_feature (8)..(282): NCBI GI NO: 11250516 NR Description: oxidoreductase-like protein - Arabidopsis thaliana
  misc_feature (8)..(282): NCBI GI NO: 18410245 NR Description: short-chain dehydrogenase/reductase family protein
  misc_feature (10)..(282): NCBI GI NO: 15222406 NR Description: short-chain dehydrogenase/reductase family protein
  misc_feature (10)..(282): NCBI GI NO: 15231362 NR Description: short-chain dehydrogenase/reductase family protein
  misc_feature (10)..(282): NCBI GI NO: 15221517 NR Description: short-chain dehydrogenase/reductase family protein
  misc_feature (10)..(282): NCBI GI NO: 15233243 NR Description: short-chain dehydrogenase/reductase family protein
  misc_feature (15)..(282): NCBI GI NO: 18398539 NR Description: short-chain dehydrogenase/reductase family protein
MNAIAAEQVLEPWHKLDDKVVLVTGASSGLGRDFCIDLAKAGCCVVAAARRLDRLTSLCHEINHRWPSNVGIHRAVAVELDVAADGPAIDRAVQKAWDAFGRVDSLINNAGVRGSVKSPLKLSEEEWDHVFKTNLTGCWLVSKYVCKRMCDIQLKGSIINISSVSGLNRGQLPGAAAYASSKAGVNMLTKVMAMELGMHKIRVNSISPGIFKSEITENLLQKDWLNDVVRKIMPLRRLGTSDPALTSLARYLIHDSSEYVTGNNFIVDYGGTLPGVPIYSSL

SEQ ID NO: 8886 - DNA, 1260 bp, Glycine max
  misc_feature (1)..(1260): Ceres Seq. ID no. 14316336
attttcactaaactaacttcctcaaatcaattacaatttttggacattttctctctcaaccctccaacaatattcccttctctctcatcattctcatgacataatcacatcacacaattgatttcctcaattacttctaatccacaatcaaatagcgcagcatggaagaatctgcgccccaacccaaaccaatcttacagaaaccccccggttaccgggaccccaactccaaaccgccaccacctcctcctcgaaagctcatgctgcccccccccttccagcccaaacggaagcgtcgcaacttctgccgcatatgctgctgtaccttctgcatcctcatcctcatcctcctccttgtgctcgttatcgccgccgctctcttctacctcatctacgacccctccctccctgagtttcacctcggctccttccgcgtccccaaacttaacgtcaccaatgccgccgacggggcctacctggctgccgacacggccgcacgtgtcgaggtcaagaaccgcagcggcaggatgtcgtggcatttctcccagagccgcttctcggtttcggcggagaacggggacctgaatctggggtccacgaaggtggccgggttcacggtgaaggagaagggcgtgaccgagctgaaggcggagacgagcgtaaaggagctggcattgaatgagaagcagaggagaaggcttaagagcgctgtggagagcaaagcgttggtccccaccgtggaggttcgaaccaaaaccggtgttggcttggagggttggaactcaccctccatctccgtcactgtcgtctgcggagatgccaccgtgagacaactcgataaaggagaccctcccctttgctccatcactctcctcaaatggatcaaaatacgatgagttggggatgtgttctgccagattgatgtccactgcgcgccatttagatcgaggtgaagattttgtgcgcttgtatctaaattatttttatattcttcttttttctctttacaaagtaaaggaagaatgaaaatgtaaattctttgcttagaaaaaagaaaagagtctcttctacagcagatcaacttgctgctggttctcccaaatgcgatgtgggatgcacataagaccaatacgtgaggttgtatttatcaaatatttattgttttttatgtggctggtgatcgtaggaatcgtaagtactcgagaaaatgttctctgtctttctctttttaataagaagaaaaccacaatgtgatgaggc

SEQ ID NO: 8887 - protein, 244 aa, Glycine max
  peptide (1)..(244): Ceres Seq. ID no. 14316337
  misc_feature (7)..(243): NCBI GI NO: 25408980 NR Description: hypothetical protein At2g46300
  misc_feature (7)..(244): NCBI GI NO: 26449684 NR Description: unknown protein [Arabidopsis thaliana]
  misc_feature (7)..(244): NCBI GI NO: 30690312 NR Description: expressed protein [Arabidopsis thaliana]
  misc_feature (2)..(240): NCBI GI NO: 25518342 NR Description: hypothetical protein F22L4.1
  misc_feature (9)..(240): NCBI GI NO: 15234066 NR Description: hypothetical protein [Arabidopsis thaliana]
  misc_feature (14)..(230): NCBI GI NO: 34914304 NR Description: B1151A10.19
  misc_feature (6)..(231): NCBI GI NO: 34903552 NR Description: P0001B06.28
  misc_feature (6)..(232): NCBI GI NO: 15239804 NR Description: expressed protein [Arabidopsis thaliana]
  misc_feature (6)..(232): NCBI GI NO: 21536796 NR Description: unknown [Arabidopsis thaliana]
  misc_feature (2)..(225): NCBI GI NO: 18401317 NR Description: expressed protein [Arabidopsis thaliana]
MEESAPQPKPILQKPPGYRDPNSKPPPPPPRKLMLPPPFQPKRKRRNFCRICCCTFCILILILLLVLVIAAALFYLIYDPSLPEFHLGSFRVPKLNVTNAADGAYLAADTAARVEVKNRSGRMSWHFSQSRFSVSAENGDLNLGSTKVAGFTVKEKGVTELKAETSVKELALNEKQRRRLKSAVESKALVPTVEVRTKTGVGLEGWNSPSISVTVVCGDATVRQLDKGDPPLCSITLLKWIKIR

SEQ ID NO: 8888 - protein, 211 aa, Glycine max
  peptide (1)..(211): Ceres Seq. ID no. 14316338
  misc_feature (1)..(210): NCBI GI NO: 25408980 NR Description: hypothetical protein At2g46300
  misc_feature (1)..(211): NCBI GI NO: 26449684 NR Description: unknown protein [Arabidopsis thaliana]
  misc_feature (1)..(211): NCBI GI NO: 30690312 NR Description: expressed protein [Arabidopsis thaliana]
  misc_feature (1)..(207): NCBI GI NO: 25518342 NR Description: hypothetical protein F22L4.1
  misc_feature (1)..(207): NCBI GI NO: 15234066 NR Description: hypothetical protein [Arabidopsis thaliana]
  misc_feature (1)..(197): NCBI GI NO: 34914304 NR Description: B1151A10.19
  misc_feature (1)..(198): NCBI GI NO: 34903552 NR Description: P0001B06.28
  misc_feature (1)..(199): NCBI GI NO: 15239804 NR Description: expressed protein [Arabidopsis thaliana]
  misc_feature (1)..(199): NCBI GI NO: 21536796 NR Description: unknown [Arabidopsis thaliana]
  misc_feature (1)..(192): NCBI GI NO: 18401317 NR Description: expressed protein [Arabidopsis thaliana]
MLPPPFQPKRKRRNFCRICCCTFCILILILLLVLVIAAALFYLIYDPSLPEFHLGSFRVPKLNVTNAADGAYLAADTAARVEVKNRSGRMSWHFSQSRFSVSAENGDLNLGSTKVAGFTVKEKGVTELKAETSVKELALNEKQRRRLKSAVESKALVPTVEVRTKTGVGLEGWNSPSISVTVVCGDATVRQLDKGDPPLCSITLLKWIKIR

SEQ ID NO: 8889 - protein, 122 aa, Glycine max
  peptide (1)..(122): Ceres Seq. ID no. 14316339
  misc_feature (1)..(121): NCBI GI NO: 25408980 NR Description: hypothetical protein At2g46300
  misc_feature (1)..(122): NCBI GI NO: 26449684 NR Description: unknown protein [Arabidopsis thaliana]
  misc_feature (1)..(122): NCBI GI NO: 30690312 NR Description: expressed protein [Arabidopsis thaliana]
  misc_feature (1)..(118): NCBI GI NO: 25518342 NR Description: hypothetical protein F22L4.1
  misc_feature (1)..(118): NCBI GI NO: 15234066 NR Description: hypothetical protein [Arabidopsis thaliana]
  misc_feature (1)..(108): NCBI GI NO: 34914304 NR Description: B1151A10.19
  misc_feature (1)..(109): NCBI GI NO: 34903552 NR Description: P0001B06.28
  misc_feature (1)..(110): NCBI GI NO: 15239804 NR Description: expressed protein [Arabidopsis thaliana]
  misc_feature (1)..(110): NCBI GI NO: 21536796 NR Description: unknown [Arabidopsis thaliana]
  misc_feature (1)..(103): NCBI GI NO: 18401317 NR Description: expressed protein [Arabidopsis thaliana]
MSWHFSQSRFSVSAENGDLNLGSTKVAGFTVKEKGVTELKAETSVKELALNEKQRRRLKSAVESKALVPTVEVRTKTGVGLEGWNSPSISVTVVCGDATVRQLDKGDPPLCSITLLKWIKIR

SEQ ID NO: 8890 - DNA, 1361 bp, Glycine max
  misc_feature (1)..(1361): Ceres Seq. ID no. 14316382
agtttatcaagaactcttgttccaccaaccccaaaattgtgaacctttcaaagagacgaagccttcgaatctctctgaaacttttctcttctctttgattcttctctatcagttaaacattagaatgagccgttcacaggatccacacccttcccgatctttcttcccttttggaaatccttttcggatgatatcacctaaaggctctcgcatgtctccacaacttcttgcagtgttgcaagcttttgaggcaacattggcagagaggctgaaaaatcttatgcctaaaagcaaggatgaaatcctcaccttgtcttggatgactttagctatgaagtcactttgtgaaagtcacaatgacatacggacccttatgactgcccttgagcttcctgtgagtgattgggaggacaaatggattgatatgtacttggacataagttcaaagttgctagacatttgcaatgcattcagctctgagctttcacgtctgaaccagggaaaccttcctcttaagtgtgcactgcacaatttagactctgcctcttcaaagcagtatcttcgggcatgttccctacttgatgattggaggcagcatgttagttctaggaaccctagaattgagaaatgtagttctatgttagataatcttgtgggctcacttgatcttcctaaggttaaaaattctgccaaaggaaaggttttgatgcaagctatgtatggagttaaggtggagactgtatttatttgcagggtgtttactgcagcattctctggctcgtcaaagaagttatcagacttgaatgtggccgacatacattcatgggctccagattttagaaggttgcaggatcttgtaaatgaggaaattagagttagattttctggtggtaaatttactgtattgaatgagttggaagcggttgatgcctctgtgaagatattatatcctactatccaagctggtgtagataccgttgagacagaatggcttgtgaagactgttgaggaattacgtgcgggtgccgagaagctttcgcaaggaattgatcttcttgcaaagggagtagatgggtttttttcaagccgttatgactagtcgcgatactttgctcagctctgtgaggtttgataaaactgtaaatgatcgttccccaggccgtaacagagacatgcaggtagttcactaattatgcagtagcctaactctggtaggttttgggggggtgttcctttgtaggattagtagtattttcggtcttataggtgataatagtatttagccgaaatgtatatgagtggggatgttatgtgtaatgtcaaacaattacaaaatgcagatctttgttaaaaaaaaaaag

SEQ ID NO: 8891 - protein, 365 aa, Glycine max
  peptide (1)..(365): Ceres Seq. ID no. 14316383
  misc_feature (42)..(360): NCBI GI NO: 18406969 NR Description: expressed protein [Arabidopsis thaliana]
  misc_feature (42)..(360): NCBI GI NO: 16604342 NR Description: At2g46080/T3F17.27 [Arabidopsis thaliana]
  misc_feature (42)..(360): NCBI GI NO: 18378853 NR Description: expressed protein [Arabidopsis thaliana]
  misc_feature (42)..(329): NCBI GI NO: 37536014 NR Description: unknown protein
  misc_feature (59)..(356): NCBI GI NO: 28392962 NR Description: unknown protein [Arabidopsis thaliana]
  misc_feature (59)..(356): NCBI GI NO: 7485228 NR Description: hypothetical protein A_IG002N01
  misc_feature (59)..(356): NCBI GI NO: 30678866 NR Description: expressed protein [Arabidopsis thaliana]
  misc_feature (111)..(350): NCBI GI NO: 15233126 NR Description: hypothetical protein [Arabidopsis thaliana]
VYQELLFHQPQNCEPFKETKPSNLSETFLFSLILLYQLNIRMSRSQDPHPSRSFFPFGNPFRMISPKGSRMSPQLLAVLQAFEATLAERLKNLMPKSKDEILTLSWMTLAMKSLCESHNDIRTLMTALELPVSDWEDKWIDMYLDISSKLLDICNAFSSELSRLNQGNLPLKCALHNLDSASSKQYLRACSLLDDWRQHVSSRNPRIEKCSSMLDNLVGSLDLPKVKNSAKGKVLMQAMYGVKVETVFICRVFTAAFSGSSKKLSDLNVADIHSWAPDFRRLQDLVNEEIRVRFSGGKFTVLNELEAVDASVKILYPTIQAGVDTVETEWLVKTVEELRAGAEKLSQGIDLLAKGVDGFFSSRYD

SEQ ID NO: 8892 - protein, 324 aa, Glycine max
  peptide (1)..(324): Ceres Seq. ID no. 14316384
  misc_feature (1)..(319): NCBI GI NO: 18406969 NR Description: expressed protein [Arabidopsis thaliana]
  misc_feature (1)..(319): NCBI GI NO: 16604342 NR Description: At2g46080/T3F17.27 [Arabidopsis thaliana]
  misc_feature (1)..(319): NCBI GI NO: 18378853 NR Description: expressed protein [Arabidopsis thaliana]
  misc_feature (1)..(288): NCBI GI NO: 37536014 NR Description: unknown protein
  misc_feature (18)..(315): NCBI GI NO: 28392962 NR Description: unknown protein [Arabidopsis thaliana]
  misc_feature (18)..(315): NCBI GI NO: 7485228 NR Description: hypothetical protein A_IG002N01
  misc_feature (18)..(315): NCBI GI NO: 30678866 NR Description: expressed protein [Arabidopsis thaliana]
  misc_feature (70)..(309): NCBI GI NO: 15233126 NR Description: hypothetical protein [Arabidopsis thaliana]
MSRSQDPHPSRSFFPFGNPFRMISPKGSRMSPQLLAVLQAFEATLAERLKNLMPKSKDEILTLSWMTLAMKSLCESHNDIRTLMTALELPVSDWEDKWIDMYLDISSKLLDICNAFSSELSRLNQGNLPLKCALHNLDSASSKQYLRACSLLDDWRQHVSSRNPRIEKCSSMLDNLVGSLDLPKVKNSAKGKVLMQAMYGVKVETVFICRVFTAAFSGSSKKLSDLNVADIHSWAPDFRRLQDLVNEEIRVRFSGGKFTVLNELEAVDASVKILYPTIQAGVDTVETEWLVKTVEELRAGAEKLSQGIDLLAKGVDGFFSSRYD

SEQ ID NO: 8893 - protein, 303 aa, Glycine max
  peptide (1)..(303): Ceres Seq. ID no. 14316385
  misc_feature (1)..(298): NCBI GI NO: 18406969 NR Description: expressed protein [Arabidopsis thaliana]
  misc_feature (1)..(298): NCBI GI NO: 16604342 NR Description: At2g46080/T3F17.27 [Arabidopsis thaliana]
  misc_feature (1)..(298): NCBI GI NO: 18378853 NR Description: expressed protein [Arabidopsis thaliana]
  misc_feature (1)..(267): NCBI GI NO: 37536014 NR Description: unknown protein
  misc_feature (1)..(294): NCBI GI NO: 28392962 NR Description: unknown protein [Arabidopsis thaliana]
  misc_feature (1)..(294): NCBI GI NO: 7485228 NR Description: hypothetical protein A_IG002N01
  misc_feature (1)..(294): NCBI GI NO: 30678866 NR Description: expressed protein [Arabidopsis thaliana]
  misc_feature (49)..(288): NCBI GI NO: 15233126 NR Description: hypothetical protein [Arabidopsis thaliana]
MISPKGSRMSPQLLAVLQAFEATLAERLKNLMPKSKDEILTLSWMTLAMKSLCESHNDIRTLMTALELPVSDWEDKWIDMYLDISSKLLDICNAFSSELSRLNQGNLPLKCALHNLDSASSKQYLRACSLLDDWRQHVSSRNPRIEKCSSMLDNLVGSLDLPKVKNSAKGKVLMQAMYGVKVETVFICRVFTAAFSGSSKKLSDLNVADIHSWAPDFRRLQDLVNEEIRVRFSGGKFTVLNELEAVDASVKILYPTIQAGVDTVETEWLVKTVEELRAGAEKLSQGIDLLAKGVDGFFSSRYD

SEQ ID NO: 8894 - DNA, 650 bp, Glycine max
  misc_feature (1)..(650): Ceres Seq. ID no. 15175368
atatttggagagagagagagagagagagaataaaaatggaaggaggatcaggtggcgagaggaacagtagtgtataccgagagtgcttgagaaatcatgcagccagcctaggaagctacgccacggacgggtgcgccgagtacacggtggacggcgcggggggactacaatgcgccgcgtgcgggtgccaccgcaacttccaccggaaagtgaagtacctggcggcggctgaaagccctcccacggagtatgggggcagcaacagcaagaagcggttcaggtctaagttcacggaagatcaaaaggagaagatgctagggtttgcggagaagcttggttggaagcttcagaggagggatcttgatgatgagatagagaggttttgccgaagcgttggggtgagtaggcaagtcttcaaagtttggatgcataaccataagaactcttcctcctcctcttctaccgccgccaatgtctcctccctcacccagtaattcactctctcctcttgtaattgtttctcattaattatcactttcatctttttagattgactagtttacttcaatattgtaagaagtcaatgaaatcacttaattgtcaggattatgtatgctatcactatctatttataacctataaagtttccg

SEQ ID NO: 8895 - protein, 163 aa, Glycine max
  peptide (1)..(163): Ceres Seq. ID no. 15175369
  misc_feature (20)..(75): Pfam Name: Pfam Description:  ZF-HD protein dimerisation region
  misc_feature (84)..(146): NCBI GI NO: 28301934 NR Description: putative ZF-HD homeobox protein
  misc_feature (19)..(69): NCBI GI NO: 28301934 NR Description: putative ZF-HD homeobox protein
  misc_feature (84)..(156): NCBI GI NO: 32480091 NR Description: OSJNBb0086G13.8
  misc_feature (10)..(69): NCBI GI NO: 32480091 NR Description: OSJNBb0086G13.8
  misc_feature (74)..(154): NCBI GI NO: 18410804 NR Description: expressed protein [Arabidopsis thaliana]
  misc_feature (25)..(69): NCBI GI NO: 18410804 NR Description: expressed protein [Arabidopsis thaliana]
  misc_feature (14)..(83): NCBI GI NO: 15233925 NR Description: expressed protein [Arabidopsis thaliana]
  misc_feature (78)..(148): NCBI GI NO: 15233925 NR Description: expressed protein [Arabidopsis thaliana]
  misc_feature (84)..(148): NCBI GI NO: 13374061 NR Description: ZF-HD homeobox protein [Flaveria bidentis]
  misc_feature (14)..(69): NCBI GI NO: 13374061 NR Description: ZF-HD homeobox protein [Flaveria bidentis]
IWRERERERIKMEGGSGGERNSSVYRECLRNHAASLGSYATDGCAEYTVDGAGGLQCAACGCHRNFHRKVKYLAAAESPPTEYGGSNSKKRFRSKFTEDQKEKMLGFAEKLGWKLQRRDLDDEIERFCRSVGVSRQVFKVWMHNHKNSSSSSSTAANVSSLTQ

SEQ ID NO: 8896 - protein, 152 aa, Glycine max
  peptide (1)..(152): Ceres Seq. ID no. 15175370
  misc_feature (9)..(64): Pfam Name: Pfam Description:  ZF-HD protein dimerisation region
  misc_feature (73)..(135): NCBI GI NO: 28301934 NR Description: putative ZF-HD homeobox protein
  misc_feature (8)..(58): NCBI GI NO: 28301934 NR Description: putative ZF-HD homeobox protein
  misc_feature (73)..(145): NCBI GI NO: 32480091 NR Description: OSJNBb0086G13.8
  misc_feature (1)..(58): NCBI GI NO: 32480091 NR Description: OSJNBb0086G13.8
  misc_feature (63)..(143): NCBI GI NO: 18410804 NR Description: expressed protein [Arabidopsis thaliana]
  misc_feature (14)..(58): NCBI GI NO: 18410804 NR Description: expressed protein [Arabidopsis thaliana]
  misc_feature (3)..(72): NCBI GI NO: 15233925 NR Description: expressed protein [Arabidopsis thaliana]
  misc_feature (67)..(137): NCBI GI NO: 15233925 NR Description: expressed protein [Arabidopsis thaliana]
  misc_feature (73)..(137): NCBI GI NO: 13374061 NR Description: ZF-HD homeobox protein [Flaveria bidentis]
  misc_feature (3)..(58): NCBI GI NO: 13374061 NR Description: ZF-HD homeobox protein [Flaveria bidentis]
MEGGSGGERNSSVYRECLRNHAASLGSYATDGCAEYTVDGAGGLQCAACGCHRNFHRKVKYLAAAESPPTEYGGSNSKKRFRSKFTEDQKEKMLGFAEKLGWKLQRRDLDDEIERFCRSVGVSRQVFKVWMHNHKNSSSSSSTAANVSSLTQ

SEQ ID NO: 8897 - DNA, 1297 bp, Glycine max
  misc_feature (1)..(1297): Ceres Seq. ID no. 14315013
gcacggtagtaggaaaaaatgacggaggtggttgcttcggatcccttatccaatcatggcgttgttgttaatcggagtgagcagaggatccgttgttcctcttcctcttctcccgttcgcctctctcctccaccatctcctcgagaaagttctccaagattgcggcaacgacatcgactccgctattagaagcttaaaccagttacgcttaggaggagcaccaccacctccttctcttgattctactctcatcgcatctgacactgctcctcctcaattccaaggtgaagcaaaatgtgatgcagaagttgcaggttctgatgatccagtagctggactaaattatcctacaaacggtgccgaatgggtagagctttttgttaattaaatgatgaatgcttcaagcatggatgatgccaaatctcgagcttcaagaatgctagaggcgttggagaagtccatttgcgcaagagcaagtgctgaaacagagcgaaacatccaccaggaaaataaggtgctgaaggaacaagtggaggcccttgttcaagaaaacgtgattctgaagtgcgctatctgtattcagcacgaacgccagaaagaatatgaagacagaaatcaagagttgaagcatttgaagcaattagtgtcgcagtaccaggaacaggtaagagctttagaggtaaacaattatgcattgacaatgcacctaaagcaggctgaactaggtaacatggctgtttctgtagtttaaataatcatgatcaaagaaaagaaacgaggtaatgaatttatactactccacattttttattaatggtggatagtgaagatttatactattttatgatgcgtggatgtggcaaaaaaatcggtcctacccatagattattagctcttttgatgtagatacccatgtgataaatattttggatgtgttagaaattttatttggcatgcctcatgtaagcccctggatgatctgggattttgtctaactgtctattactgttgttttctgctgccaccatcgtttttgacaagcttctagcaactcaaatgcgtaacgatcgatcatgtttgtgctgagacagaagagttgccacctgatgcgaagagtgaatctgtcatttttgcagccattccatgatgagttgcccttatgtaagatggtgggtttggactctaataaaaattgggtgcttagatagtctgtgagtatggattcttctgtagtaaaatcttgtagtattgtgtaaacttttttttttatatagaaaggtaagttatttattagctc

SEQ ID NO: 8898 - protein, 120 aa, Glycine max
  peptide (1)..(120): Ceres Seq. ID no. 14315014
  misc_feature (1)..(111): NCBI GI NO: 13877755 NR Description: unknown protein [Arabidopsis thaliana]
  misc_feature (1)..(111): NCBI GI NO: 18421340 NR Description: expressed protein [Arabidopsis thaliana]
  misc_feature (1)..(114): NCBI GI NO: 34015166 NR Description: hypothetical protein OSJNBa0017M13.20
  misc_feature (1)..(114): NCBI GI NO: 18412607 NR Description: expressed protein [Arabidopsis thaliana]
  misc_feature (1)..(111): NCBI GI NO: 15241851 NR Description: hypothetical protein [Arabidopsis thaliana]
  misc_feature (1)..(91): NCBI GI NO: 35215036 NR Description: hypothetical protein
  misc_feature (3)..(114): NCBI GI NO: 35215036 NR Description: hypothetical protein
MMNASSMDDAKSRASRMLEALEKSICARASAETERNIHQENKVLKEQVEALVQENVILKCAICIQHERQKEYEDRNQELKHLKQLVSQYQEQVRALEVNNYALTMHLKQAELGNMAVSVV

SEQ ID NO: 8899 - protein, 119 aa, Glycine max
  peptide (1)..(119): Ceres Seq. ID no. 14315015
  misc_feature (1)..(110): NCBI GI NO: 13877755 NR Description: unknown protein [Arabidopsis thaliana]
  misc_feature (1)..(110): NCBI GI NO: 18421340 NR Description: expressed protein [Arabidopsis thaliana]
  misc_feature (1)..(113): NCBI GI NO: 34015166 NR Description: hypothetical protein OSJNBa0017M13.20
  misc_feature (1)..(113): NCBI GI NO: 18412607 NR Description: expressed protein [Arabidopsis thaliana]
  misc_feature (1)..(110): NCBI GI NO: 15241851 NR Description: hypothetical protein [Arabidopsis thaliana]
  misc_feature (1)..(90): NCBI GI NO: 35215036 NR Description: hypothetical protein
  misc_feature (2)..(113): NCBI GI NO: 35215036 NR Description: hypothetical protein
MNASSMDDAKSRASRMLEALEKSICARASAETERNIHQENKVLKEQVEALVQENVILKCAICIQHERQKEYEDRNQELKHLKQLVSQYQEQVRALEVNNYALTMHLKQAELGNMAVSVV

SEQ ID NO: 8900 - protein, 114 aa, Glycine max
  peptide (1)..(114): Ceres Seq. ID no. 14315016
  misc_feature (1)..(105): NCBI GI NO: 13877755 NR Description: unknown protein [Arabidopsis thaliana]
  misc_feature (1)..(105): NCBI GI NO: 18421340 NR Description: expressed protein [Arabidopsis thaliana]
  misc_feature (1)..(108): NCBI GI NO: 34015166 NR Description: hypothetical protein OSJNBa0017M13.20
  misc_feature (1)..(108): NCBI GI NO: 18412607 NR Description: expressed protein [Arabidopsis thaliana]
  misc_feature (1)..(105): NCBI GI NO: 15241851 NR Description: hypothetical protein [Arabidopsis thaliana]
  misc_feature (1)..(85): NCBI GI NO: 35215036 NR Description: hypothetical protein
  misc_feature (1)..(108): NCBI GI NO: 35215036 NR Description: hypothetical protein
MDDAKSRASRMLEALEKSICARASAETERNIHQENKVLKEQVEALVQENVILKCAICIQHERQKEYEDRNQELKHLKQLVSQYQEQVRALEVNNYALTMHLKQAELGNMAVSVV

SEQ ID NO: 8901 - DNA, 1100 bp, Glycine max
  misc_feature (1)..(1100): Ceres Seq. ID no. 13594296
atttttttttttccaccaatccatgtgtccacacatgacatatcccacacaacttgttgtccctttaaggcttaagctccaccacgaaacaccaatcctcaacacacacaaaattctgttcagtttcacccactaaaccaccactactcctaagatctccttcaaaacacaaccaaaatcttaactttcttggaacctttttaattgtttcttctttaaaaatcaatttcctttaaggctttaactttaatattagagttctttctctttcattcatccttggtaatggcttgtgcattgcaagcaaccttagcagccaacacctatgccttttcttccaggagattctccttgaagcaccaaaagaacagtaagagaaggttttctttgttcactgttagagctgattctgatgactctgactgcaatgaggaagagtgtgccccggataaggaagtagggaaggtcagtgtggaatggttagctggggagaagacaaaagtagtgggcacattcccacctcgtcgtaagccgggttggactggctatgttgagaaggacactgctgggcagacaaacatatattcagttgagccagcagtttatgtggcagaaagtgctataagttcaggaactgctggctcttcttctgatggagctgagaacacagcagcaattgttgcaggccttgctctgatatcgattgcagcagcatcgtcgatactgctacaagttggtaagaatgctcctcctcagatccagacggctcaatactctggaccatcacttagttactacatcaacaaattcacgccgccggaaattactcaagtgtctgtgccaagtgaggctgaactatcctcatctgttcaacctgaaagcccacctccggaagtttcccaggttcaggttgaagctcaagcttctgagacctctagtgtgaacattgaatcgtaggtgtatcaagtggttaccacttttgctaccaaaacataccaaagaagtttattttgtgtatacacaactaaaggttaatggatgcaaatgttgaacatcattcttggtatgccactgctaccaactgaaagtgtgtttatctt

SEQ ID NO: 8902 - protein, 223 aa, Glycine max
  peptide (1)..(223): Ceres Seq. ID no. 13594297
  misc_feature (9)..(223): NCBI GI NO: 18415378 NR Description: proline-rich protein family [Arabidopsis thaliana]
  misc_feature (9)..(223): NCBI GI NO: 21553857 NR Description: unknown [Arabidopsis thaliana]
MACALQATLAANTYAFSSRRFSLKHQKNSKRRFSLFTVRADSDDSDCNEEECAPDKEVGKVSVEWLAGEKTKVVGTFPPRRKPGWTGYVEKDTAGQTNIYSVEPAVYVAESAISSGTAGSSSDGAENTAAIVAGLALISIAAASSILLQVGKNAPPQIQTAQYSGPSLSYYINKFTPPEITQVSVPSEAELSSSVQPESPPPEVSQVQVEAQASETSSVNIES

SEQ ID NO: 8903 - DNA, 1717 bp, Glycine max
  misc_feature (1)..(1717): Ceres Seq. ID no. 14315919
agaaaaatcttttggattcccttctcattcactttcactttcactccttagcctggttataggagctagggtttatcgagggtttcgttccttcctctctgcaacaacaatggcgaaacctgggcgaggtcgtcgctctccctccggttccgtttccggctcctcctctcgctcctcttccccctccgactctcgttcctcctctcgctcgcgctccctttctcggtcccgttctccctcgcgctccagatcctcttccccctcctcctcctcttcctcccgaagctcccgcagccgcagccctcccccgcagaggcgccgaagtcctgctgacgcaactaggcgaggtcggtctcctccacctcagtctaagagagcttcacctcccccaaggaaaccttctcctgtacgcgagtcacttgttcttcatgtagaaaagctcagcagaaatgtcaatgaagggcacttgaaagaaattttcagtaactttggtgaggttataagtgtcgagttggcaatggatcgaactgtcaatcttccaaaagggtatggatatgtgcagttcaagacaagaggggatgctgaaaaggcattattgtacatggatggtgcccaaatagatggcaatgtcatcaaggcaagatttactctacctccaaggcagaaagtttcaccacccccaaaggcttctgctgttgctccaaagagagacacccccagggctgataatgctagtgcagatgttgacaaggatggaccaaagcggcaaagagaatcttctcctcgtagaaaacctcctccctcaccacggaggagatctcctgtacctagaagagctggatctccgagacgaccagattctccacgtcgccgtgcagattctcctgttcgtcgccgattagactctccttatcgtcgtggaggagacacacctcctaggaggcggcctgtgtctcctggaagaggtcgttctccatctccacctagacgccttagatcccctgcaaggctgtcacctagaaggatacgtggaagtccaggtcgaagacgttcacctccacctcctcccaggcgccgatcaccacctagacgaccacgtagtcctcctagaaggtctccaattggtcgtagacgtactcgctctccaatacgtaggtctgcacgctcacgctcaaggtcattctcacctcgcagaggtagaccaccagttagacgtggaaggtcatcatcctactctgattcacctagtccacgcaaggtatcccggagatcaaagagtcggagcccaagaaggcctttgagaggaagaggcagtagcaacagcagcagcagcagttcaccaccaccaccaccaccaccaccaactcgcaagccatagataattcttgtacatctactgtctatttctgttgatgtatttattgagattctgtaccggctgagttctagcttgatgtgcttggggatatatgttgcttttcattgtggtctattaacacattttttcttattagcacttaaaagttgtttggaaactaggcattccgtttttgtttggatcctactttagttgttactttgctcaaaaatgcaaaacatgaaagacgatagtgctctgctttattgtatttctagaaattcagtggaattccatgtaactggtagtttctttagaaatttgattatgcgaagaaagtagtagtaaatgttcaatgtg

SEQ ID NO: 8904 - protein, 458 aa, Glycine max
  peptide (1)..(458): Ceres Seq. ID no. 14315920
  misc_feature (142)..(213): Pfam Name: a.k.a. RRM, RBD, or RNP domain Pfam Description: RNA recognition motif.
  misc_feature (37)..(453): NCBI GI NO: 15219287 NR Description: arginine/serine-rich protein, putative
  misc_feature (37)..(453): NCBI GI NO: 15027957 NR Description: putative arginine/serine-rich protein
  misc_feature (162)..(423): NCBI GI NO: 34905768 NR Description: P0401G10.10
  misc_feature (42)..(294): NCBI GI NO: 6857826 NR Description: RNA-binding protein S1, serine-rich domain
  misc_feature (42)..(294): NCBI GI NO: 18032270 NR Description: splicing-related factor RNPS1 [Homo sapiens]
  misc_feature (42)..(294): NCBI GI NO: 34870512 NR Description: similar to Rnps1 protein [Rattus norvegicus]
  misc_feature (42)..(294): NCBI GI NO: 3253165 NR Description: SR protein [Homo sapiens]
  misc_feature (44)..(294): NCBI GI NO: 34785364 NR Description: Unknown (protein for MGC:65775) [Danio rerio]
  misc_feature (54)..(294): NCBI GI NO: 8101025 NR Description: SR-related protein LD2 [Homo sapiens]
  misc_feature (42)..(294): NCBI GI NO: 14733321 NR Description: similar to RNA-binding protein S1
EKSFGFPSHSLSLSLLSLVIGARVYRGFRSFLSATTMAKPGRGRRSPSGSVSGSSSRSSSPSDSRSSSRSRSLSRSRSPSRSRSSSPSSSSSSRSSRSRSPPPQRRRSPADATRRGRSPPPQSKRASPPPRKPSPVRESLVLHVEKLSRNVNEGHLKEIFSNFGEVISVELAMDRTVNLPKGYGYVQFKTRGDAEKALLYMDGAQIDGNVIKARFTLPPRQKVSPPPKASAVAPKRDTPRADNASADVDKDGPKRQRESSPRRKPPPSPRRRSPVPRRAGSPRRPDSPRRRADSPVRRRLDSPYRRGGDTPPRRRPVSPGRGRSPSPPRRLRSPARLSPRRIRGSPGRRRSPPPPPRRRSPPRRPRSPPRRSPIGRRRTRSPIRRSARSRSRSFSPRRGRPPVRRGRSSSYSDSPSPRKVSRRSKSRSPRRPLRGRGSSNSSSSSSPPPPPPPPTRKP

SEQ ID NO: 8905 - protein, 422 aa, Glycine max
  peptide (1)..(422): Ceres Seq. ID no. 14315921
  misc_feature (106)..(177): Pfam Name: a.k.a. RRM, RBD, or RNP domain Pfam Description: RNA recognition motif.
  misc_feature (1)..(417): NCBI GI NO: 15219287 NR Description: arginine/serine-rich protein, putative
  misc_feature (1)..(417): NCBI GI NO: 15027957 NR Description: putative arginine/serine-rich protein
  misc_feature (126)..(387): NCBI GI NO: 34905768 NR Description: P0401G10.10
  misc_feature (6)..(258): NCBI GI NO: 6857826 NR Description: RNA-binding protein S1, serine-rich domain
  misc_feature (6)..(258): NCBI GI NO: 18032270 NR Description: splicing-related factor RNPS1 [Homo sapiens]
  misc_feature (6)..(258): NCBI GI NO: 34870512 NR Description: similar to Rnps1 protein [Rattus norvegicus]
  misc_feature (6)..(258): NCBI GI NO: 3253165 NR Description: SR protein [Homo sapiens]
  misc_feature (8)..(258): NCBI GI NO: 34785364 NR Description: Unknown (protein for MGC:65775) [Danio rerio]
  misc_feature (18)..(258): NCBI GI NO: 8101025 NR Description: SR-related protein LD2 [Homo sapiens]
  misc_feature (6)..(258): NCBI GI NO: 14733321 NR Description: similar to RNA-binding protein S1
MAKPGRGRRSPSGSVSGSSSRSSSPSDSRSSSRSRSLSRSRSPSRSRSSSPSSSSSSRSSRSRSPPPQRRRSPADATRRGRSPPPQSKRASPPPRKPSPVRESLVLHVEKLSRNVNEGHLKEIFSNFGEVISVELAMDRTVNLPKGYGYVQFKTRGDAEKALLYMDGAQIDGNVIKARFTLPPRQKVSPPPKASAVAPKRDTPRADNASADVDKDGPKRQRESSPRRKPPPSPRRRSPVPRRAGSPRRPDSPRRRADSPVRRRLDSPYRRGGDTPPRRRPVSPGRGRSPSPPRRLRSPARLSPRRIRGSPGRRRSPPPPPRRRSPPRRPRSPPRRSPIGRRRTRSPIRRSARSRSRSFSPRRGRPPVRRGRSSSYSDSPSPRKVSRRSKSRSPRRPLRGRGSSNSSSSSSPPPPPPPPTRKP

SEQ ID NO: 8906 - protein, 286 aa, Glycine max
  peptide (1)..(286): Ceres Seq. ID no. 14315922
  misc_feature (81)..(284): Pfam Name: Pfam Description:  Formin Homology 2 Domain
  misc_feature (1)..(281): NCBI GI NO: 15219287 NR Description: arginine/serine-rich protein, putative
  misc_feature (1)..(281): NCBI GI NO: 15027957 NR Description: putative arginine/serine-rich protein
  misc_feature (1)..(251): NCBI GI NO: 34905768 NR Description: P0401G10.10
  misc_feature (1)..(122): NCBI GI NO: 6857826 NR Description: RNA-binding protein S1, serine-rich domain
  misc_feature (1)..(122): NCBI GI NO: 18032270 NR Description: splicing-related factor RNPS1 [Homo sapiens]
  misc_feature (1)..(122): NCBI GI NO: 34870512 NR Description: similar to Rnps1 protein [Rattus norvegicus]
  misc_feature (1)..(122): NCBI GI NO: 3253165 NR Description: SR protein [Homo sapiens]
  misc_feature (1)..(122): NCBI GI NO: 34785364 NR Description: Unknown (protein for MGC:65775) [Danio rerio]
  misc_feature (1)..(122): NCBI GI NO: 8101025 NR Description: SR-related protein LD2 [Homo sapiens]
  misc_feature (1)..(122): NCBI GI NO: 14733321 NR Description: similar to RNA-binding protein S1
MDRTVNLPKGYGYVQFKTRGDAEKALLYMDGAQIDGNVIKARFTLPPRQKVSPPPKASAVAPKRDTPRADNASADVDKDGPKRQRESSPRRKPPPSPRRRSPVPRRAGSPRRPDSPRRRADSPVRRRLDSPYRRGGDTPPRRRPVSPGRGRSPSPPRRLRSPARLSPRRIRGSPGRRRSPPPPPRRRSPPRRPRSPPRRSPIGRRRTRSPIRRSARSRSRSFSPRRGRPPVRRGRSSSYSDSPSPRKVSRRSKSRSPRRPLRGRGSSNSSSSSSPPPPPPPPTRKP

SEQ ID NO: 8907 - DNA, 995 bp, Glycine max
  misc_feature (1)..(995): Ceres Seq. ID no. 13581670
acacaagtacacagcatagtcaagcttcgaattgttgaatgtggaaggaggagaaggagaaggagggtgttgcgccacgaacacatgaattagaaaagaagcagctgcagcaacttttcttgttcaatacccatcaaatgcaaatacaaagacactctcttttttaattactactgttttatgttcctttcttccttctgaatctgaccaaccagtaggactccttcaaagggattttgagtattgtttgaattgctggagacctgagagtgaaaactaactccacaatccatggataaagatgctagggtggaagagactgttgatttgcgaaccaatgtggagttggtgagatcagtctctgataagcatcatgatcttttaaggccatctgctcggaactattcaagaggacaatcaacagatacaactggccgtggaaagggaaagtatgccttaattagagacccagaggacttccaaatgggagtttatgataagccccttccatgttttggatgtggaatcggatggttctcatttctttttggatttctatgccctcctatgtggttctatgctacaattctctattttggaaatcactatcggaaggatcctagggagcgagcagggctgggagcctctgcaattgctgcattagtgtgttctgtaacgtcgctgataattggagtaattcttgtgttgcggtacctctatttctaattcacgtgcaaaggtgaaaattgagaagcaaaagcatttggaatcaattctggcgggatattagaaacaattggacatatgtatataagaacttcaaatagatgggaaaaggcttgcatatattgctggtgaagtaattcacagcatgaaatctgtcgtctataccataagttgagagaagataatgcgtcatatcccttatttgtttattttctgaactgatgtatactcaaaaagaaaccttttgatgagtgtttatgaatttcccg

SEQ ID NO: 8908 - protein, 144 aa, Glycine max
  peptide (1)..(144): Ceres Seq. ID no. 13581671
  misc_feature (9)..(135): NCBI GI NO: 15236106 NR Description: expressed protein [Arabidopsis thaliana]
  misc_feature (9)..(135): NCBI GI NO: 21553625 NR Description: unknown [Arabidopsis thaliana]
  misc_feature (18)..(144): NCBI GI NO: 21593960 NR Description: unknown [Arabidopsis thaliana]
  misc_feature (18)..(144): NCBI GI NO: 8777446 NR Description: gene_id:MHM17
  misc_feature (18)..(144): NCBI GI NO: 18423932 NR Description: expressed protein [Arabidopsis thaliana]
  misc_feature (45)..(141): NCBI GI NO: 25405706 NR Description: hypothetical protein F20D21.3
MDKDARVEETVDLRTNVELVRSVSDKHHDLLRPSARNYSRGQSTDTTGRGKGKYALIRDPEDFQMGVYDKPLPCFGCGIGWFSFLFGFLCPPMWFYATILYFGNHYRKDPRERAGLGASAIAALVCSVTSLIIGVILVLRYLYF

SEQ ID NO: 8909 - protein, 80 aa, Glycine max
  peptide (1)..(80): Ceres Seq. ID no. 13581672
  misc_feature (1)..(71): NCBI GI NO: 15236106 NR Description: expressed protein [Arabidopsis thaliana]
  misc_feature (1)..(71): NCBI GI NO: 21553625 NR Description: unknown [Arabidopsis thaliana]
  misc_feature (1)..(80): NCBI GI NO: 21593960 NR Description: unknown [Arabidopsis thaliana]
  misc_feature (1)..(80): NCBI GI NO: 8777446 NR Description: gene_id:MHM17
  misc_feature (1)..(80): NCBI GI NO: 18423932 NR Description: expressed protein [Arabidopsis thaliana]
  misc_feature (1)..(77): NCBI GI NO: 25405706 NR Description: hypothetical protein F20D21.3
MGVYDKPLPCFGCGIGWFSFLFGFLCPPMWFYATILYFGNHYRKDPRERAGLGASAIAALVCSVTSLIIGVILVLRYLYF

SEQ ID NO: 8910 - DNA, 1306 bp, Glycine max
  misc_feature (1)..(1306): Ceres Seq. ID no. 14315966
attcgaaaacaccaactacgactttgagtggtcaaaaacctctgcgcttctctctcaagtctcaaagacacgctccctgaaaaccctaacatctaccacttctctgagatctccgccgcaaccgccaatttctccgcgccacgcctttcctcttcctcctggcgctgcgtaattcgtcaccgcgaagtcgtcgtttcgcgccgcgacttccgccgtcaaattgatatcccggagctcagccgccgcctcgccctcatctgccggagtcaccacagcagcctcttgaaactcctcggcgcgtcggtctctggcgccgtcatcttcctcgtcaacgagttcgtccccggcgccagcctcgccgactgcctccgcaaccgccggaaccctagcttcaccgatctcaacacgtggatctctcggatgcagatcgcgtccgacgtggcgcacggtctcgattacatccacaatttctctggttccggttcggattccggttccggatcaggatccggattcgttcacaagcacatcaagagttcgagcattgttatcacggaggagaatctgcgcgcgagaatctgccacttcggcgtgtcgggtctctgcggcgaggccgtcgccggcgacggcgatccttctggcggccggactgtgaggatctaggggaggagaggctacatggcgccggagtttcagatcagcggcgtcgcgacgaagaagagcgacgtgtacgctttcggagtggtggttttggagctgctgagcggggaagaggcggtgaagttcgaattcaacgacgacggcggttatcgcaggattagcgtggtggagacggcaaagattgcggcggaggagaacggcggcgtgaggaagtgggtggatacgaggctgagggattcatttcccgtgaatgttgcggagagaatgattcgggtcggattggaatgtgtcggggatgacccgaatgagagacccgatatgggttgggtttctgatgaggtgtcgaagttgtatttggatctcgttggccccacggtgacttcttttggttgggtttgaggggttttcttttctttttatttgcattcgctatgaattttgattgtaaagaaagagaaaaaactgactgtgaaaagagattgatgtataattttatactttgtatagtacatgattgcggatatgaaggaaaaggtgaagtttgaagcactcaaatcagccaattgggcttgagtggaatggaaggattctgtcttgtgtagaatttggattttgaacaaaataaacatatttagttaagcaagcg

SEQ ID NO: 8911 - protein, 126 aa, Glycine max
  peptide (1)..(126): Ceres Seq. ID no. 14315967
  misc_feature (1)..(114): NCBI GI NO: 11357615 NR Description: hypothetical protein F24I3
  misc_feature (1)..(114): NCBI GI NO: 22331831 NR Description: protein kinase family [Arabidopsis thaliana]
  misc_feature (1)..(112): NCBI GI NO: 5441881 NR Description: Similar to putative receptor kinase. (AC002332)
  misc_feature (1)..(101): NCBI GI NO: 34485514 NR Description: LysM domain-containing receptor-like kinase 1
  misc_feature (1)..(126): NCBI GI NO: 6403501 NR Description: putative protein kinase [Arabidopsis thaliana]
  misc_feature (1)..(117): NCBI GI NO: 15228781 NR Description: protein kinase family [Arabidopsis thaliana]
  misc_feature (1)..(104): NCBI GI NO: 15220540 NR Description: S-locus protein kinase, putative
  misc_feature (1)..(111): NCBI GI NO: 32470650 NR Description: putative receptor protein kinase
  misc_feature (1)..(104): NCBI GI NO: 15218207 NR Description: protein kinase -related [Arabidopsis thaliana]
  misc_feature (1)..(123): NCBI GI NO: 25287696 NR Description: hypothetical protein
MAPEFQISGVATKKSDVYAFGVVVLELLSGEEAVKFEFNDDGGYRRISVVETAKIAAEENGGVRKWVDTRLRDSFPVNVAERMIRVGLECVGDDPNERPDMGWVSDEVSKLYLDLVGPTVTSFGWV

SEQ ID NO: 8912 - protein, 80 aa, Glycine max
  peptide (1)..(80): Ceres Seq. ID no. 14315968
  misc_feature (1)..(80): NCBI GI NO: 11357615 NR Description: hypothetical protein F24I3
  misc_feature (1)..(80): NCBI GI NO: 22331831 NR Description: protein kinase family [Arabidopsis thaliana]
  misc_feature (1)..(80): NCBI GI NO: 5441881 NR Description: Similar to putative receptor kinase. (AC002332)
  misc_feature (1)..(80): NCBI GI NO: 34485514 NR Description: LysM domain-containing receptor-like kinase 1
  misc_feature (33)..(80): NCBI GI NO: 6403501 NR Description: putative protein kinase [Arabidopsis thaliana]
  misc_feature (1)..(61): NCBI GI NO: 6403501 NR Description: putative protein kinase [Arabidopsis thaliana]
  misc_feature (1)..(80): NCBI GI NO: 15228781 NR Description: protein kinase family [Arabidopsis thaliana]
  misc_feature (1)..(59): NCBI GI NO: 15220540 NR Description: S-locus protein kinase, putative
  misc_feature (33)..(80): NCBI GI NO: 15220540 NR Description: S-locus protein kinase, putative
  misc_feature (1)..(59): NCBI GI NO: 32470650 NR Description: putative receptor protein kinase
MQIASDVAHGLDYIHNFSGSGSDSGSGSGSGFVHKHIKSSSIVITEENLRARICHFGVSGLCGEAVAGDGDPSGGRTVRI

SEQ ID NO: 8913 - DNA, 1073 bp, Glycine max
  misc_feature (1)..(1073): Ceres Seq. ID no. 14316416
atcgcaaatttttctttttcttctcccctttagatgagtaacgccacagactccgccggcaaaatcccaccggagacgaggcccgccgagagcgacagtggtggtgatagtgggccccggcccacgatcaagatcaatgttatgcacggatcctctcaacacgagttccacctcccggcccaatcaacttttggggatgttaagaaactccttgttaataaaactggtttagagcctgtagagcaacgacttttcttcagagggatagaaaagggtgataacctacatttgcaccttgaaggtgtaaaggataagtcaaagcttttgcttttggagggcactgctagcaaagagaggaaacttgaggaaaccagaaaacaaaacgtaatgtctaaagcttttgaggctattgctggtgttagagctgaggtggacaagctctcaaatagggtgacttccatagaagtagctattaatggggggaacaaagcatccgagaaagagtttcttgtgctgacagagctgcttatgagtcaattgctgaaactggatggtattgaggctgaaggtgaagcaaagttgcagagaaaagctgaggtgaatcgtgtgcagaaccttgtggataaattagattctctaaaggcaaggaacgccaacccttttagcaacagtagcaatgctgtcaaagtaacaacccaatgggaaacctttgactctggaatggaaagcttggatgctccatccgataacccgtcttccacaaaagtaactcaagaatgggagcggtttgattagctcggaaaccgtttttggaacatctaagttataaatgttgtacaacatcatattactggcccttcatcatattagaggtcttggcacaacgatgttgccttgtgatatggtaggctgaaattttaattgcagaaatgttctctccgctgaggtaaagttgcatatgtttgatctatctcgtgcacttatttttaggcaaaatatgtaaaccaaattgtattcttgttacttgaatatattattgcatcttccgatcatttggtttgtcttctgtttgc

SEQ ID NO: 8914 - protein, 253 aa, Glycine max
  peptide (1)..(253): Ceres Seq. ID no. 14316417
  misc_feature (122)..(203): Pfam Name: Pfam Description:  BAG domain
  misc_feature (16)..(253): NCBI GI NO: 15231035 NR Description: expressed protein [Arabidopsis thaliana]
  misc_feature (16)..(253): NCBI GI NO: 19699283 NR Description: At3g51780/ORF3 [Arabidopsis thaliana]
  misc_feature (16)..(253): NCBI GI NO: 21554254 NR Description: unknown [Arabidopsis thaliana]
  misc_feature (54)..(253): NCBI GI NO: 34907972 NR Description: P0446G04.18
  misc_feature (28)..(253): NCBI GI NO: 25553557 NR Description: OSJNBa0038F22.4
  misc_feature (28)..(253): NCBI GI NO: 34898024 NR Description: ESTs AU082174
  misc_feature (28)..(222): NCBI GI NO: 15242267 NR Description: BAG domain containing protein
  misc_feature (28)..(228): NCBI GI NO: 6624711 NR Description: hypothetical protein
  misc_feature (28)..(228): NCBI GI NO: 38344334 NR Description: OSJNBa0058K23.16
  misc_feature (20)..(253): NCBI GI NO: 21537107 NR Description: unknown [Arabidopsis thaliana]
MSNATDSAGKIPPETRPAESDSGGDSGPRPTIKINVMHGSSQHEFHLPAQSTFGDVKKLLVNKTGLEPVEQRLFFRGIEKGDNLHLHLEGVKDKSKLLLLEGTASKERKLEETRKQNVMSKAFEAIAGVRAEVDKLSNRVTSIEVAINGGNKASEKEFLVLTELLMSQLLKLDGIEAEGEAKLQRKAEVNRVQNLVDKLDSLKARNANPFSNSSNAVKVTTQWETFDSGMESLDAPSDNPSSTKVTQEWERFD

SEQ ID NO: 8915 - protein, 217 aa, Glycine max
  peptide (1)..(217): Ceres Seq. ID no. 14316418
  misc_feature (86)..(167): Pfam Name: Pfam Description:  BAG domain
  misc_feature (1)..(217): NCBI GI NO: 15231035 NR Description: expressed protein [Arabidopsis thaliana]
  misc_feature (1)..(217): NCBI GI NO: 21554254 NR Description: unknown [Arabidopsis thaliana]
  misc_feature (1)..(217): NCBI GI NO: 19699283 NR Description: At3g51780/ORF3 [Arabidopsis thaliana]
  misc_feature (18)..(217): NCBI GI NO: 34907972 NR Description: P0446G04.18
  misc_feature (1)..(217): NCBI GI NO: 25553557 NR Description: OSJNBa0038F22.4
  misc_feature (1)..(217): NCBI GI NO: 34898024 NR Description: ESTs AU082174
  misc_feature (1)..(186): NCBI GI NO: 15242267 NR Description: BAG domain containing protein
  misc_feature (1)..(192): NCBI GI NO: 6624711 NR Description: hypothetical protein
  misc_feature (1)..(192): NCBI GI NO: 38344334 NR Description: OSJNBa0058K23.16
  misc_feature (1)..(217): NCBI GI NO: 21537107 NR Description: unknown [Arabidopsis thaliana]
MHGSSQHEFHLPAQSTFGDVKKLLVNKTGLEPVEQRLFFRGIEKGDNLHLHLEGVKDKSKLLLLEGTASKERKLEETRKQNVMSKAFEAIAGVRAEVDKLSNRVTSIEVAINGGNKASEKEFLVLTELLMSQLLKLDGIEAEGEAKLQRKAEVNRVQNLVDKLDSLKARNANPFSNSSNAVKVTTQWETFDSGMESLDAPSDNPSSTKVTQEWERFD

SEQ ID NO: 8916 - protein, 135 aa, Glycine max
  peptide (1)..(135): Ceres Seq. ID no. 14316419
  misc_feature (4)..(85): Pfam Name: Pfam Description:  BAG domain
  misc_feature (1)..(135): NCBI GI NO: 15231035 NR Description: expressed protein [Arabidopsis thaliana]
  misc_feature (1)..(135): NCBI GI NO: 19699283 NR Description: At3g51780/ORF3 [Arabidopsis thaliana]
  misc_feature (1)..(135): NCBI GI NO: 21554254 NR Description: unknown [Arabidopsis thaliana]
  misc_feature (1)..(135): NCBI GI NO: 34907972 NR Description: P0446G04.18
  misc_feature (1)..(135): NCBI GI NO: 25553557 NR Description: OSJNBa0038F22.4
  misc_feature (1)..(135): NCBI GI NO: 34898024 NR Description: ESTs AU082174
  misc_feature (1)..(104): NCBI GI NO: 15242267 NR Description: BAG domain containing protein
  misc_feature (1)..(110): NCBI GI NO: 6624711 NR Description: hypothetical protein
  misc_feature (1)..(110): NCBI GI NO: 38344334 NR Description: OSJNBa0058K23.16
  misc_feature (1)..(135): NCBI GI NO: 21537107 NR Description: unknown [Arabidopsis thaliana]
MSKAFEAIAGVRAEVDKLSNRVTSIEVAINGGNKASEKEFLVLTELLMSQLLKLDGIEAEGEAKLQRKAEVNRVQNLVDKLDSLKARNANPFSNSSNAVKVTTQWETFDSGMESLDAPSDNPSSTKVTQEWERFD

SEQ ID NO: 8917 - DNA, 1550 bp, Glycine max
  misc_feature (1)..(1550): Ceres Seq. ID no. 15177750
aaaccaaagtggttttgtcatttgttttgatgaatctttcggtggtctatctcaccttcttttctttctcactaatcactataaaaaaaaatctacactatctatccttccacaacacaacacaattcaataccatttaccaaactcactcatcaattctcatctttcttctcactaactattaattcatcatgtcgagcacagctggccaagtcatcaaatgcaaagctgcggtttcatgggaggcagggaagccacttgtgattgaagaagtagaggttgcgccaccacaagctggtgaagtgcgtttgaagatcctctacacctctctttgccacactgatgtttacttctgggaagctaagggccaaactccattgtttcctcgtatatttggtcatgaagctggagggattgtggagagcgtaggtgagggtgtgactcatctgaaaccaggggaccatgccctccctgtgtttaccggggagtgtggggactgccctcattgcaagtcagaggagagcaacatgtgtgatcttctcaggatcaacactgataggggtgtcatgatccatgatagccaaacaaggttttctataaagggacaacctatttaccattttgttggtacctctacattcagtgaatacactgttgttcatgctggatgtgttgccaaagtcaaccctgctgccccacttgacaaaatctgtgttctcagttgtggaatttgcacaggtcttggggccactatcaatgttgcaaaaccaaaacctggttcttctgttgccatttttggacttggagctgttggccttgccgctgctgaaggggcaaggatttctggtgcatcaagaatcattggggttgatttagtttctagcagatttgaagaagctaagaagtttggggtcaatgaatttgtgaacccaaaagatcatgacaaacctgtacaagaggtgattgctgcaatgacaaatgggggtgtggatcgtgctgttgaatgtactggcagcatccaagccatgatctcagcattcgaatgcgtccacgatggttggggtgttgctgtacttgttggagtgccaaacaaagatgatgcattcaaaactcatccagtgaatttcttgaatgagaggactctaaagggtaccttctatggaaactacaaaccccgcactgaccttccttctgttgtggagaagtacatgaatggggaattggaactggagaaattcatcactcacacagttccattctctgagattaacaaggcttttgattacatgctgaaaggggagtccatcagatgcatcattcgtatgggggagtaaatctatcaaaccaatgatgacatggtccctgtgagggactgagttctctttctagttgtgaaagtgaaaagaagaaaataaatttcatatatatgatatatccctttagaattattgaattagtgaaaacttgtgtaagtttgaatgttgagaatgataggacctttgctgctgttattgtctaatgcatgataaataaaatgtggtttttttgtc

SEQ ID NO: 8918 - protein, 380 aa, Glycine max
  peptide (1)..(380): Ceres Seq. ID no. 15177751
  misc_feature (1)..(380): NCBI GI NO: 1085622 NR Description: alcohol dehydrogenase (EC 1
  misc_feature (1)..(380): NCBI GI NO: 452767 NR Description: alcohol dehydrogenase-1CN [Phaseolus acutifolius]
  misc_feature (1)..(380): NCBI GI NO: 29373061 NR Description: alcohol dehydrogenase 1; ADH1 [Lotus corniculatus]
  misc_feature (1)..(380): NCBI GI NO: 113361 NR Description: ALCOHOL DEHYDROGENASE 1
  misc_feature (1)..(380): NCBI GI NO: 113366 NR Description: Alcohol dehydrogenase 1
  misc_feature (7)..(380): NCBI GI NO: 3694835 NR Description: alcohol dehydrogenase Adh-1 [Glycine max]
  misc_feature (1)..(342): NCBI GI NO: 4039115 NR Description: alcohol-dehydrogenase [Glycine max]
  misc_feature (3)..(379): NCBI GI NO: 2570176 NR Description: alcohol dehydrogenase [Arabis gemmifera]
  misc_feature (3)..(379): NCBI GI NO: 6684361 NR Description: alcohol dehydrogenase [Arabis hirsuta]
  misc_feature (4)..(379): NCBI GI NO: 6684359 NR Description: alcohol dehydrogenase [Arabis hirsuta]
MSSTAGQVIKCKAAVSWEAGKPLVIEEVEVAPPQAGEVRLKILYTSLCHTDVYFWEAKGQTPLFPRIFGHEAGGIVESVGEGVTHLKPGDHALPVFTGECGDCPHCKSEESNMCDLLRINTDRGVMIHDSQTRFSIKGQPIYHFVGTSTFSEYTVVHAGCVAKVNPAAPLDKICVLSCGICTGLGATINVAKPKPGSSVAIFGLGAVGLAAAEGARISGASRIIGVDLVSSRFEEAKKFGVNEFVNPKDHDKPVQEVIAAMTNGGVDRAVECTGSIQAMISAFECVHDGWGVAVLVGVPNKDDAFKTHPVNFLNERTLKGTFYGNYKPRTDLPSVVEKYMNGELELEKFITHTVPFSEINKAFDYMLKGESIRCIIRMGE

SEQ ID NO: 8919 - protein, 268 aa, Glycine max
  peptide (1)..(268): Ceres Seq. ID no. 15177752
  misc_feature (1)..(268): NCBI GI NO: 1085622 NR Description: alcohol dehydrogenase (EC 1
  misc_feature (1)..(268): NCBI GI NO: 452767 NR Description: alcohol dehydrogenase-1CN [Phaseolus acutifolius]
  misc_feature (1)..(268): NCBI GI NO: 29373061 NR Description: alcohol dehydrogenase 1; ADH1 [Lotus corniculatus]
  misc_feature (1)..(268): NCBI GI NO: 113361 NR Description: ALCOHOL DEHYDROGENASE 1
  misc_feature (1)..(268): NCBI GI NO: 113366 NR Description: Alcohol dehydrogenase 1
  misc_feature (1)..(268): NCBI GI NO: 3694835 NR Description: alcohol dehydrogenase Adh-1 [Glycine max]
  misc_feature (1)..(230): NCBI GI NO: 4039115 NR Description: alcohol-dehydrogenase [Glycine max]
  misc_feature (1)..(267): NCBI GI NO: 2570176 NR Description: alcohol dehydrogenase [Arabis gemmifera]
  misc_feature (1)..(267): NCBI GI NO: 6684361 NR Description: alcohol dehydrogenase [Arabis hirsuta]
  misc_feature (1)..(267): NCBI GI NO: 6684359 NR Description: alcohol dehydrogenase [Arabis hirsuta]
MCDLLRINTDRGVMIHDSQTRFSIKGQPIYHFVGTSTFSEYTVVHAGCVAKVNPAAPLDKICVLSCGICTGLGATINVAKPKPGSSVAIFGLGAVGLAAAEGARISGASRIIGVDLVSSRFEEAKKFGVNEFVNPKDHDKPVQEVIAAMTNGGVDRAVECTGSIQAMISAFECVHDGWGVAVLVGVPNKDDAFKTHPVNFLNERTLKGTFYGNYKPRTDLPSVVEKYMNGELELEKFITHTVPFSEINKAFDYMLKGESIRCIIRMGE

SEQ ID NO: 8920 - protein, 255 aa, Glycine max
  peptide (1)..(255): Ceres Seq. ID no. 15177753
  misc_feature (1)..(255): NCBI GI NO: 1085622 NR Description: alcohol dehydrogenase (EC 1
  misc_feature (1)..(255): NCBI GI NO: 452767 NR Description: alcohol dehydrogenase-1CN [Phaseolus acutifolius]
  misc_feature (1)..(255): NCBI GI NO: 29373061 NR Description: alcohol dehydrogenase 1; ADH1 [Lotus corniculatus]
  misc_feature (1)..(255): NCBI GI NO: 113361 NR Description: ALCOHOL DEHYDROGENASE 1
  misc_feature (1)..(255): NCBI GI NO: 113366 NR Description: Alcohol dehydrogenase 1
  misc_feature (1)..(255): NCBI GI NO: 3694835 NR Description: alcohol dehydrogenase Adh-1 [Glycine max]
  misc_feature (1)..(217): NCBI GI NO: 4039115 NR Description: alcohol-dehydrogenase [Glycine max]
  misc_feature (1)..(254): NCBI GI NO: 2570176 NR Description: alcohol dehydrogenase [Arabis gemmifera]
  misc_feature (1)..(254): NCBI GI NO: 6684361 NR Description: alcohol dehydrogenase [Arabis hirsuta]
  misc_feature (1)..(254): NCBI GI NO: 6684359 NR Description: alcohol dehydrogenase [Arabis hirsuta]
MIHDSQTRFSIKGQPIYHFVGTSTFSEYTVVHAGCVAKVNPAAPLDKICVLSCGICTGLGATINVAKPKPGSSVAIFGLGAVGLAAAEGARISGASRIIGVDLVSSRFEEAKKFGVNEFVNPKDHDKPVQEVIAAMTNGGVDRAVECTGSIQAMISAFECVHDGWGVAVLVGVPNKDDAFKTHPVNFLNERTLKGTFYGNYKPRTDLPSVVEKYMNGELELEKFITHTVPFSEINKAFDYMLKGESIRCIIRMGE

SEQ ID NO: 8921 - DNA, 1393 bp, Glycine max
  misc_feature (1)..(1393): Ceres Seq. ID no. 14315892
ttttttcccttaacgcaaactgtcatcttgtcattcaccgagaaagtcgtactgattcctcttcatctttcgttaaagcgagtacttttcgttcttgatctgttggttacgatgtcgtattcaaggagatctaggtattctccttctccttctccttctccatacaagcgatacggtaggtctgtgtccaggtctctctcaatgtcaagatccagaagccgttcaaggagtttatcaagagatgcagaaaatccaggaaacaatttgtatgtgacaggattgtctcctaggattaccaagagagaactggagaaacattttgctgctgaaggaaaagtgatagatgtccatctggtagttgatccttggacaagggaatcccgtgggtttggctttgtgacaatggagactcttgaggaggctgaacgatgtgtaaagtatctgaatcactctgtacttgaagggcgtgtcatcacggtggagaaggctaaaagacgacgtggtcgaaccccaacgccagggaggtatctaggactgagaactattcgtgctcgacgtcgctctccaagttactctcctcgtcgctctcctagctattctcccttcagaagaagctacagtcgctctccctattcttcagaccgaagtaggagtcgttcttactctcctgactatcagaggaggtcttactctccatatcactccaggcggaggtcttactctccattctatagccggtacaggtcctattctcgatatgatcgacacaggtcatattctcgatctcgctctccgtatagcaggtcacctgtcagcatgcgtgacagatcatactctccatatgaaatacgatatgactcgccggatgcgcactcctacagaaggcaccgttaccgatctgtttcacaaagtgcctcgcctgatgatcgttattatggaaggcaccgttacaggtctgtttctcggagtgcctcacccaggccaaggagaaggtcaaggaggagctactcacggagtgccacacctgtttcaaagagaagcaactcacgaaatgtgtcccccaggtcaaggaggagccattcaagaagctctaagaggagtggcaaatgtgagaaacgctactcaagaagctcgagtgtgaatgcaagttcaagatcagtatcgaggtcaaatactccaaggtctacctctccttcaacttgaaatttgttggtcctatatggcttaacatcttaggcttatagtggataatatattagtgtggtatatgtatgcagttctagatggagttttcgtttggttccgttcaggacttgtctaaaaaccacctgatcttatttcatgtagtatgggattgaaattatgttactcagtatagattatctaatttcgt

SEQ ID NO: 8922 - protein, 400 aa, Glycine max
  peptide (1)..(400): Ceres Seq. ID no. 14315893
  misc_feature (89)..(160): Pfam Name: a.k.a. RRM, RBD, or RNP domain Pfam Description: RNA recognition motif.
  misc_feature (20)..(398): NCBI GI NO: 28973767 NR Description: putative transformer-SR ribonucleoprotein
  misc_feature (38)..(398): NCBI GI NO: 18390758 NR Description: transformer serine/arginine-rich ribonucleoprotein
  misc_feature (68)..(392): NCBI GI NO: 34902002 NR Description: putative transformer serine/arginine-richribonucleoprotein
  misc_feature (76)..(398): NCBI GI NO: 8778550 NR Description: F22G5.31 [Arabidopsis thaliana]
  misc_feature (31)..(248): NCBI GI NO: 11275253 NR Description: transformer-2-like protein - liverwort
  misc_feature (45)..(280): NCBI GI NO: 40253470 NR Description: putative transformer-SR ribonucleoprotein
  misc_feature (38)..(218): NCBI GI NO: 7489207 NR Description: transformer-SR ribonucleoprotein - common tobacco
  misc_feature (38)..(162): NCBI GI NO: 30680096 NR Description: transformer serine/arginine-rich ribonucleoprotein
  misc_feature (45)..(329): NCBI GI NO: 16944647 NR Description: conserved hypothetical protein [Neurospora crassa]
  misc_feature (45)..(329): NCBI GI NO: 32405782 NR Description: hypothetical protein [Neurospora crassa]
FFPLTQTVILSFTEKVVLIPLHLSLKRVLFVLDLLVTMSYSRRSRYSPSPSPSPYKRYGRSVSRSLSMSRSRSRSRSLSRDAENPGNNLYVTGLSPRITKRELEKHFAAEGKVIDVHLVVDPWTRESRGFGFVTMETLEEAERCVKYLNHSVLEGRVITVEKAKRRRGRTPTPGRYLGLRTIRARRRSPSYSPRRSPSYSPFRRSYSRSPYSSDRSRSRSYSPDYQRRSYSPYHSRRRSYSPFYSRYRSYSRYDRHRSYSRSRSPYSRSPVSMRDRSYSPYEIRYDSPDAHSYRRHRYRSVSQSASPDDRYYGRHRYRSVSRSASPRPRRRSRRSYSRSATPVSKRSNSRNVSPRSRRSHSRSSKRSGKCEKRYSRSSSVNASSRSVSRSNTPRSTSPST

SEQ ID NO: 8923 - protein, 363 aa, Glycine max
  peptide (1)..(363): Ceres Seq. ID no. 14315894
  misc_feature (52)..(123): Pfam Name: a.k.a. RRM, RBD, or RNP domain Pfam Description: RNA recognition motif.
  misc_feature (1)..(361): NCBI GI NO: 28973767 NR Description: putative transformer-SR ribonucleoprotein
  misc_feature (1)..(361): NCBI GI NO: 18390758 NR Description: transformer serine/arginine-rich ribonucleoprotein
  misc_feature (31)..(355): NCBI GI NO: 34902002 NR Description: putative transformer serine/arginine-richribonucleoprotein
  misc_feature (39)..(361): NCBI GI NO: 8778550 NR Description: F22G5.31 [Arabidopsis thaliana]
  misc_feature (1)..(211): NCBI GI NO: 11275253 NR Description: transformer-2-like protein - liverwort
  misc_feature (8)..(243): NCBI GI NO: 40253470 NR Description: putative transformer-SR ribonucleoprotein
  misc_feature (1)..(181): NCBI GI NO: 7489207 NR Description: transformer-SR ribonucleoprotein - common tobacco
  misc_feature (1)..(125): NCBI GI NO: 30680096 NR Description: transformer serine/arginine-rich ribonucleoprotein
  misc_feature (8)..(292): NCBI GI NO: 16944647 NR Description: conserved hypothetical protein [Neurospora crassa]
  misc_feature (8)..(292): NCBI GI NO: 32405782 NR Description: hypothetical protein [Neurospora crassa]
MSYSRRSRYSPSPSPSPYKRYGRSVSRSLSMSRSRSRSRSLSRDAENPGNNLYVTGLSPRITKRELEKHFAAEGKVIDVHLVVDPWTRESRGFGFVTMETLEEAERCVKYLNHSVLEGRVITVEKAKRRRGRTPTPGRYLGLRTIRARRRSPSYSPRRSPSYSPFRRSYSRSPYSSDRSRSRSYSPDYQRRSYSPYHSRRRSYSPFYSRYRSYSRYDRHRSYSRSRSPYSRSPVSMRDRSYSPYEIRYDSPDAHSYRRHRYRSVSQSASPDDRYYGRHRYRSVSRSASPRPRRRSRRSYSRSATPVSKRSNSRNVSPRSRRSHSRSSKRSGKCEKRYSRSSSVNASSRSVSRSNTPRSTSPST

SEQ ID NO: 8924 - protein, 333 aa, Glycine max
  peptide (1)..(333): Ceres Seq. ID no. 14315895
  misc_feature (22)..(93): Pfam Name: a.k.a. RRM, RBD, or RNP domain Pfam Description: RNA recognition motif.
  misc_feature (1)..(331): NCBI GI NO: 28973767 NR Description: putative transformer-SR ribonucleoprotein
  misc_feature (1)..(331): NCBI GI NO: 18390758 NR Description: transformer serine/arginine-rich ribonucleoprotein
  misc_feature (1)..(325): NCBI GI NO: 34902002 NR Description: putative transformer serine/arginine-richribonucleoprotein
  misc_feature (9)..(331): NCBI GI NO: 8778550 NR Description: F22G5.31 [Arabidopsis thaliana]
  misc_feature (1)..(181): NCBI GI NO: 11275253 NR Description: transformer-2-like protein - liverwort
  misc_feature (1)..(213): NCBI GI NO: 40253470 NR Description: putative transformer-SR ribonucleoprotein
  misc_feature (1)..(151): NCBI GI NO: 7489207 NR Description: transformer-SR ribonucleoprotein - common tobacco
  misc_feature (1)..(95): NCBI GI NO: 30680096 NR Description: transformer serine/arginine-rich ribonucleoprotein
  misc_feature (1)..(262): NCBI GI NO: 16944647 NR Description: conserved hypothetical protein [Neurospora crassa]
  misc_feature (1)..(262): NCBI GI NO: 32405782 NR Description: hypothetical protein [Neurospora crassa]
MSRSRSRSRSLSRDAENPGNNLYVTGLSPRITKRELEKHFAAEGKVIDVHLVVDPWTRESRGFGFVTMETLEEAERCVKYLNHSVLEGRVITVEKAKRRRGRTPTPGRYLGLRTIRARRRSPSYSPRRSPSYSPFRRSYSRSPYSSDRSRSRSYSPDYQRRSYSPYHSRRRSYSPFYSRYRSYSRYDRHRSYSRSRSPYSRSPVSMRDRSYSPYEIRYDSPDAHSYRRHRYRSVSQSASPDDRYYGRHRYRSVSRSASPRPRRRSRRSYSRSATPVSKRSNSRNVSPRSRRSHSRSSKRSGKCEKRYSRSSSVNASSRSVSRSNTPRSTSPST

SEQ ID NO: 8925 - DNA, 1750 bp, Glycine max
  misc_feature (1)..(1750): Ceres Seq. ID no. 14316196
aaaaaactctttctctttagccctcaaaggtacccctgaaaagtgaaaggtcttgctcccatttctttaacggcttgttttttattttttaataatcccatcgtaattatcgctttttctcgttgtccactaagaatgtcaagacaggagatcaagatctgaagccttgttgaagaggctgcttctttggatctgaacaatgcctctggctctggatctttgccgcgccttcaaacattgaaaaagacttccatttcttctcgaaggtctggtactgccactttccctagtcctggtacactcaattatcgcgttgcaatgcacaagggatggagctccgagcgagttcccttgcatgcaggtgctacccggaagcacgttttgccgttcaacaatgggaaaacattgccgtcaaagtgggaagatgctgagaggtggattctcagccctgtttcggcagatggcactgggagggcctcgcttaatgcaccccaaaggaggccaaagtccaagagcggtcctcttggaccccctggtgttgcgtatcattctatgtactcgccggccgcgccggtgtttgaagtggggaatggggggagttttatggaaggttctccgtttacaggtgatggtttaataatctgcaccggtggccatggtggagctctttccgtgagaacagaaccttgcatggcacgctcagcaagtgtccacggatgctctaagatacagagtcagtcatcatcaatgcccctccaagaggataagtttggggggttcaaagatgtgggcaccaatgtgtcccgtgccacttcaaggagggacatggcgacccagatgagcccacagggtagctcacgctcctctcctaatctgaggccttctttctctgcctccaccccatcaaccttgcctgtcacagaattgcggactgttggttcctctaaagtggatattagggatgtgcaggtagatgaacacgttaccgtgacaagatggtccaagaaacatagggccctattcactggcagaggctcagaaaaagtcgaaagctggaaaaaagaactaagcactcaatcgtcaacttgggacgtttctgaaacgtcaaagcctgcctcaaagacaagaagtgaggaagccaaaatctctgcatgggagaacttgcaaaaggcaaaagcagaagcagcaatacggaaactagagatgaaattggaaaaaaggcgagcatcctctatggataagattatgaacaagcttagattggcccagaaaaaagctcaggaaatgagaagttcagttccacacaaccaaaccgatcgggttgtaagaacttcacacaaggcttcatcatttcttagaaccagccagatgcgttctttgagtggttgtttcacttgccatgtcttttaagcattctttcatgtttgagtgatggtgggtttccgaaggattcaaatgggccacatgttaatgattgaaaggggcacaacagttgacaaaattggtgttgttgcgttttgctatccatggcaccttctttgaaagtctcagatatcataaaatctaagccccgtgttcgggagtttggattcaatgggtagcaatatttgtaagtaggccaaattttagaaataagatcttttgtatttttttctctcctcccaacatgattgtgtgctgttcaaaaacttcaaatgtaatctaccttatagttgaacgagaaaagcaaccacaatatcatttcgttctc

SEQ ID NO: 8926 - protein, 363 aa, Glycine max
  peptide (1)..(363): Ceres Seq. ID no. 14316197
  misc_feature (249)..(347): Pfam Name: Pfam Description:  Remorin, C-terminal region
  misc_feature (1)..(363): NCBI GI NO: 30693941 NR Description: conserved hypothetical protein
  misc_feature (13)..(362): NCBI GI NO: 18419945 NR Description: expressed protein [Arabidopsis thaliana]
  misc_feature (13)..(362): NCBI GI NO: 15028061 NR Description: unknown protein [Arabidopsis thaliana]
  misc_feature (159)..(353): NCBI GI NO: 28393368 NR Description: unknown protein [Arabidopsis thaliana]
  misc_feature (159)..(353): NCBI GI NO: 18408804 NR Description: expressed protein [Arabidopsis thaliana]
  misc_feature (159)..(353): NCBI GI NO: 21536537 NR Description: unknown [Arabidopsis thaliana]
  misc_feature (175)..(363): NCBI GI NO: 18395321 NR Description: expressed protein [Arabidopsis thaliana]
  misc_feature (139)..(358): NCBI GI NO: 34902218 NR Description: Unknown protein
  misc_feature (170)..(358): NCBI GI NO: 15225899 NR Description: remorin [Arabidopsis thaliana]
  misc_feature (202)..(361): NCBI GI NO: 38344336 NR Description: OSJNBa0058K23.18
MHKGWSSERVPLHAGATRKHVLPFNNGKTLPSKWEDAERWILSPVSADGTGRASLNAPQRRPKSKSGPLGPPGVAYHSMYSPAAPVFEVGNGGSFMEGSPFTGDGLIICTGGHGGALSVRTEPCMARSASVHGCSKIQSQSSSMPLQEDKFGGFKDVGTNVSRATSRRDMATQMSPQGSSRSSPNLRPSFSASTPSTLPVTELRTVGSSKVDIRDVQVDEHVTVTRWSKKHRALFTGRGSEKVESWKKELSTQSSTWDVSETSKPASKTRSEEAKISAWENLQKAKAEAAIRKLEMKLEKRRASSMDKIMNKLRLAQKKAQEMRSSVPHNQTDRVVRTSHKASSFLRTSQMRSLSGCFTCHVF

SEQ ID NO: 8927 - protein, 285 aa, Glycine max
  peptide (1)..(285): Ceres Seq. ID no. 14316198
  misc_feature (171)..(269): Pfam Name: Pfam Description:  Remorin, C-terminal region
  misc_feature (1)..(285): NCBI GI NO: 30693941 NR Description: conserved hypothetical protein
  misc_feature (1)..(284): NCBI GI NO: 18419945 NR Description: expressed protein [Arabidopsis thaliana]
  misc_feature (1)..(284): NCBI GI NO: 15028061 NR Description: unknown protein [Arabidopsis thaliana]
  misc_feature (81)..(275): NCBI GI NO: 28393368 NR Description: unknown protein [Arabidopsis thaliana]
  misc_feature (81)..(275): NCBI GI NO: 18408804 NR Description: expressed protein [Arabidopsis thaliana]
  misc_feature (81)..(275): NCBI GI NO: 21536537 NR Description: unknown [Arabidopsis thaliana]
  misc_feature (97)..(285): NCBI GI NO: 18395321 NR Description: expressed protein [Arabidopsis thaliana]
  misc_feature (61)..(280): NCBI GI NO: 34902218 NR Description: Unknown protein
  misc_feature (92)..(280): NCBI GI NO: 15225899 NR Description: remorin [Arabidopsis thaliana]
  misc_feature (124)..(283): NCBI GI NO: 38344336 NR Description: OSJNBa0058K23.18
MYSPAAPVFEVGNGGSFMEGSPFTGDGLIICTGGHGGALSVRTEPCMARSASVHGCSKIQSQSSSMPLQEDKFGGFKDVGTNVSRATSRRDMATQMSPQGSSRSSPNLRPSFSASTPSTLPVTELRTVGSSKVDIRDVQVDEHVTVTRWSKKHRALFTGRGSEKVESWKKELSTQSSTWDVSETSKPASKTRSEEAKISAWENLQKAKAEAAIRKLEMKLEKRRASSMDKIMNKLRLAQKKAQEMRSSVPHNQTDRVVRTSHKASSFLRTSQMRSLSGCFTCHVF

SEQ ID NO: 8928 - protein, 268 aa, Glycine max
  peptide (1)..(268): Ceres Seq. ID no. 14316199
  misc_feature (154)..(252): Pfam Name: Pfam Description:  Remorin, C-terminal region
  misc_feature (1)..(268): NCBI GI NO: 30693941 NR Description: conserved hypothetical protein
  misc_feature (1)..(267): NCBI GI NO: 18419945 NR Description: expressed protein [Arabidopsis thaliana]
  misc_feature (1)..(267): NCBI GI NO: 15028061 NR Description: unknown protein [Arabidopsis thaliana]
  misc_feature (64)..(258): NCBI GI NO: 28393368 NR Description: unknown protein [Arabidopsis thaliana]
  misc_feature (64)..(258): NCBI GI NO: 18408804 NR Description: expressed protein [Arabidopsis thaliana]
  misc_feature (64)..(258): NCBI GI NO: 21536537 NR Description: unknown [Arabidopsis thaliana]
  misc_feature (80)..(268): NCBI GI NO: 18395321 NR Description: expressed protein [Arabidopsis thaliana]
  misc_feature (44)..(263): NCBI GI NO: 34902218 NR Description: Unknown protein
  misc_feature (75)..(263): NCBI GI NO: 15225899 NR Description: remorin [Arabidopsis thaliana]
  misc_feature (107)..(266): NCBI GI NO: 38344336 NR Description: OSJNBa0058K23.18
MEGSPFTGDGLIICTGGHGGALSVRTEPCMARSASVHGCSKIQSQSSSMPLQEDKFGGFKDVGTNVSRATSRRDMATQMSPQGSSRSSPNLRPSFSASTPSTLPVTELRTVGSSKVDIRDVQVDEHVTVTRWSKKHRALFTGRGSEKVESWKKELSTQSSTWDVSETSKPASKTRSEEAKISAWENLQKAKAEAAIRKLEMKLEKRRASSMDKIMNKLRLAQKKAQEMRSSVPHNQTDRVVRTSHKASSFLRTSQMRSLSGCFTCHVF

SEQ ID NO: 8929 - DNA, 1186 bp, Glycine max
  misc_feature (1)..(1186): Ceres Seq. ID no. 15225673
gttgccttagtctgtgttgagacttgagagttgtgtgcataacacaatcaattaagaagctgtgattctgattcagaatcagaatgttgcgaagatggagcaaagcagttactccaatctccaaatttggatcgcagcagagtcatttgaatttcgtgaaggacgtcacgcgccaaagctacgccggggttgcacccgcgccaacaacgatagaggataaacctcaaccccccgtggttaaacttgacaaaatgttttggtctaagccctgttcgctggccctgccccgggactcacccctcaaagctgaagaacctgattatcagggcatcaagcgtttcatgctcaagctcatgctgttttatagtaagcagagcaagtcaattcgaggcgctaatgttgtgtaccgaagaattgtttctcaaattgataaacctcccatttatgaagtgtttaacttggagaaaacattcaaaacaacattctctttacttgtacttcatatgtggttatgtttgcgtcgcttgaagcaagagggaaatgagggtgttgaatttggccagtacctttatgagatttacaatcatgatgtggagctaagagtctctaaagctggagttaatctactactgactaagtggatgaaagagctcgagaagattttttatgggaacattgttgcttatgatactgccatacttccagaagctaaaccgggtgatttttctaatgttatatggaggaatatattctctgaagatggttcttcaacaccagatgctgctgcatctcaatcagtacaggcgatggccagatatgctcgccgtgaagtaagttgcatgaccttaacagataaagaagcactatattcagggaattttatgttcacctctttgaagcatgagaacagaagcggaaaggggcctcaatgatgaagtggtgatttctaaatttgtgatttagcaaattgaaaatacacgctgttcttattttatttattttttacaaaaaattgttgaataattatgacataaagctcatgtccttctccgtaaggcttttattatacttgattagcttggtgcccagaaactagaactctcatattcttgccctgtaaaatgagaaaagaaaaagggcagaagtgactgaaaaatgttgttctttctcaaaaaaaaaaaaaaaa

SEQ ID NO: 8930 - protein, 282 aa, Glycine max
  peptide (1)..(282): Ceres Seq. ID no. 15225674
  misc_feature (122)..(256): Pfam Name: Pfam Description:  Ubiquinol-cytochrome C chaperone
  misc_feature (1)..(274): NCBI GI NO: 30696021 NR Description: expressed protein [Arabidopsis thaliana]
  misc_feature (37)..(281): NCBI GI NO: 33146996 NR Description: unknown protein
  misc_feature (52)..(256): NCBI GI NO: 8843859 NR Description: contains similarity to unknownprotein~dbj|BAA91854
  misc_feature (92)..(271): NCBI GI NO: 28558076 NR Description: Basic FGF-repressed Zic binding protein homolog
  misc_feature (92)..(271): NCBI GI NO: 39794451 NR Description: Unknown (protein for MGC:76279)
  misc_feature (102)..(268): NCBI GI NO: 22964668 NR Description: hypothetical protein [Rhodopseudomonas palustris]
  misc_feature (92)..(275): NCBI GI NO: 9256564 NR Description: basic FGF repressed, zinc binding protein
  misc_feature (107)..(268): NCBI GI NO: 27380134 NR Description: bll5023 [Bradyrhizobium japonicum]
  misc_feature (65)..(275): NCBI GI NO: 26346196 NR Description: unnamed protein product [Mus musculus]
  misc_feature (105)..(272): NCBI GI NO: 13476949 NR Description: unknown protein [Mesorhizobium loti]
MLRRWSKAVTPISKFGSQQSHLNFVKDVTRQSYAGVAPAPTTIEDKPQPPVVKLDKMFWSKPCSLALPRDSPLKAEEPDYQGIKRFMLKLMLFYSKQSKSIRGANVVYRRIVSQIDKPPIYEVFNLEKTFKTTFSLLVLHMWLCLRRLKQEGNEGVEFGQYLYEIYNHDVELRVSKAGVNLLLTKWMKELEKIFYGNIVAYDTAILPEAKPGDFSNVIWRNIFSEDGSSTPDAAASQSVQAMARYARREVSCMTLTDKEALYSGNFMFTSLKHENRSGKGPQ

SEQ ID NO: 8931 - protein, 226 aa, Glycine max
  peptide (1)..(226): Ceres Seq. ID no. 15225675
  misc_feature (66)..(200): Pfam Name: Pfam Description:  Ubiquinol-cytochrome C chaperone
  misc_feature (1)..(218): NCBI GI NO: 30696021 NR Description: expressed protein [Arabidopsis thaliana]
  misc_feature (1)..(225): NCBI GI NO: 33146996 NR Description: unknown protein
  misc_feature (1)..(200): NCBI GI NO: 8843859 NR Description: contains similarity to unknownprotein~dbj|BAA91854
  misc_feature (36)..(215): NCBI GI NO: 28558076 NR Description: Basic FGF-repressed Zic binding protein homolog
  misc_feature (36)..(215): NCBI GI NO: 39794451 NR Description: Unknown (protein for MGC:76279)
  misc_feature (46)..(212): NCBI GI NO: 22964668 NR Description: hypothetical protein [Rhodopseudomonas palustris]
  misc_feature (36)..(219): NCBI GI NO: 9256564 NR Description: basic FGF repressed, zinc binding protein
  misc_feature (51)..(212): NCBI GI NO: 27380134 NR Description: bll5023 [Bradyrhizobium japonicum]
  misc_feature (9)..(219): NCBI GI NO: 26346196 NR Description: unnamed protein product [Mus musculus]
  misc_feature (49)..(216): NCBI GI NO: 13476949 NR Description: unknown protein [Mesorhizobium loti]
MFWSKPCSLALPRDSPLKAEEPDYQGIKRFMLKLMLFYSKQSKSIRGANVVYRRIVSQIDKPPIYEVFNLEKTFKTTFSLLVLHMWLCLRRLKQEGNEGVEFGQYLYEIYNHDVELRVSKAGVNLLLTKWMKELEKIFYGNIVAYDTAILPEAKPGDFSNVIWRNIFSEDGSSTPDAAASQSVQAMARYARREVSCMTLTDKEALYSGNFMFTSLKHENRSGKGPQ

SEQ ID NO: 8932 - protein, 196 aa, Glycine max
  peptide (1)..(196): Ceres Seq. ID no. 15225676
  misc_feature (36)..(170): Pfam Name: Pfam Description:  Ubiquinol-cytochrome C chaperone
  misc_feature (1)..(188): NCBI GI NO: 30696021 NR Description: expressed protein [Arabidopsis thaliana]
  misc_feature (1)..(195): NCBI GI NO: 33146996 NR Description: unknown protein
  misc_feature (1)..(170): NCBI GI NO: 8843859 NR Description: contains similarity to unknownprotein~dbj|BAA91854
  misc_feature (6)..(185): NCBI GI NO: 28558076 NR Description: Basic FGF-repressed Zic binding protein homolog
  misc_feature (6)..(185): NCBI GI NO: 39794451 NR Description: Unknown (protein for MGC:76279)
  misc_feature (16)..(182): NCBI GI NO: 22964668 NR Description: hypothetical protein [Rhodopseudomonas palustris]
  misc_feature (6)..(189): NCBI GI NO: 9256564 NR Description: basic FGF repressed, zinc binding protein
  misc_feature (21)..(182): NCBI GI NO: 27380134 NR Description: bll5023 [Bradyrhizobium japonicum]
  misc_feature (1)..(189): NCBI GI NO: 26346196 NR Description: unnamed protein product [Mus musculus]
  misc_feature (19)..(186): NCBI GI NO: 13476949 NR Description: unknown protein [Mesorhizobium loti]
MLKLMLFYSKQSKSIRGANVVYRRIVSQIDKPPIYEVFNLEKTFKTTFSLLVLHMWLCLRRLKQEGNEGVEFGQYLYEIYNHDVELRVSKAGVNLLLTKWMKELEKIFYGNIVAYDTAILPEAKPGDFSNVIWRNIFSEDGSSTPDAAASQSVQAMARYARREVSCMTLTDKEALYSGNFMFTSLKHENRSGKGPQ

SEQ ID NO: 8933 - DNA, 1839 bp, Glycine max
  misc_feature (1)..(1839): Ceres Seq. ID no. 14316269
atcacaattcctcaacaacacaacacacaaacacaaaatccccttcaaaacctttcgctttctctctctctctaaagcaaaaacaaaaaagcttccctcgaattgcagaaaatggcaacaatgtccgcatctccaatgaacctcaacatgattgactctaacttcgaagtcgacaagctcacctacgaaatcttctccattctcgagaacaatttcctcttcggctacggcgacaccgaaaatcgcaccaattcgattaattttccgccgagagacgcgaaaccggcgaaacacgccgccggcaaggtccgcatcctctgcattgacggcgccggcgccactgacggcatcctcgccgcgaagtccctcgcgcacctcgaggcctgcctccgccgcaagtcaggcgacgcgaacgcgcgcgtcgccgatttcttcgacgccgccgccggctccggggtcggtggcgtcctcgccgcgctgcttttcactcgcggcaaggacggaaggccgctgtgcagcgccgagggggcgctgcggttcctcaccgacaaccgccgcaggatttcgcggcgggcggggctcctccggcgagtgctccggcctgcggcaaaggcggagaagctcttccgcaagacgttcggggagtgcacgctgaaggacacggtgaagcccgtgctgatcccctgctacgacctcgtcacgcgcgcggcgttcgttttctcgcgcgccgacgcgcttgaagtggacggctacgatttcaagatgcgcgatgtgtgcgccgccacgtcagcggacccatcctctgcccccacagagatgcggtccgtcgacggcaggaccaggatcatggccgtcgacggaggcgtcgccatgaacaatccaacggctgccgccatcacgcacgtgctcaataacaaacatgagttcccgttctgtaacggcgtttccgacctcctcgtactctccctcggtaacggagagtcagactttaacgccgttaagtcctcctctggcttcgtaaggatcgccggcgaaggagcttccgatatggtggatcaagccgtatcgatggcatttggtgagtgtcggacgagcaattatgtgcggattcagtcaaacgggatcatggcaaacaagagcacagaggccaagtcctgcaaaacggcgtcggatttgtttgccatgtcggaggagatgttggcccagaagaacgttgagtccattttgttcagggggaagaaggtggcggagaacaccaacatggacaagttagagttgtttgggggagagttaattaaggagcaagagagaagaaaaacaagcattttagcaacggtggtgttgaagaacaataatgcctcaccctcacccagcagaacttcctctgccactaccttgtccactttgtcctccagtagttaaaaccagaaacagacaagggagattagagggaagaaatccaaagttagatttttcattgtggggttgaatttttatgccagtttttcttttttattttaagtttgtggtgttggggtagctgccgcttgggaccaaattaaggcaaattgagagactgagctgtgcagagccgaatccttaattactactattactattactacctacattatatttattttttttatttttctttagtttttttgggggtatatattacatttttatgtaatgatagtgatttgtgtatatggttattgccatggcatgatttttggtttaatgttagagctgtgcttgatttgtgagaattgtactgttcggtaagaacatcatcatctgatagttaaatagtattgtgactgaatgcagaacact

SEQ ID NO: 8934 - protein, 436 aa, Glycine max
  peptide (1)..(436): Ceres Seq. ID no. 14316270
  misc_feature (69)..(262): Pfam Name: Pfam Description:  Patatin-like phospholipase
  misc_feature (19)..(426): NCBI GI NO: 34897124 NR Description: putative lipid acyl hydrolase [Oryza sativa]
  misc_feature (21)..(405): NCBI GI NO: 34899642 NR Description: contains ESTsAU172959
  misc_feature (161)..(433): NCBI GI NO: 30688454 NR Description: patatin-related [Arabidopsis thaliana]
  misc_feature (47)..(147): NCBI GI NO: 30688454 NR Description: patatin-related [Arabidopsis thaliana]
  misc_feature (7)..(41): NCBI GI NO: 30688454 NR Description: patatin-related [Arabidopsis thaliana]
  misc_feature (60)..(414): NCBI GI NO: 15225054 NR Description: patatin family [Arabidopsis thaliana]
  misc_feature (161)..(423): NCBI GI NO: 7486230 NR Description: hypothetical protein F27B13
  misc_feature (47)..(147): NCBI GI NO: 7486230 NR Description: hypothetical protein F27B13
  misc_feature (7)..(41): NCBI GI NO: 7486230 NR Description: hypothetical protein F27B13
  misc_feature (12)..(421): NCBI GI NO: 15233136 NR Description: patatin-related [Arabidopsis thaliana]
MATMSASPMNLNMIDSNFEVDKLTYEIFSILENNFLFGYGDTENRTNSINFPPRDAKPAKHAAGKVRILCIDGAGATDGILAAKSLAHLEACLRRKSGDANARVADFFDAAAGSGVGGVLAALLFTRGKDGRPLCSAEGALRFLTDNRRRISRRAGLLRRVLRPAAKAEKLFRKTFGECTLKDTVKPVLIPCYDLVTRAAFVFSRADALEVDGYDFKMRDVCAATSADPSSAPTEMRSVDGRTRIMAVDGGVAMNNPTAAAITHVLNNKHEFPFCNGVSDLLVLSLGNGESDFNAVKSSSGFVRIAGEGASDMVDQAVSMAFGECRTSNYVRIQSNGIMANKSTEAKSCKTASDLFAMSEEMLAQKNVESILFRGKKVAENTNMDKLELFGGELIKEQERRKTSILATVVLKNNNASPSPSRTSSATTLSTLSSSS

SEQ ID NO: 8935 - protein, 433 aa, Glycine max
  peptide (1)..(433): Ceres Seq. ID no. 14316271
  misc_feature (66)..(259): Pfam Name: Pfam Description:  Patatin-like phospholipase
  misc_feature (16)..(423): NCBI GI NO: 34897124 NR Description: putative lipid acyl hydrolase [Oryza sativa]
  misc_feature (18)..(402): NCBI GI NO: 34899642 NR Description: contains ESTsAU172959
  misc_feature (158)..(430): NCBI GI NO: 30688454 NR Description: patatin-related [Arabidopsis thaliana]
  misc_feature (44)..(144): NCBI GI NO: 30688454 NR Description: patatin-related [Arabidopsis thaliana]
  misc_feature (4)..(38): NCBI GI NO: 30688454 NR Description: patatin-related [Arabidopsis thaliana]
  misc_feature (57)..(411): NCBI GI NO: 15225054 NR Description: patatin family [Arabidopsis thaliana]
  misc_feature (158)..(420): NCBI GI NO: 7486230 NR Description: hypothetical protein F27B13
  misc_feature (44)..(144): NCBI GI NO: 7486230 NR Description: hypothetical protein F27B13
  misc_feature (4)..(38): NCBI GI NO: 7486230 NR Description: hypothetical protein F27B13
  misc_feature (9)..(418): NCBI GI NO: 15233136 NR Description: patatin-related [Arabidopsis thaliana]
MSASPMNLNMIDSNFEVDKLTYEIFSILENNFLFGYGDTENRTNSINFPPRDAKPAKHAAGKVRILCIDGAGATDGILAAKSLAHLEACLRRKSGDANARVADFFDAAAGSGVGGVLAALLFTRGKDGRPLCSAEGALRFLTDNRRRISRRAGLLRRVLRPAAKAEKLFRKTFGECTLKDTVKPVLIPCYDLVTRAAFVFSRADALEVDGYDFKMRDVCAATSADPSSAPTEMRSVDGRTRIMAVDGGVAMNNPTAAAITHVLNNKHEFPFCNGVSDLLVLSLGNGESDFNAVKSSSGFVRIAGEGASDMVDQAVSMAFGECRTSNYVRIQSNGIMANKSTEAKSCKTASDLFAMSEEMLAQKNVESILFRGKKVAENTNMDKLELFGGELIKEQERRKTSILATVVLKNNNASPSPSRTSSATTLSTLSSSS

SEQ ID NO: 8936 - protein, 428 aa, Glycine max
  peptide (1)..(428): Ceres Seq. ID no. 14316272
  misc_feature (61)..(254): Pfam Name: Pfam Description:  Patatin-like phospholipase
  misc_feature (11)..(418): NCBI GI NO: 34897124 NR Description: putative lipid acyl hydrolase [Oryza sativa]
  misc_feature (13)..(397): NCBI GI NO: 34899642 NR Description: contains ESTsAU172959
  misc_feature (153)..(425): NCBI GI NO: 30688454 NR Description: patatin-related [Arabidopsis thaliana]
  misc_feature (39)..(139): NCBI GI NO: 30688454 NR Description: patatin-related [Arabidopsis thaliana]
  misc_feature (1)..(33): NCBI GI NO: 30688454 NR Description: patatin-related [Arabidopsis thaliana]
  misc_feature (52)..(406): NCBI GI NO: 15225054 NR Description: patatin family [Arabidopsis thaliana]
  misc_feature (153)..(415): NCBI GI NO: 7486230 NR Description: hypothetical protein F27B13
  misc_feature (39)..(139): NCBI GI NO: 7486230 NR Description: hypothetical protein F27B13
  misc_feature (1)..(33): NCBI GI NO: 7486230 NR Description: hypothetical protein F27B13
  misc_feature (4)..(413): NCBI GI NO: 15233136 NR Description: patatin-related [Arabidopsis thaliana]
MNLNMIDSNFEVDKLTYEIFSILENNFLFGYGDTENRTNSINFPPRDAKPAKHAAGKVRILCIDGAGATDGILAAKSLAHLEACLRRKSGDANARVADFFDAAAGSGVGGVLAALLFTRGKDGRPLCSAEGALRFLTDNRRRISRRAGLLRRVLRPAAKAEKLFRKTFGECTLKDTVKPVLIPCYDLVTRAAFVFSRADALEVDGYDFKMRDVCAATSADPSSAPTEMRSVDGRTRIMAVDGGVAMNNPTAAAITHVLNNKHEFPFCNGVSDLLVLSLGNGESDFNAVKSSSGFVRIAGEGASDMVDQAVSMAFGECRTSNYVRIQSNGIMANKSTEAKSCKTASDLFAMSEEMLAQKNVESILFRGKKVAENTNMDKLELFGGELIKEQERRKTSILATVVLKNNNASPSPSRTSSATTLSTLSSSS

SEQ ID NO: 8937 - DNA, 1820 bp, Glycine max
  misc_feature (1)..(1820): Ceres Seq. ID no. 14315993
agtattttggttcgtttcttgttaaaaacgcccccatccccttcgtttcccatttccgaggttgttgccggccacccaaacccaattcacatcattatcttttttctttctttcttgtgtttgtgtgtttcctcaaaattcacaattacaatcctcacaatcctcctcccttcatttctcaaattcccaatatttcaccaattcaaaacccttcatcattgatcttttcactcttttcttctttgctcgcaacattcattcacaatttgggtgctccttctgtttcttctcctcaccattggattggataatctgcaatttcttcaattgacaaaagcaacgggagttgggttccaacggaattatggttttcctcattgcgatgtttagggaagccagctatgtcatttgtcttttgctttgagaaacctaatttgtgatttttaaatggaaaagaaaagattggatgactatgaacctggtcctgttccttcaccaagagcattagatagatttgggtttgtaaaacaggatgttaatacttctgaaggcttagtcaagaatagatcagcctacgagtatgagagatatagggaggagagaagggttagaaaatggaggaagatgattggggttggtggcagtgactggaagcattatctaaggagaaaacctcatgttgtgaaaaggcgtataaggaaaggaattcccgattgtttaaggggccttgtttggcaattgatatctggaagtcgagacctattgctgatgaaccctggagtttatgagcaactagtcatatatgagacatctgcctctgaactggatataattcgagatatttctcgaaccttcccttcacatgtattctttcaacagagacatggacctgggcagcggtccctctacaatgttctaaaagcttactctgtctttgacagagatgtaggctatgttcagggcatgggatttttagcggggcttttgcttctttatatgagtgaggaggatgcattttggttgttggtggcattgctaaaaggagccgttcatgctccaatggagggcttgtatctggcaggattgcctctggtacagcaatacctctttcaatttgaatgctcggtgagggagcatctaccaaagttgggagaacatttttcctatgaaatgataaatcctagcatgtatgctagccagtggttcataactgtattttcatattcctttccatttcatttggctcttcgaatttgggatgtcttcctctacgagggtgttaaaattgtctttaaagttggcttggccctattaaagtactgccatgatgacttgattaaactacctttcgaaaaactcatacatgccttgaaaaactttcccgagggtgcaatgaatccggatacattgttaccactggcttattctatcaagatatccaagcgtttagaagaattgaaacaagagtatgagaagaagaatggaaagataagacgatctggagaactttctgaaaaaccaatacttcctagtgtccagggcaattgaagcaggacatatgcaagacaacatttgctggacatgtaaaactattggtaaagctgagcggaggacctcccagtgaaggtctatctttcctgctgggaactaatccattgtgaaaaccataccctcaaattctatgttgagaccatatgttgcatactatgtacagttgtattagttgctcactcttgtcaaaattcagtgttttataaagatgaagttgtctttataaattgtggttattgttattatgcttaattactattttagttccc

SEQ ID NO: 8938 - protein, 366 aa, Glycine max
  peptide (1)..(366): Ceres Seq. ID no. 14315994
  misc_feature (83)..(299): Pfam Name: Pfam Description:  TBC domain
  misc_feature (1)..(347): NCBI GI NO: 18396196 NR Description: plant adhesion molecule -related
  misc_feature (1)..(347): NCBI GI NO: 15237222 NR Description: plant adhesion molecule 1 (PAM1)
  misc_feature (60)..(347): NCBI GI NO: 22531279 NR Description: plant adhesion molecule PAM1
  misc_feature (1)..(297): NCBI GI NO: 6957709 NR Description: putative plant adhesion molecule
  misc_feature (1)..(313): NCBI GI NO: 30678579 NR Description: plant adhesion molecule -related
  misc_feature (31)..(341): NCBI GI NO: 3095098 NR Description: truncated EVI5 [Homo sapiens]
  misc_feature (31)..(341): NCBI GI NO: 19923325 NR Description: ecotropic viral integration site 5
  misc_feature (31)..(347): NCBI GI NO: 27777640 NR Description: RIKEN cDNA B130050I23 gene [Mus musculus]
  misc_feature (31)..(347): NCBI GI NO: 21687020 NR Description: similar to ecotropic viral integration site 5
  misc_feature (31)..(347): NCBI GI NO: 27692588 NR Description: hypothetical protein MGC29047 [Mus musculus]
MEKKRLDDYEPGPVPSPRALDRFGFVKQDVNTSEGLVKNRSAYEYERYREERRVRKWRKMIGVGGSDWKHYLRRKPHVVKRRIRKGIPDCLRGLVWQLISGSRDLLLMNPGVYEQLVIYETSASELDIIRDISRTFPSHVFFQQRHGPGQRSLYNVLKAYSVFDRDVGYVQGMGFLAGLLLLYMSEEDAFWLLVALLKGAVHAPMEGLYLAGLPLVQQYLFQFECSVREHLPKLGEHFSYEMINPSMYASQWFITVFSYSFPFHLALRIWDVFLYEGVKIVFKVGLALLKYCHDDLIKLPFEKLIHALKNFPEGAMNPDTLLPLAYSIKISKRLEELKQEYEKKNGKIRRSGELSEKPILPSVQGN

SEQ ID NO: 8939 - protein, 307 aa, Glycine max
  peptide (1)..(307): Ceres Seq. ID no. 14315995
  misc_feature (24)..(240): Pfam Name: Pfam Description:  TBC domain
  misc_feature (1)..(288): NCBI GI NO: 18396196 NR Description: plant adhesion molecule -related
  misc_feature (1)..(288): NCBI GI NO: 15237222 NR Description: plant adhesion molecule 1 (PAM1)
  misc_feature (1)..(288): NCBI GI NO: 22531279 NR Description: plant adhesion molecule PAM1
  misc_feature (1)..(238): NCBI GI NO: 6957709 NR Description: putative plant adhesion molecule
  misc_feature (1)..(254): NCBI GI NO: 30678579 NR Description: plant adhesion molecule -related
  misc_feature (1)..(282): NCBI GI NO: 3095098 NR Description: truncated EVI5 [Homo sapiens]
  misc_feature (1)..(282): NCBI GI NO: 19923325 NR Description: ecotropic viral integration site 5
  misc_feature (1)..(288): NCBI GI NO: 27777640 NR Description: RIKEN cDNA B130050I23 gene [Mus musculus]
  misc_feature (1)..(288): NCBI GI NO: 21687020 NR Description: similar to ecotropic viral integration site 5
  misc_feature (1)..(288): NCBI GI NO: 27692588 NR Description: hypothetical protein MGC29047 [Mus musculus]
MIGVGGSDWKHYLRRKPHVVKRRIRKGIPDCLRGLVWQLISGSRDLLLMNPGVYEQLVIYETSASELDIIRDISRTFPSHVFFQQRHGPGQRSLYNVLKAYSVFDRDVGYVQGMGFLAGLLLLYMSEEDAFWLLVALLKGAVHAPMEGLYLAGLPLVQQYLFQFECSVREHLPKLGEHFSYEMINPSMYASQWFITVFSYSFPFHLALRIWDVFLYEGVKIVFKVGLALLKYCHDDLIKLPFEKLIHALKNFPEGAMNPDTLLPLAYSIKISKRLEELKQEYEKKNGKIRRSGELSEKPILPSVQGN

SEQ ID NO: 8940 - protein, 259 aa, Glycine max
  peptide (1)..(259): Ceres Seq. ID no. 14315996
  misc_feature (1)..(192): Pfam Name: Pfam Description:  TBC domain
  misc_feature (1)..(240): NCBI GI NO: 18396196 NR Description: plant adhesion molecule -related
  misc_feature (1)..(240): NCBI GI NO: 15237222 NR Description: plant adhesion molecule 1 (PAM1)
  misc_feature (1)..(240): NCBI GI NO: 22531279 NR Description: plant adhesion molecule PAM1
  misc_feature (1)..(190): NCBI GI NO: 6957709 NR Description: putative plant adhesion molecule
  misc_feature (1)..(206): NCBI GI NO: 30678579 NR Description: plant adhesion molecule -related
  misc_feature (1)..(234): NCBI GI NO: 3095098 NR Description: truncated EVI5 [Homo sapiens]
  misc_feature (1)..(234): NCBI GI NO: 19923325 NR Description: ecotropic viral integration site 5
  misc_feature (1)..(240): NCBI GI NO: 27777640 NR Description: RIKEN cDNA B130050I23 gene [Mus musculus]
  misc_feature (1)..(240): NCBI GI NO: 21687020 NR Description: similar to ecotropic viral integration site 5
  misc_feature (1)..(240): NCBI GI NO: 27692588 NR Description: hypothetical protein MGC29047 [Mus musculus]
MNPGVYEQLVIYETSASELDIIRDISRTFPSHVFFQQRHGPGQRSLYNVLKAYSVFDRDVGYVQGMGFLAGLLLLYMSEEDAFWLLVALLKGAVHAPMEGLYLAGLPLVQQYLFQFECSVREHLPKLGEHFSYEMINPSMYASQWFITVFSYSFPFHLALRIWDVFLYEGVKIVFKVGLALLKYCHDDLIKLPFEKLIHALKNFPEGAMNPDTLLPLAYSIKISKRLEELKQEYEKKNGKIRRSGELSEKPILPSVQGN

SEQ ID NO: 8941 - DNA, 1810 bp, Glycine max
  misc_feature (1)..(1810): Ceres Seq. ID no. 15176053
acaacggaaacacacaaacatttcccggtctcaaactcacagaagcagagccatacagtacaggtcgctgatattttctcctccttcctgaatcctgagtgaccaccggtccggtccaccatggctctcgtctggatggtggccgcggccgtggcggcggtgctggcatcgtgggcgttcaacgcgctggtgtacctcgtgtggcggccgcgggccatcacccggcagctccgcgcgcagggcgtcggcgggccgggctacaggttcttcgccgggaacctcgccgagatcaagcggctccgcgccgacagcgccggcgccgcgctggacatcggcaaccacgacttcgtccccatggtccaaccgcacttccgcaaatggatccccatccacgggcgcacgttcctgtactggttcggagccaggccgacactgtgcgtggccgacgtgaacgtggtgaagcaggtgctctccgaccgcagcgggctgtaccccaagagcatcgggaacccgcacatcgcccggctgctcggcaaggggctcgtgctcaccgacggcgacgactggaagcgccaccgcaaggtcgtccaccccgccttcaacatggacaagctcaagatgatgacggtgaccatgtccgactgtgccgggtcaatgatgtccgagtggaaggcaaagatggagaagggcggcagcgtagaggtcgacctgagccaccagtttgaggagctcaccgcggatgtcatctctcacacggcattcggaagcagctacgaacaggggaaaaaggtcttcctggcgcagagggagctccaattccttgccttttccaccgtattcaacgtgcaaatcccagcattcaggtaccttccaactgaaaagaacctcaaaatatggaagcttgacaaagaggtgaggaccatgctgatgaacatcatcaaaggccgtcttgccaccaaagacaccatgggctacggcagcgacctcctcgggcttatgttggaggcgtgcgcgccagaggatgggcaaaatccgcttttgagtatggatgagatcatagatgagtgcaagaccttcttctttgccgggcatgacaccagctcgcacctgctcacatggaccatgttcttgctgagcacgcaccctgagtggcaggagaagctcagggaggaggtgctaagagagtgtggcaacggtgttcccaccggtgacatgctcaacaaactacagctggtcaacatgttcctactagaaactctcaggttatacgcccctgtatcggccattcagaggaaggcgggttcggatctcgaggttggtggcataaaagtgcctgaaggcacggtcttgacgattcccatcgcgacggtacatcgtgacaaggaggtatggggagaagatgccaatgaattcaagcctacgaggttcgagaatggagtgacaagagccggaaagcaccccaatgctttgttgtctttctctagtgggccgaggtcatgcatagggcagaactttgcaatgatcgaggccaaggctgtgatcgctgtgattcttcagagattttcattctccctatcaccgaagtatgtccatgcccccatggatgtgatcacgctgcggcctaagtttgggcttcccatgatcctcaagagcctagagatgtagaaaaatgtatatggtctcaagtataacacatggttttgtattatttgactggagtttagtttatattgcgcactagaaaatcttgtaaaattaccaatgtataatgtatcctatttgtaaatataaataatgaagtgttctattt

SEQ ID NO: 8942 - protein, 514 aa, Glycine max
  peptide (1)..(514): Ceres Seq. ID no. 15176054
  misc_feature (1)..(514): NCBI GI NO: 38112707 NR Description: cytochrome P450 [Triticum aestivum]
  misc_feature (3)..(514): NCBI GI NO: 22324446 NR Description: putative cytochrome P450
  misc_feature (3)..(514): NCBI GI NO: 34913354 NR Description: putative cytochrome P450
  misc_feature (4)..(514): NCBI GI NO: 34913346 NR Description: putative cytochrome P450
  misc_feature (1)..(514): NCBI GI NO: 34913350 NR Description: putative cytochrome P450
  misc_feature (4)..(513): NCBI GI NO: 14719280 NR Description: cytochrome P450 [Zea mays]
  misc_feature (1)..(512): NCBI GI NO: 15234248 NR Description: cytochrome P450 family [Arabidopsis thaliana]
  misc_feature (100)..(512): NCBI GI NO: 9294385 NR Description: cytochrome P450-like protein
  misc_feature (91)..(483): NCBI GI NO: 117162 NR Description: Cytochrome P450 3A12 (CYPIIIA12) (P450-PBD-1)
  misc_feature (107)..(507): NCBI GI NO: 15888887 NR Description: AGR_C_2890p [Agrobacterium tumefaciens]
MALVWMVAAAVAAVLASWAFNALVYLVWRPRAITRQLRAQGVGGPGYRFFAGNLAEIKRLRADSAGAALDIGNHDFVPMVQPHFRKWIPIHGRTFLYWFGARPTLCVADVNVVKQVLSDRSGLYPKSIGNPHIARLLGKGLVLTDGDDWKRHRKVVHPAFNMDKLKMMTVTMSDCAGSMMSEWKAKMEKGGSVEVDLSHQFEELTADVISHTAFGSSYEQGKKVFLAQRELQFLAFSTVFNVQIPAFRYLPTEKNLKIWKLDKEVRTMLMNIIKGRLATKDTMGYGSDLLGLMLEACAPEDGQNPLLSMDEIIDECKTFFFAGHDTSSHLLTWTMFLLSTHPEWQEKLREEVLRECGNGVPTGDMLNKLQLVNMFLLETLRLYAPVSAIQRKAGSDLEVGGIKVPEGTVLTIPIATVHRDKEVWGEDANEFKPTRFENGVTRAGKHPNALLSFSSGPRSCIGQNFAMIEAKAVIAVILQRFSFSLSPKYVHAPMDVITLRPKFGLPMILKSLEM

SEQ ID NO: 8943 - protein, 509 aa, Glycine max
  peptide (1)..(509): Ceres Seq. ID no. 15176055
  misc_feature (1)..(509): NCBI GI NO: 38112707 NR Description: cytochrome P450 [Triticum aestivum]
  misc_feature (1)..(509): NCBI GI NO: 22324446 NR Description: putative cytochrome P450
  misc_feature (1)..(509): NCBI GI NO: 34913354 NR Description: putative cytochrome P450
  misc_feature (1)..(509): NCBI GI NO: 34913346 NR Description: putative cytochrome P450
  misc_feature (1)..(509): NCBI GI NO: 34913350 NR Description: putative cytochrome P450
  misc_feature (1)..(508): NCBI GI NO: 14719280 NR Description: cytochrome P450 [Zea mays]
  misc_feature (1)..(507): NCBI GI NO: 15234248 NR Description: cytochrome P450 family [Arabidopsis thaliana]
  misc_feature (95)..(507): NCBI GI NO: 9294385 NR Description: cytochrome P450-like protein
  misc_feature (86)..(478): NCBI GI NO: 117162 NR Description: Cytochrome P450 3A12 (CYPIIIA12) (P450-PBD-1)
  misc_feature (102)..(502): NCBI GI NO: 15888887 NR Description: AGR_C_2890p [Agrobacterium tumefaciens]
MVAAAVAAVLASWAFNALVYLVWRPRAITRQLRAQGVGGPGYRFFAGNLAEIKRLRADSAGAALDIGNHDFVPMVQPHFRKWIPIHGRTFLYWFGARPTLCVADVNVVKQVLSDRSGLYPKSIGNPHIARLLGKGLVLTDGDDWKRHRKVVHPAFNMDKLKMMTVTMSDCAGSMMSEWKAKMEKGGSVEVDLSHQFEELTADVISHTAFGSSYEQGKKVFLAQRELQFLAFSTVFNVQIPAFRYLPTEKNLKIWKLDKEVRTMLMNIIKGRLATKDTMGYGSDLLGLMLEACAPEDGQNPLLSMDEIIDECKTFFFAGHDTSSHLLTWTMFLLSTHPEWQEKLREEVLRECGNGVPTGDMLNKLQLVNMFLLETLRLYAPVSAIQRKAGSDLEVGGIKVPEGTVLTIPIATVHRDKEVWGEDANEFKPTRFENGVTRAGKHPNALLSFSSGPRSCIGQNFAMIEAKAVIAVILQRFSFSLSPKYVHAPMDVITLRPKFGLPMILKSLEM

SEQ ID NO: 8944 - protein, 436 aa, Glycine max
  peptide (1)..(436): Ceres Seq. ID no. 15176056
  misc_feature (1)..(436): NCBI GI NO: 38112707 NR Description: cytochrome P450 [Triticum aestivum]
  misc_feature (1)..(436): NCBI GI NO: 22324446 NR Description: putative cytochrome P450
  misc_feature (1)..(436): NCBI GI NO: 34913354 NR Description: putative cytochrome P450
  misc_feature (1)..(436): NCBI GI NO: 34913346 NR Description: putative cytochrome P450
  misc_feature (1)..(436): NCBI GI NO: 34913350 NR Description: putative cytochrome P450
  misc_feature (1)..(435): NCBI GI NO: 14719280 NR Description: cytochrome P450 [Zea mays]
  misc_feature (1)..(434): NCBI GI NO: 15234248 NR Description: cytochrome P450 family [Arabidopsis thaliana]
  misc_feature (22)..(434): NCBI GI NO: 9294385 NR Description: cytochrome P450-like protein
  misc_feature (13)..(405): NCBI GI NO: 117162 NR Description: Cytochrome P450 3A12 (CYPIIIA12) (P450-PBD-1)
  misc_feature (29)..(429): NCBI GI NO: 15888887 NR Description: AGR_C_2890p [Agrobacterium tumefaciens]
MVQPHFRKWIPIHGRTFLYWFGARPTLCVADVNVVKQVLSDRSGLYPKSIGNPHIARLLGKGLVLTDGDDWKRHRKVVHPAFNMDKLKMMTVTMSDCAGSMMSEWKAKMEKGGSVEVDLSHQFEELTADVISHTAFGSSYEQGKKVFLAQRELQFLAFSTVFNVQIPAFRYLPTEKNLKIWKLDKEVRTMLMNIIKGRLATKDTMGYGSDLLGLMLEACAPEDGQNPLLSMDEIIDECKTFFFAGHDTSSHLLTWTMFLLSTHPEWQEKLREEVLRECGNGVPTGDMLNKLQLVNMFLLETLRLYAPVSAIQRKAGSDLEVGGIKVPEGTVLTIPIATVHRDKEVWGEDANEFKPTRFENGVTRAGKHPNALLSFSSGPRSCIGQNFAMIEAKAVIAVILQRFSFSLSPKYVHAPMDVITLRPKFGLPMILKSLEM

SEQ ID NO: 8945 - DNA, 854 bp, Glycine max
  misc_feature (1)..(854): Ceres Seq. ID no. 14315878
tccctttggttcccgtatcagtatcaaagtccaggacgatgtcgtttgggtcctctctgttgtctcattcgcatgcccttcgattcttgtccaacaacaacagaaacagaacctcccgcttcaaagccactgccaaagttcccgatttcctctctgcagattggtttgaatcgcgcaagaaaataccctttggaccacgattagattttagtgcagaagatgcggtgcattaccagcttgaagccttgaagtataatgaccagcctcgtccagactatggaatcgaggttatgtacaggtttgctggatttgatccctttgaaaggtctccctattttggccctttctttgatttgggccagtttgaacggtttaggcgaatttttcaccattctacttatcgggtcttactaggtcacaaggagagaaagatcatgagcactttgttcgtcgaggagaacaaatacaagcagcgggtttggattcgtggaagtcgaccagaggaagaggagatatttcaacttacaatggtttagaaggttggaggatgctgggatggttactggttaacagagtctctgcttcacgatacggatacatttgccggtggattagcatattgaaagtcatctaatgcaggaatcaggctcgtgaggttccactgtcaaaagcatgaaatgatctgcattcctgcaactactatcctaatctgtaaaatttgtgtacatatgtaagaaattcagctgttaatatgtgtatataattggtcctcgctaatcaaatgtaaacattcttgtatattttgctgaatgttgcaggagctagcatactttaatgcttatgctcacatctgt

SEQ ID NO: 8946 - protein, 177 aa, Glycine max
  peptide (1)..(177): Ceres Seq. ID no. 14315879
  misc_feature (13)..(177): NCBI GI NO: 30682820 NR Description: expressed protein [Arabidopsis thaliana]
PLVPVSVSKSRTMSFGSSLLSHSHALRFLSNNNRNRTSRFKATAKVPDFLSADWFESRKKIPFGPRLDFSAEDAVHYQLEALKYNDQPRPDYGIEVMYRFAGFDPFERSPYFGPFFDLGQFERFRRIFHHSTYRVLLGHKERKIMSTLFVEENKYKQRVWIRGSRPEEEEIFQLTMV

SEQ ID NO: 8947 - protein, 165 aa, Glycine max
  peptide (1)..(165): Ceres Seq. ID no. 14315880
  misc_feature (1)..(165): NCBI GI NO: 30682820 NR Description: expressed protein [Arabidopsis thaliana]
MSFGSSLLSHSHALRFLSNNNRNRTSRFKATAKVPDFLSADWFESRKKIPFGPRLDFSAEDAVHYQLEALKYNDQPRPDYGIEVMYRFAGFDPFERSPYFGPFFDLGQFERFRRIFHHSTYRVLLGHKERKIMSTLFVEENKYKQRVWIRGSRPEEEEIFQLTMV

SEQ ID NO: 8948 - DNA, 1045 bp, Glycine max
  misc_feature (1)..(1045): Ceres Seq. ID no. 14305540
agtctctgaatctgaaattgcaatgcttcacccggcggcactgatagcatcgtgtccttatccttatccttatcctgggcggcatgagttaccctcagcctcagcgtcagcgacagccagagtcgctgttccaatgccaaatctgagaggcaaagcggttgttggtgttggttccagaatgataaggtgcatggctaaccccagaagagttcaaatggtggccaagcaaattaggagagagctttctcatatgcttctcaccgataaagtcttgcagtatgctgttcttcccgaagcctccttaggagccgaccgttacctctcttctctcaccaccatcaccgacgtccaagtctccgccgacttgcaggttgttaaggtgtatgtttctgtttttggagatgaaagaggtaaagaagtcgccattgccggcttgaaatctaaggctaaatatgttcgcagcgagttgggcaagcgtatcaagttgcgcttaactcctgagatacgctttcttgaggatgattcttttgagagaggaagcagggtcattgcaatactagataaaataaagaatgacaaaagccaatacaaggcggagttggattcgtcaccaaatgaggatcacgacgatgattgggatggtgaagatcctgaagaaggcatcatttatgtggaatagatgtctccctatgtaactctatcactactgtgcatctttcatatggacaaacctttcactgttgatagtgatcggaaacacttcactaaaatgcttgctggacagacgctgttctagatttgtagttgtgacaagtcacaattgacaacattatctcaacacaaagaccttcttgcgttgtctatccccaagtgatgtgatgtagaccaattttggggttttctctccttttatatgccttaacccaggatcttactatacaagagggtttgctgtataaagttcttttcctgctttacttattcctgtaagtggaatttataatgtttactattgctatgctattcgaattcggctgtcttcaac

SEQ ID NO: 8949 - protein, 225 aa, Glycine max
  peptide (1)..(225): Ceres Seq. ID no. 14305541
  misc_feature (69)..(189): Pfam Name: Pfam Description:  Ribosome-binding factor A
  misc_feature (59)..(225): NCBI GI NO: 30690114 NR Description: expressed protein [Arabidopsis thaliana]
  misc_feature (59)..(218): NCBI GI NO: 3914555 NR Description: Putative ribosome-binding factor A
  misc_feature (81)..(225): NCBI GI NO: 3914555 NR Description: Putative ribosome-binding factor A
  misc_feature (64)..(211): NCBI GI NO: 23127176 NR Description: hypothetical protein [Nostoc punctiforme]
  misc_feature (64)..(207): NCBI GI NO: 17227559 NR Description: ribosome binding facror A [Nostoc sp. PCC 7120]
  misc_feature (64)..(210): NCBI GI NO: 23039367 NR Description: hypothetical protein
  misc_feature (64)..(194): NCBI GI NO: 22299172 NR Description: ribosome binding factor A
  misc_feature (64)..(203): NCBI GI NO: 16331339 NR Description: hypothetical protein [Synechocystis sp. PCC 6803]
  misc_feature (104)..(193): NCBI GI NO: 28210962 NR Description: ribosome-binding factor A [Clostridium tetani E88]
  misc_feature (112)..(193): NCBI GI NO: 16078728 NR Description: ribosome-binding factor A [Bacillus subtilis]
VSESEIAMLHPAALIASCPYPYPYPGRHELPSASASATARVAVPMPNLRGKAVVGVGSRMIRCMANPRRVQMVAKQIRRELSHMLLTDKVLQYAVLPEASLGADRYLSSLTTITDVQVSADLQVVKVYVSVFGDERGKEVAIAGLKSKAKYVRSELGKRIKLRLTPEIRFLEDDSFERGSRVIAILDKIKNDKSQYKAELDSSPNEDHDDDWDGEDPEEGIIYVE

SEQ ID NO: 8950 - protein, 218 aa, Glycine max
  peptide (1)..(218): Ceres Seq. ID no. 14305542
  misc_feature (62)..(182): Pfam Name: Pfam Description:  Ribosome-binding factor A
  misc_feature (52)..(218): NCBI GI NO: 30690114 NR Description: expressed protein [Arabidopsis thaliana]
  misc_feature (52)..(211): NCBI GI NO: 3914555 NR Description: Putative ribosome-binding factor A
  misc_feature (74)..(218): NCBI GI NO: 3914555 NR Description: Putative ribosome-binding factor A
  misc_feature (57)..(204): NCBI GI NO: 23127176 NR Description: hypothetical protein [Nostoc punctiforme]
  misc_feature (57)..(200): NCBI GI NO: 17227559 NR Description: ribosome binding facror A [Nostoc sp. PCC 7120]
  misc_feature (57)..(203): NCBI GI NO: 23039367 NR Description: hypothetical protein
  misc_feature (57)..(187): NCBI GI NO: 22299172 NR Description: ribosome binding factor A
  misc_feature (57)..(196): NCBI GI NO: 16331339 NR Description: hypothetical protein [Synechocystis sp. PCC 6803]
  misc_feature (97)..(186): NCBI GI NO: 28210962 NR Description: ribosome-binding factor A [Clostridium tetani E88]
  misc_feature (105)..(186): NCBI GI NO: 16078728 NR Description: ribosome-binding factor A [Bacillus subtilis]
MLHPAALIASCPYPYPYPGRHELPSASASATARVAVPMPNLRGKAVVGVGSRMIRCMANPRRVQMVAKQIRRELSHMLLTDKVLQYAVLPEASLGADRYLSSLTTITDVQVSADLQVVKVYVSVFGDERGKEVAIAGLKSKAKYVRSELGKRIKLRLTPEIRFLEDDSFERGSRVIAILDKIKNDKSQYKAELDSSPNEDHDDDWDGEDPEEGIIYVE

SEQ ID NO: 8951 - protein, 181 aa, Glycine max
  peptide (1)..(181): Ceres Seq. ID no. 14305543
  misc_feature (25)..(145): Pfam Name: Pfam Description:  Ribosome-binding factor A
  misc_feature (15)..(181): NCBI GI NO: 30690114 NR Description: expressed protein [Arabidopsis thaliana]
  misc_feature (15)..(174): NCBI GI NO: 3914555 NR Description: Putative ribosome-binding factor A
  misc_feature (37)..(181): NCBI GI NO: 3914555 NR Description: Putative ribosome-binding factor A
  misc_feature (20)..(167): NCBI GI NO: 23127176 NR Description: hypothetical protein [Nostoc punctiforme]
  misc_feature (20)..(163): NCBI GI NO: 17227559 NR Description: ribosome binding facror A [Nostoc sp. PCC 7120]
  misc_feature (20)..(166): NCBI GI NO: 23039367 NR Description: hypothetical protein
  misc_feature (20)..(150): NCBI GI NO: 22299172 NR Description: ribosome binding factor A
  misc_feature (20)..(159): NCBI GI NO: 16331339 NR Description: hypothetical protein [Synechocystis sp. PCC 6803]
  misc_feature (60)..(149): NCBI GI NO: 28210962 NR Description: ribosome-binding factor A [Clostridium tetani E88]
  misc_feature (68)..(149): NCBI GI NO: 16078728 NR Description: ribosome-binding factor A [Bacillus subtilis]
MPNLRGKAVVGVGSRMIRCMANPRRVQMVAKQIRRELSHMLLTDKVLQYAVLPEASLGADRYLSSLTTITDVQVSADLQVVKVYVSVFGDERGKEVAIAGLKSKAKYVRSELGKRIKLRLTPEIRFLEDDSFERGSRVIAILDKIKNDKSQYKAELDSSPNEDHDDDWDGEDPEEGIIYVE

SEQ ID NO: 8952 - DNA, 1643 bp, Glycine max
  misc_feature (1)..(1643): Ceres Seq. ID no. 13594317
acattgtaacagccaaaggcaggtggaatccaattctcaaaccccaatcgttagactaagcaagaggtcgttcagtgtaagtactccttgttcttgtttctgtttcatcatttttgatcttatgctagtcgaatcaattgtgatgcttagaattagtcaatgaagctccctgtgcgttacttgattgttattttgaccttcgtctgcacctcggtttgctacatcgaacgagttgggttttccatcgcgtacacagttgctgctgacggtgccggagtgaatcaatcgagcaaaggtacaatactgtccaccttctattacggatacgcctgttctcaagttcccggaggatgggcagctcagaaaatcggggggaggagggtcctgcttctttcctttctgttgtggtcattaacttgtgcactacttcctctagatcccaatcgcgttatgcttttagtcattgctcgtttgctcgttggtatagcacaaggcttcattttcccctccatccacacagttctagctcaatgggttccccctcacgagagatctagatccgtctctctcaccacttctgggatgtacctaggtgcagctctaggtatgcttcttcttcctactctagtcaagttcagaggtcctcaatctgtgtttcttgcggaggccgcattgggcgcttcatggtctttactttggttcaaatacgccactgatcccaaatccactgcctctggtgtcggggaatcagtcttgcccgtcaataaaaaaattgacactcacaacaaaaaaccgctttcagccaaaatcccctgggtcaaaattttaaccagcttccctgtgtgggcgattgttgtcaacaatttcacctttcactatgctttatatgtgctcatgaactggctcccaacctactttgaattgggccttcagcttagcctgcaagatatgggttcctctaaaatgatgccctatctcaacatgttcctcttctccaacattggcggtgttgtcgcggactacttgatcaccaggagaatattatctgtcaccaaaaccaggaaattcttgaacactgtcggattcttggttgcttctcttgccttggtgatcattcccagtttcagaacttctggtggtgctgtcttctgttcttccgtggctcttggtttcttggcacttggcagagctggctttgccgtgaaccacatggacattgctcctagatacgctggaatagtgatgggtgtttctaatactgccggtacgttagctggcattgttggcgttgacctgactgggaagcttcttgaagctgctaaggctgctaattctgatctttcaagtccagaaagctggagggcagtgttttccattcctgggtttctatgcatttttagttcttttgtatttctactattttcaactggggagagaatttttgattgaggtaaccttgtcattttcatgactcatcagctgttgttattctgaggatttactttttattacatctccatgttatatcattcttggataggagagctcatattgtcataattggatatgaatttttgttgttattattattatttccccatcttgtaaaaaaaaaaaaaaaaaagcttatcgataccgtcgac

SEQ ID NO: 8953 - protein, 429 aa, Glycine max
  peptide (1)..(429): Ceres Seq. ID no. 13594318
  misc_feature (19)..(428): Pfam Name: and other Pfam Description: Sugar
  misc_feature (3)..(429): NCBI GI NO: 15241475 NR Description: transporter - related [Arabidopsis thaliana]
  misc_feature (2)..(429): NCBI GI NO: 30678625 NR Description: expressed protein [Arabidopsis thaliana]
  misc_feature (2)..(429): NCBI GI NO: 15227589 NR Description: inorganic phosphate transporter, putative
  misc_feature (2)..(429): NCBI GI NO: 17064976 NR Description: putative Na+-dependent inorganic phosphatecotransporter
  misc_feature (2)..(429): NCBI GI NO: 34903342 NR Description: unnamed protein product
  misc_feature (46)..(426): NCBI GI NO: 16758166 NR Description: differentation-associated Na-dependent inorganicphosphate cotra
  misc_feature (46)..(426): NCBI GI NO: 9966811 NR Description: differentiation-associated Na-dependent inorganicphosphate cotr
  misc_feature (46)..(426): NCBI GI NO: 9945322 NR Description: solute carrier family 17, member 7
  misc_feature (46)..(426): NCBI GI NO: 33334644 NR Description: glutamate transporter [Xenopus laevis]
  misc_feature (44)..(425): NCBI GI NO: 27370146 NR Description: hypothetical protein 4732491M05 [Mus musculus]
MKLPVRYLIVILTFVCTSVCYIERVGFSIAYTVAADGAGVNQSSKGTILSTFYYGYACSQVPGGWAAQKIGGRRVLLLSFLLWSLTCALLPLDPNRVMLLVIARLLVGIAQGFIFPSIHTVLAQWVPPHERSRSVSLTTSGMYLGAALGMLLLPTLVKFRGPQSVFLAEAALGASWSLLWFKYATDPKSTASGVGESVLPVNKKIDTHNKKPLSAKIPWVKILTSFPVWAIVVNNFTFHYALYVLMNWLPTYFELGLQLSLQDMGSSKMMPYLNMFLFSNIGGVVADYLITRRILSVTKTRKFLNTVGFLVASLALVIIPSFRTSGGAVFCSSVALGFLALGRAGFAVNHMDIAPRYAGIVMGVSNTAGTLAGIVGVDLTGKLLEAAKAANSDLSSPESWRAVFSIPGFLCIFSSFVFLLFSTGERIFD

SEQ ID NO: 8954 - protein, 332 aa, Glycine max
  peptide (1)..(332): Ceres Seq. ID no. 13594319
  misc_feature (1)..(331): Pfam Name: and other Pfam Description: Sugar
  misc_feature (1)..(332): NCBI GI NO: 15241475 NR Description: transporter - related [Arabidopsis thaliana]
  misc_feature (1)..(332): NCBI GI NO: 30678625 NR Description: expressed protein [Arabidopsis thaliana]
  misc_feature (1)..(332): NCBI GI NO: 15227589 NR Description: inorganic phosphate transporter, putative
  misc_feature (1)..(332): NCBI GI NO: 17064976 NR Description: putative Na+-dependent inorganic phosphatecotransporter
  misc_feature (1)..(332): NCBI GI NO: 34903342 NR Description: unnamed protein product
  misc_feature (1)..(329): NCBI GI NO: 16758166 NR Description: differentation-associated Na-dependent inorganicphosphate cotra
  misc_feature (1)..(329): NCBI GI NO: 9966811 NR Description: differentiation-associated Na-dependent inorganicphosphate cotr
  misc_feature (1)..(329): NCBI GI NO: 9945322 NR Description: solute carrier family 17, member 7
  misc_feature (1)..(329): NCBI GI NO: 33334644 NR Description: glutamate transporter [Xenopus laevis]
  misc_feature (1)..(328): NCBI GI NO: 27370146 NR Description: hypothetical protein 4732491M05 [Mus musculus]
MLLVIARLLVGIAQGFIFPSIHTVLAQWVPPHERSRSVSLTTSGMYLGAALGMLLLPTLVKFRGPQSVFLAEAALGASWSLLWFKYATDPKSTASGVGESVLPVNKKIDTHNKKPLSAKIPWVKILTSFPVWAIVVNNFTFHYALYVLMNWLPTYFELGLQLSLQDMGSSKMMPYLNMFLFSNIGGVVADYLITRRILSVTKTRKFLNTVGFLVASLALVIIPSFRTSGGAVFCSSVALGFLALGRAGFAVNHMDIAPRYAGIVMGVSNTAGTLAGIVGVDLTGKLLEAAKAANSDLSSPESWRAVFSIPGFLCIFSSFVFLLFSTGERIFD

SEQ ID NO: 8955 - protein, 288 aa, Glycine max
  peptide (1)..(288): Ceres Seq. ID no. 13594320
  misc_feature (1)..(287): Pfam Name: and other Pfam Description: Sugar
  misc_feature (1)..(288): NCBI GI NO: 15241475 NR Description: transporter - related [Arabidopsis thaliana]
  misc_feature (1)..(288): NCBI GI NO: 30678625 NR Description: expressed protein [Arabidopsis thaliana]
  misc_feature (1)..(288): NCBI GI NO: 15227589 NR Description: inorganic phosphate transporter, putative
  misc_feature (1)..(288): NCBI GI NO: 17064976 NR Description: putative Na+-dependent inorganic phosphatecotransporter
  misc_feature (1)..(288): NCBI GI NO: 34903342 NR Description: unnamed protein product
  misc_feature (1)..(285): NCBI GI NO: 16758166 NR Description: differentation-associated Na-dependent inorganicphosphate cotra
  misc_feature (1)..(285): NCBI GI NO: 9966811 NR Description: differentiation-associated Na-dependent inorganicphosphate cotr
  misc_feature (1)..(285): NCBI GI NO: 9945322 NR Description: solute carrier family 17, member 7
  misc_feature (1)..(285): NCBI GI NO: 33334644 NR Description: glutamate transporter [Xenopus laevis]
  misc_feature (1)..(284): NCBI GI NO: 27370146 NR Description: hypothetical protein 4732491M05 [Mus musculus]
MYLGAALGMLLLPTLVKFRGPQSVFLAEAALGASWSLLWFKYATDPKSTASGVGESVLPVNKKIDTHNKKPLSAKIPWVKILTSFPVWAIVVNNFTFHYALYVLMNWLPTYFELGLQLSLQDMGSSKMMPYLNMFLFSNIGGVVADYLITRRILSVTKTRKFLNTVGFLVASLALVIIPSFRTSGGAVFCSSVALGFLALGRAGFAVNHMDIAPRYAGIVMGVSNTAGTLAGIVGVDLTGKLLEAAKAANSDLSSPESWRAVFSIPGFLCIFSSFVFLLFSTGERIFD

SEQ ID NO: 8956 - DNA, 1232 bp, Glycine max
  misc_feature (1)..(1232): Ceres Seq. ID no. 12608262
gaattaatagagatacagataacgtgaaactgaaaggaaaatggcactctcagtctcctcaccctcatgcgtacgcgttccttcatgtttttggaaaccaaatggcaagagttgcaaagagcgtactaaggtttcatgtgcagctcacaatgataataagaatccgttggttggaatcggtattggggttgtaacgtcttgtgtgatgggtttaactgcattggatgcggacgccacgagaatcgaatactacgcaacagtggcagagcctttgtgtgagtacaactatgttaagtctggcctcggctactgcgatattgctgagggcttcggtgacgaagctccactgggtgagcttatcaatgttcactatactgcgagattcgctgatgggatagtattcgatagcagctataaacgtgctagacctctcaccatgcgcattggtgtgggcaaggtaatcaagggactggatcaggggattttagggggtgaaggagtacctccaatgcggataggtgggaaacgcaaactgcagattcctccgcacttagcatatggccctgaacctgcagggtgcttctcaggtgactgcaatatacccgccaatgccactcttctgtatgatattaattttgttgaggtttattcggggaacagatcaaagtgaagtcagtcaaaactggtcagatacatatatacatatgaaccacagatggatgggtttagagcaatgaaatggacattttgctagagaatatggatcaacttgtttggcagaatcttcttcctgattacaactacctcaagttactgttcctggttagtggagttgtacatgattgacctggatatcccttttgagagtaatgagcaatccttcctggtgatatatattaagataattcatgtgtatctctgcacatgacatgcgaacagtttgtgcatctttagtgtaaatgtaattttcaatactgctctgaatgataaaaaattgttaattcttcatttgataaatgcctgtctctaatacgtgatatgctttacccttttcaccttcctgtctgaaataggcatggctctacatgcttagagcagtaaaatgcaaagggagaatcataatttcaaaagattaacaggattagcagttaaacgtgttcaaatatgatttctatgctgaattgattaatcacccgtttgcaggtaattcatctaaagttagaaatatgttc

SEQ ID NO: 8957 - protein, 209 aa, Glycine max
  peptide (1)..(209): Ceres Seq. ID no. 12608263
  misc_feature (96)..(200): Pfam Name: Pfam Description:  FKBP-type peptidyl-prolyl cis-trans isomerase
  misc_feature (14)..(209): NCBI GI NO: 18420509 NR Description: FKBP-type peptidyl-prolyl cis-trans isomerase
  misc_feature (14)..(188): NCBI GI NO: 7487207 NR Description: hypothetical protein T19P19
  misc_feature (68)..(200): NCBI GI NO: 15242472 NR Description: FKBP-type peptidyl-prolyl cis-trans isomerase
  misc_feature (68)..(200): NCBI GI NO: 21535744 NR Description: FK506 binding protein 1 [Arabidopsis thaliana]
  misc_feature (133)..(209): NCBI GI NO: 15529204 NR Description: AT4g39710/T19P19_100 [Arabidopsis thaliana]
  misc_feature (96)..(171): NCBI GI NO: 6686802 NR Description: FKBP like protein [Arabidopsis thaliana]
  misc_feature (86)..(205): NCBI GI NO: 22970827 NR Description: hypothetical protein [Chloroflexus aurantiacus]
  misc_feature (85)..(202): NCBI GI NO: 16329650 NR Description: FKBP-type peptidyl-prolyl cis-trans isomerase
  misc_feature (86)..(202): NCBI GI NO: 22298646 NR Description: FKBP-type peptidyl-prolyl cis-trans isomerase
  misc_feature (86)..(202): NCBI GI NO: 33861849 NR Description: FKBP-type peptidyl-prolyl cis-trans isomerase
MALSVSSPSCVRVPSCFWKPNGKSCKERTKVSCAAHNDNKNPLVGIGIGVVTSCVMGLTALDADATRIEYYATVAEPLCEYNYVKSGLGYCDIAEGFGDEAPLGELINVHYTARFADGIVFDSSYKRARPLTMRIGVGKVIKGLDQGILGGEGVPPMRIGGKRKLQIPPHLAYGPEPAGCFSGDCNIPANATLLYDINFVEVYSGNRSK

SEQ ID NO: 8958 - protein, 154 aa, Glycine max
  peptide (1)..(154): Ceres Seq. ID no. 12608264
  misc_feature (41)..(145): Pfam Name: Pfam Description:  FKBP-type peptidyl-prolyl cis-trans isomerase
  misc_feature (1)..(154): NCBI GI NO: 18420509 NR Description: FKBP-type peptidyl-prolyl cis-trans isomerase
  misc_feature (1)..(133): NCBI GI NO: 7487207 NR Description: hypothetical protein T19P19
  misc_feature (13)..(145): NCBI GI NO: 15242472 NR Description: FKBP-type peptidyl-prolyl cis-trans isomerase
  misc_feature (13)..(145): NCBI GI NO: 21535744 NR Description: FK506 binding protein 1 [Arabidopsis thaliana]
  misc_feature (78)..(154): NCBI GI NO: 15529204 NR Description: AT4g39710/T19P19_100 [Arabidopsis thaliana]
  misc_feature (41)..(116): NCBI GI NO: 6686802 NR Description: FKBP like protein [Arabidopsis thaliana]
  misc_feature (31)..(150): NCBI GI NO: 22970827 NR Description: hypothetical protein [Chloroflexus aurantiacus]
  misc_feature (30)..(147): NCBI GI NO: 16329650 NR Description: FKBP-type peptidyl-prolyl cis-trans isomerase
  misc_feature (31)..(147): NCBI GI NO: 22298646 NR Description: FKBP-type peptidyl-prolyl cis-trans isomerase
  misc_feature (31)..(147): NCBI GI NO: 33861849 NR Description: FKBP-type peptidyl-prolyl cis-trans isomerase
MGLTALDADATRIEYYATVAEPLCEYNYVKSGLGYCDIAEGFGDEAPLGELINVHYTARFADGIVFDSSYKRARPLTMRIGVGKVIKGLDQGILGGEGVPPMRIGGKRKLQIPPHLAYGPEPAGCFSGDCNIPANATLLYDINFVEVYSGNRSK

SEQ ID NO: 8959 - DNA, 1239 bp, Glycine max
  misc_feature (1)..(1239): Ceres Seq. ID no. 15171139
atgcacacacatatcagcataagaacaaatgatcatgaagtgaagtgaagtgaagtgtatataaaatactttggaagtgtcgtgaagagccaataacggttttttgtgtgtttctttctctctcatgttgtagtatctcacttgtgtttttcattcgtttctgaaccacacaaacatcaccaccgaacaatgccgacggggttaccggcggcgaattccttagtggcgccggacgaagaggggtgggtgtgggggcagatcaaggcggaggcgcgccgcgacgccgagtcggagcctgctttggcgagctacctctactcgacgatcctctcgcactcgtcgctcgagcgttctctgtcttttcacctcggaaataagctctgttcctccacgcttctctcgacgctcctttacgacctgttcctcaacgccttctcctccgacccctccctccgctccgccgccgtcgccgatctccgcgctgcccgcgaacgcgaccccgcctgcgtctcctactcccactgcctcctcaattacaaaggcttcctcgcttgccaggcgcaccgtgtggcgcatctgttgtggcggcaatcacggcggccgttggctttagcgctgcactctcgcatcgcagatgtgtttgcggtggacattcacccggcggcaaggattgggaaggggattctgttcgaccatgccactggggtggtggtaggggagacagcggtaatcgggaacaatgtgtcgatcctgcaccatgttactctgggtgggactggcaaggttggtggagaccggcatcctaagattggggatggggtgcttattggtgctggtgctaccattctggggaatattaagattggggaaggtgcaaaggttggtgctggttcagtggttttaattgatgtgccaccacggacaacagcagttgggaacccggcgaggttggttggtgggaaggagaagccctctaagcatgaggatgtgcctggggagtctatggaccatacttcctttatctctgagtggtcagattatatcatttgaatttctaaggttaatcaattaatgaatgaatacttcaaatcaaatgctatgtgttctgctgttctagagttttgtaattttatatttggattgagattttgtagagaccacactctgcttaattatactgtattatgactggaaattttggcagcctgcaatatagtgacatattgtgcaacagattat

SEQ ID NO: 8960 - protein, 286 aa, Glycine max
  peptide (1)..(286): Ceres Seq. ID no. 15171140
  misc_feature (1)..(286): NCBI GI NO: 18252508 NR Description: serine acetyltransferase [Glycine max]
  misc_feature (15)..(286): NCBI GI NO: 1361979 NR Description: serine O-acetyltransferase (EC 2
  misc_feature (15)..(286): NCBI GI NO: 23343585 NR Description: serine acetyltransferase 7 [Nicotiana tabacum]
  misc_feature (5)..(286): NCBI GI NO: 28460066 NR Description: serine O-acetyltransferase [Beta vulgaris]
  misc_feature (1)..(286): NCBI GI NO: 7433702 NR Description: serine O-acetyltransferase (EC 2.3.1.30) - spinach
  misc_feature (7)..(286): NCBI GI NO: 15241928 NR Description: serine acetyltransferase (Sat-52)
  misc_feature (7)..(286): NCBI GI NO: 21537083 NR Description: serine O-acetyltransferase (EC 2.3.1.30) Sat-52
  misc_feature (16)..(286): NCBI GI NO: 7384806 NR Description: serine acetyltransferase [Allium tuberosum]
  misc_feature (1)..(286): NCBI GI NO: 6601494 NR Description: serine acetyltransferase [Allium cepa]
  misc_feature (1)..(286): NCBI GI NO: 25991547 NR Description: satase isoform I [Zea mays]
MPTGLPAANSLVAPDEEGWVWGQIKAEARRDAESEPALASYLYSTILSHSSLERSLSFHLGNKLCSSTLLSTLLYDLFLNAFSSDPSLRSAAVADLRAARERDPACVSYSHCLLNYKGFLACQAHRVAHLLWRQSRRPLALALHSRIADVFAVDIHPAARIGKGILFDHATGVVVGETAVIGNNVSILHHVTLGGTGKVGGDRHPKIGDGVLIGAGATILGNIKIGEGAKVGAGSVVLIDVPPRTTAVGNPARLVGGKEKPSKHEDVPGESMDHTSFISEWSDYII

SEQ ID NO: 8961 - DNA, 1199 bp, Glycine max
  misc_feature (1)..(1199): Ceres Seq. ID no. 13594298
acaaccaataccatcaacacttcatttcttactctcactgaaaaaaaatagcttgttcacaccatcctattttttcaactcatatatacaaatatatataacatggcttctaccttctctcgaagcctagcacttgtaagcttttacattgtcgtttgtgctgccggtaacttgaaccaagactttcagcttacgtggggagatggtcgtgctaaaatactcaacaacgaaaatcttctcactctctcccttgacaaggcctctggctctggcttccaatccaaaaacgaatacttatatggcaagattgacatgcagctcaagctcgttcctggaaactctgctggcactgtcaccgcctattatctgtcttcaaaaggatcaacatgggatgagattgacttcgagttcttggggaatctgagtggcgatccatacattctacacaccaatgtgttcagccaaggcaagggcaacagagagcaacaattctatctctggtttgacccaactgcagatttccacacttattcaattctttggaatccccaacgcattgttttttctgtggatggcacccccatcagggaattcaagaatttggaatcaataggagttccttttccaaagagccaaccgatgaggatatactcaagcctatggaacgctgatgattgggccacaaggggtggactcatcaagactgactggtccaaagctcctttcactgcatcctacagaaacttcaacgccaatgcttgtgtttggaactctggaaaatcctcatgcaaatcaaattcttcaccttcctctgcatctcccactaatgcatggttatcacaagagcttgattccactgctcagcagaggttgcgttgggtgcagaagaactacttgatttacaattactgcaccgacaacaagagatttcctcaaggccttccactcgaatgcaaacactcctagagcctataggactcacatctcgcactacccataacaagtgttgcaatataatcttatgaaccattcttttaatttttgtattcctttttttttttttgttcgatgcttgagtgctatagtgctgttattatacaaatatacaatgtaaaaatatcccatgtaaaataatgcttctgtttttttttttaaaaaaaaaataatgcttctcttgtttgtatgactgaattttgtgt

SEQ ID NO: 8962 - protein, 287 aa, Glycine max
  peptide (1)..(287): Ceres Seq. ID no. 13594299
  misc_feature (25)..(205): Pfam Name: Pfam Description:  Glycosyl hydrolases family 16
  misc_feature (5)..(284): NCBI GI NO: 19911573 NR Description: syringolide-induced protein 19-1-5 [Glycine max]
  misc_feature (1)..(284): NCBI GI NO: 29500891 NR Description: putative xyloglucan endotransglycosylase
  misc_feature (11)..(284): NCBI GI NO: 3901012 NR Description: xyloglucan endotransglycosylase 1
  misc_feature (1)..(284): NCBI GI NO: 8886867 NR Description: xyloglucan endotransglycosylase XET2
  misc_feature (2)..(284): NCBI GI NO: 29500893 NR Description: putative xyloglucan endotransglycosylase
  misc_feature (9)..(284): NCBI GI NO: 22947852 NR Description: xyloglucan endotransglycosylase
  misc_feature (9)..(284): NCBI GI NO: 15235997 NR Description: xyloglucan endotransglycosylase (XTR-6)
  misc_feature (9)..(284): NCBI GI NO: 17064792 NR Description: xyloglucan endo-1, 4-beta-D-glucanase (XTR-6)
  misc_feature (1)..(284): NCBI GI NO: 15242781 NR Description: xyloglucan endotransglycosylase (TCH4)
  misc_feature (22)..(286): NCBI GI NO: 8886865 NR Description: xyloglucan endotransglycosylase XET1
MASTFSRSLALVSFYIVVCAAGNLNQDFQLTWGDGRAKILNNENLLTLSLDKASGSGFQSKNEYLYGKIDMQLKLVPGNSAGTVTAYYLSSKGSTWDEIDFEFLGNLSGDPYILHTNVFSQGKGNREQQFYLWFDPTADFHTYSILWNPQRIVFSVDGTPIREFKNLESIGVPFPKSQPMRIYSSLWNADDWATRGGLIKTDWSKAPFTASYRNFNANACVWNSGKSSCKSNSSPSSASPTNAWLSQELDSTAQQRLRWVQKNYLIYNYCTDNKRFPQGLPLECKHS

SEQ ID NO: 8963 - protein, 217 aa, Glycine max
  peptide (1)..(217): Ceres Seq. ID no. 13594300
  misc_feature (1)..(135): Pfam Name: Pfam Description:  Glycosyl hydrolases family 16
  misc_feature (1)..(214): NCBI GI NO: 19911573 NR Description: syringolide-induced protein 19-1-5 [Glycine max]
  misc_feature (1)..(214): NCBI GI NO: 29500891 NR Description: putative xyloglucan endotransglycosylase
  misc_feature (1)..(214): NCBI GI NO: 3901012 NR Description: xyloglucan endotransglycosylase 1
  misc_feature (1)..(214): NCBI GI NO: 8886867 NR Description: xyloglucan endotransglycosylase XET2
  misc_feature (1)..(214): NCBI GI NO: 29500893 NR Description: putative xyloglucan endotransglycosylase
  misc_feature (1)..(214): NCBI GI NO: 22947852 NR Description: xyloglucan endotransglycosylase
  misc_feature (1)..(214): NCBI GI NO: 15235997 NR Description: xyloglucan endotransglycosylase (XTR-6)
  misc_feature (1)..(214): NCBI GI NO: 17064792 NR Description: xyloglucan endo-1, 4-beta-D-glucanase (XTR-6)
  misc_feature (1)..(214): NCBI GI NO: 15242781 NR Description: xyloglucan endotransglycosylase (TCH4)
  misc_feature (1)..(216): NCBI GI NO: 8886865 NR Description: xyloglucan endotransglycosylase XET1
MQLKLVPGNSAGTVTAYYLSSKGSTWDEIDFEFLGNLSGDPYILHTNVFSQGKGNREQQFYLWFDPTADFHTYSILWNPQRIVFSVDGTPIREFKNLESIGVPFPKSQPMRIYSSLWNADDWATRGGLIKTDWSKAPFTASYRNFNANACVWNSGKSSCKSNSSPSSASPTNAWLSQELDSTAQQRLRWVQKNYLIYNYCTDNKRFPQGLPLECKHS

SEQ ID NO: 8964 - DNA, 1730 bp, Glycine max
  misc_feature (1)..(1730): Ceres Seq. ID no. 15168502
cttcttggtcttcttctcttaatcctctccaccacattcgaagggaacgttacaaaaaaatcaccattttttctcattgttaatcaagttaagataagatcattcctctctatcaacaaacctttattgtgtatatatatatatattcccacaattcacatcactcttgtccttcactcattcactctatatatccacttcatataatttcctccacattgtgcaccgttcatggtgatggcaaaactaaagcacccttcattggtggcacttcttctagtactagcgtgtctttttattgctccaacatcctcaacatccagaaaaacaagtttcaagcagcagcacccttgcccaacaacaaatgggttccgagtcatgcttcgccacgtcgattcgggaaaaaacttaaccaaactagagcgtgtccaacacgggatcaagcgtggaaagagcaggcttcagaagcttaatgcaatggtgttggcagcatcatcaacacctgattctgaagatcagttagaagcccctattcacgcaggaaatggagagtacttaatagagttagccattggaacaccaccagtgtcttaccctgcggttttggacactggcagtgaccttatatggacacagtgcaagccttgcacacggtgttacaaacaaccaacacccatttttgatcccaagaagtcctcttctttttccaaggtttcatgcggtagtagcttgtgcagtgctttgccttcttcaacatgcagtgatgggtgtgagtatgtttattcatacggtgattattcaatgacacaaggcgttttggctaccgagactttcacttttgggaagtctaagaacaaggtttccgttcacaacattggttttggttgtggggaggacaatgaaggtgatggatttgaacaagcttcagggctggttggtcttggacgtggtcctttgtctttggtttctcaactcaaggaacaaagattttcttattgtttgaccccaattgatgacacaaaagaaagtgttttgttgttggggtctttgggtaaagtgaaagatgcaaaagaagtggtgacaacacctcttctcaaaaaccctttgcaaccttctttttactatctttctcttgaagctatctctgttggggacactcgattgtccattgagaagtccacttttgaagtgggggatgatgggaatggtggtgtgatcatagactctggcaccacaatcacctacgttcaacaaaaggcctatgaggcactcaaaaaagagttcatttctcaaaccaaacttgctttggacaaaactagctcaacagggttggatctttgtttctccttgccatcagggtcaacacaagtggagattccaaagcttgttttccatttcaagggtggggatttggagcttcctgctgagaactacatgattggtgactccaatttgggagtggcttgtttggccatgggtgcttctagtggaatgtctatatttggaaatgttcaacagcagaacattttggtgaaccatgatcttgaaaaggagaccatttcttttgttcctacgtcgtgtgatcagttgtgagagtgtgtgatatatttactgattagtgtatgtttttattgctttgtttgtttgataattttctgttgccggacttgtgttgttatgattgaatctcttagttgttgcaataatatgaacatttttattctctgttc

SEQ ID NO: 8965 - protein, 453 aa, Glycine max
  peptide (1)..(453): Ceres Seq. ID no. 15168503
  misc_feature (110)..(448): Pfam Name: Pfam Description:  Eukaryotic aspartyl protease
  misc_feature (3)..(453): NCBI GI NO: 30678047 NR Description: chloroplast nucleoid DNA binding protein -related
  misc_feature (110)..(453): NCBI GI NO: 20197342 NR Description: putative chloroplast nucleoid DNA binding protein
  misc_feature (46)..(453): NCBI GI NO: 38344829 NR Description: OSJNBa0064H22.10
  misc_feature (44)..(453): NCBI GI NO: 34898756 NR Description: OJ1131_E05.2
  misc_feature (46)..(453): NCBI GI NO: 34898762 NR Description: OJ1131_E05.5
  misc_feature (16)..(450): NCBI GI NO: 15228618 NR Description: expressed protein [Arabidopsis thaliana]
  misc_feature (48)..(450): NCBI GI NO: 15222611 NR Description: expressed protein [Arabidopsis thaliana]
  misc_feature (73)..(450): NCBI GI NO: 34895664 NR Description: nucleoid DNA-binding protein cnd41-like protein
  misc_feature (104)..(450): NCBI GI NO: 15229656 NR Description: chloroplast nucleoid DNA-binding protein -related
  misc_feature (104)..(450): NCBI GI NO: 19424106 NR Description: putative chloroplast nucleoid DNA-binding protein
MVMAKLKHPSLVALLLVLACLFIAPTSSTSRKTSFKQQHPCPTTNGFRVMLRHVDSGKNLTKLERVQHGIKRGKSRLQKLNAMVLAASSTPDSEDQLEAPIHAGNGEYLIELAIGTPPVSYPAVLDTGSDLIWTQCKPCTRCYKQPTPIFDPKKSSSFSKVSCGSSLCSALPSSTCSDGCEYVYSYGDYSMTQGVLATETFTFGKSKNKVSVHNIGFGCGEDNEGDGFEQASGLVGLGRGPLSLVSQLKEQRFSYCLTPIDDTKESVLLLGSLGKVKDAKEVVTTPLLKNPLQPSFYYLSLEAISVGDTRLSIEKSTFEVGDDGNGGVIIDSGTTITYVQQKAYEALKKEFISQTKLALDKTSSTGLDLCFSLPSGSTQVEIPKLVFHFKGGDLELPAENYMIGDSNLGVACLAMGASSGMSIFGNVQQQNILVNHDLEKETISFVPTSCDQL

SEQ ID NO: 8966 - protein, 451 aa, Glycine max
  peptide (1)..(451): Ceres Seq. ID no. 15168504
  misc_feature (108)..(446): Pfam Name: Pfam Description:  Eukaryotic aspartyl protease
  misc_feature (1)..(451): NCBI GI NO: 30678047 NR Description: chloroplast nucleoid DNA binding protein -related
  misc_feature (108)..(451): NCBI GI NO: 20197342 NR Description: putative chloroplast nucleoid DNA binding protein
  misc_feature (44)..(451): NCBI GI NO: 38344829 NR Description: OSJNBa0064H22.10
  misc_feature (42)..(451): NCBI GI NO: 34898756 NR Description: OJ1131_E05.2
  misc_feature (44)..(451): NCBI GI NO: 34898762 NR Description: OJ1131_E05.5
  misc_feature (14)..(448): NCBI GI NO: 15228618 NR Description: expressed protein [Arabidopsis thaliana]
  misc_feature (46)..(448): NCBI GI NO: 15222611 NR Description: expressed protein [Arabidopsis thaliana]
  misc_feature (71)..(448): NCBI GI NO: 34895664 NR Description: nucleoid DNA-binding protein cnd41-like protein
  misc_feature (102)..(448): NCBI GI NO: 15229656 NR Description: chloroplast nucleoid DNA-binding protein -related
  misc_feature (102)..(448): NCBI GI NO: 19424106 NR Description: putative chloroplast nucleoid DNA-binding protein
MAKLKHPSLVALLLVLACLFIAPTSSTSRKTSFKQQHPCPTTNGFRVMLRHVDSGKNLTKLERVQHGIKRGKSRLQKLNAMVLAASSTPDSEDQLEAPIHAGNGEYLIELAIGTPPVSYPAVLDTGSDLIWTQCKPCTRCYKQPTPIFDPKKSSSFSKVSCGSSLCSALPSSTCSDGCEYVYSYGDYSMTQGVLATETFTFGKSKNKVSVHNIGFGCGEDNEGDGFEQASGLVGLGRGPLSLVSQLKEQRFSYCLTPIDDTKESVLLLGSLGKVKDAKEVVTTPLLKNPLQPSFYYLSLEAISVGDTRLSIEKSTFEVGDDGNGGVIIDSGTTITYVQQKAYEALKKEFISQTKLALDKTSSTGLDLCFSLPSGSTQVEIPKLVFHFKGGDLELPAENYMIGDSNLGVACLAMGASSGMSIFGNVQQQNILVNHDLEKETISFVPTSCDQL

SEQ ID NO: 8967 - protein, 404 aa, Glycine max
  peptide (1)..(404): Ceres Seq. ID no. 15168505
  misc_feature (61)..(399): Pfam Name: Pfam Description:  Eukaryotic aspartyl protease
  misc_feature (1)..(404): NCBI GI NO: 30678047 NR Description: chloroplast nucleoid DNA binding protein -related
  misc_feature (61)..(404): NCBI GI NO: 20197342 NR Description: putative chloroplast nucleoid DNA binding protein
  misc_feature (1)..(404): NCBI GI NO: 38344829 NR Description: OSJNBa0064H22.10
  misc_feature (1)..(404): NCBI GI NO: 34898756 NR Description: OJ1131_E05.2
  misc_feature (1)..(404): NCBI GI NO: 34898762 NR Description: OJ1131_E05.5
  misc_feature (1)..(401): NCBI GI NO: 15228618 NR Description: expressed protein [Arabidopsis thaliana]
  misc_feature (1)..(401): NCBI GI NO: 15222611 NR Description: expressed protein [Arabidopsis thaliana]
  misc_feature (24)..(401): NCBI GI NO: 34895664 NR Description: nucleoid DNA-binding protein cnd41-like protein
  misc_feature (55)..(401): NCBI GI NO: 15229656 NR Description: chloroplast nucleoid DNA-binding protein -related
  misc_feature (55)..(401): NCBI GI NO: 19424106 NR Description: putative chloroplast nucleoid DNA-binding protein
MLRHVDSGKNLTKLERVQHGIKRGKSRLQKLNAMVLAASSTPDSEDQLEAPIHAGNGEYLIELAIGTPPVSYPAVLDTGSDLIWTQCKPCTRCYKQPTPIFDPKKSSSFSKVSCGSSLCSALPSSTCSDGCEYVYSYGDYSMTQGVLATETFTFGKSKNKVSVHNIGFGCGEDNEGDGFEQASGLVGLGRGPLSLVSQLKEQRFSYCLTPIDDTKESVLLLGSLGKVKDAKEVVTTPLLKNPLQPSFYYLSLEAISVGDTRLSIEKSTFEVGDDGNGGVIIDSGTTITYVQQKAYEALKKEFISQTKLALDKTSSTGLDLCFSLPSGSTQVEIPKLVFHFKGGDLELPAENYMIGDSNLGVACLAMGASSGMSIFGNVQQQNILVNHDLEKETISFVPTSCDQL

SEQ ID NO: 8968 - DNA, 1320 bp, Glycine max
  misc_feature (1)..(1320): Ceres Seq. ID no. 14316277
attccaatagcgaggcgagacatcgattccaaaggtgcgtttctgctgtgctagggtttctgcatcttccacctccgtcgcgatgaaaccaggcttcatctgattccgatttcccttcgctccttctcctccttaacattcatcttcttcgattcctctacaaattatgattattattatgatgaactccatcttcgcctcgcataaccttcgcgtcttcggtcccggcttgaatcccttcgcaccttattgcatcgccaatcactcccttttcctttccctttcctctcgctaaattacaattccctttctttttcctctccaacttctccttctccgtttctccgaacatgtaaattcggaggacaccgtctttgattcggtctatttttttgggggttactttacttcggttacgcgtcgtcgttttgcttttctttgtcgtcgtttttgcgttgcgttgattgctgagaaagaaagaaagaaagaaagatgctggaggaacagcctgttgttttgttcaggaagagcccttccaggaggcgcttgagatctgcttttgctaccgatgataggggttggacctcgcttcatgttttcgctcgaaaaggcgatctcaaattggttaaaaaacttctcaatgaaggaatggatgtcaatgtgtctgcatggggccccaaatcaaaaggggtgacccctctccaccttgctgccgaaggtggtcacattggagtgatggatgtactacttgagtgtggtgctgacattgatgccagaactaagggtgcttgtggctggacgccgctccacattgcagccaaggaaaggaggagggatgctgtgaaattcttgatagagaatggagccttcatgccacctgatatcagtgatagcagatttaacccaccgcttcattactgccccggactggaatgggcctatgaggagatgaagcgacttcgtcaggaagacttgtctgctggagagacatgttacagctctgaaagttaatttgcttttcagggatttggttggtgtttgatagtgtgtttggatgccattcagaggagatcaaagttaatataactagcttttgcgtcacctttacaaatttgacatgaaaatatgctgatacgtacattcagaaagcgtatccagacatgcactgtatctgtattgtatgaataaatgtacaattgaaataaaactactatgtagtgtatggggatgttttactattttagcatcttggatgcccttgtttatggaaacaattatgtacgattattaatgtgatatgctgtgattgttgatgtttcc

SEQ ID NO: 8969 - protein, 172 aa, Glycine max
  peptide (1)..(172): Ceres Seq. ID no. 14316278
  misc_feature (100)..(125): Pfam Name: Pfam Description:  Ankyrin repeat
  misc_feature (1)..(170): NCBI GI NO: 11357401 NR Description: hypothetical protein F13G24
  misc_feature (1)..(170): NCBI GI NO: 18415625 NR Description: expressed protein [Arabidopsis thaliana]
  misc_feature (1)..(172): NCBI GI NO: 15240185 NR Description: expressed protein [Arabidopsis thaliana]
  misc_feature (24)..(126): NCBI GI NO: 28373837 NR Description: Chain A
  misc_feature (29)..(141): NCBI GI NO: 28373837 NR Description: Chain A
  misc_feature (29)..(126): NCBI GI NO: 28373835 NR Description: Chain A
  misc_feature (24)..(125): NCBI GI NO: 28373666 NR Description: Chain A
  misc_feature (24)..(141): NCBI GI NO: 28274852 NR Description: ankyrin repeat protein E4_2 [synthetic construct]
  misc_feature (24)..(125): NCBI GI NO: 28274850 NR Description: ankyrin repeat protein E3_19 [synthetic construct]
  misc_feature (37)..(125): NCBI GI NO: 28274844 NR Description: ankyrin repeat protein E2_5 [synthetic construct]
MLEEQPVVLFRKSPSRRRLRSAFATDDRGWTSLHVFARKGDLKLVKKLLNEGMDVNVSAWGPKSKGVTPLHLAAEGGHIGVMDVLLECGADIDARTKGACGWTPLHIAAKERRRDAVKFLIENGAFMPPDISDSRFNPPLHYCPGLEWAYEEMKRLRQEDLSAGETCYSSES

SEQ ID NO: 8970 - protein, 120 aa, Glycine max
  peptide (1)..(120): Ceres Seq. ID no. 14316279
  misc_feature (48)..(73): Pfam Name: Pfam Description:  Ankyrin repeat
  misc_feature (1)..(118): NCBI GI NO: 11357401 NR Description: hypothetical protein F13G24
  misc_feature (1)..(118): NCBI GI NO: 18415625 NR Description: expressed protein [Arabidopsis thaliana]
  misc_feature (1)..(120): NCBI GI NO: 15240185 NR Description: expressed protein [Arabidopsis thaliana]
  misc_feature (1)..(74): NCBI GI NO: 28373837 NR Description: Chain A
  misc_feature (1)..(89): NCBI GI NO: 28373837 NR Description: Chain A
  misc_feature (1)..(74): NCBI GI NO: 28373835 NR Description: Chain A
  misc_feature (1)..(73): NCBI GI NO: 28373666 NR Description: Chain A
  misc_feature (1)..(89): NCBI GI NO: 28274852 NR Description: ankyrin repeat protein E4_2 [synthetic construct]
  misc_feature (1)..(73): NCBI GI NO: 28274850 NR Description: ankyrin repeat protein E3_19 [synthetic construct]
  misc_feature (1)..(73): NCBI GI NO: 28274844 NR Description: ankyrin repeat protein E2_5 [synthetic construct]
MDVNVSAWGPKSKGVTPLHLAAEGGHIGVMDVLLECGADIDARTKGACGWTPLHIAAKERRRDAVKFLIENGAFMPPDISDSRFNPPLHYCPGLEWAYEEMKRLRQEDLSAGETCYSSES

SEQ ID NO: 8971 - protein, 91 aa, Glycine max
  peptide (1)..(91): Ceres Seq. ID no. 14316280
  misc_feature (19)..(44): Pfam Name: Pfam Description:  Ankyrin repeat
  misc_feature (1)..(89): NCBI GI NO: 11357401 NR Description: hypothetical protein F13G24
  misc_feature (1)..(89): NCBI GI NO: 18415625 NR Description: expressed protein [Arabidopsis thaliana]
  misc_feature (1)..(91): NCBI GI NO: 15240185 NR Description: expressed protein [Arabidopsis thaliana]
  misc_feature (1)..(45): NCBI GI NO: 28373837 NR Description: Chain A
  misc_feature (1)..(60): NCBI GI NO: 28373837 NR Description: Chain A
  misc_feature (1)..(45): NCBI GI NO: 28373835 NR Description: Chain A
  misc_feature (1)..(44): NCBI GI NO: 28373666 NR Description: Chain A
  misc_feature (1)..(60): NCBI GI NO: 28274852 NR Description: ankyrin repeat protein E4_2 [synthetic construct]
  misc_feature (1)..(44): NCBI GI NO: 28274850 NR Description: ankyrin repeat protein E3_19 [synthetic construct]
  misc_feature (1)..(44): NCBI GI NO: 28274844 NR Description: ankyrin repeat protein E2_5 [synthetic construct]
MDVLLECGADIDARTKGACGWTPLHIAAKERRRDAVKFLIENGAFMPPDISDSRFNPPLHYCPGLEWAYEEMKRLRQEDLSAGETCYSSES

SEQ ID NO: 8972 - DNA, 1674 bp, Glycine max
  misc_feature (1)..(1674): Ceres Seq. ID no. 15170350
atctttagtttctttgttgttgttctccaatctgcactgaaacgtggctgaatgcctctctcagtcccagccagagcgagaatccaccatctccatggaccctcctttttcccttccatttccaaaccaaaacaaaaacccatttggccaacccttttgcctctgaatcgcgcattcgggtgcagaagcctcgaaatcgccgtccctagcccctcctcctcgctcccttccaacgttggaccgaatagttggaaacacgtggacgttgccactctgagcaacctctgcgtcgacatcgtcctcaatgtcccgcagttgccccctccctcccctcttcaacgcaaggctttcatggaccgcttggcccaatctccccctgacaagaaatattgggaagctggtgggaactgcaatatggctatagcagctgcaaggttaggactcaactgcatatcaattggtcatgtgggtaatgaaatctatgggaagtttctgtcagatgtgcttcgtgatgagggcattggtttggttgggatgattactaatgacgatatcgtcaacagctctagtggtagtgcctcttgtgaaactcttttatgttgggttcttgttgatcctttacaaagacatggtttttgcagtcgggctgatttttgcgaggagcctatattgcattggatgagtaaattgtccagtgaagttaaaatggctattaaaaattcaaaggtcttgttctgtaatggatatggatttgatgagctctctcctggtgcactactctcagcaatggaatatgctgttgaagttggcacatcaatcttctttgatcctggaccacgtggaaagagtctctccactgggaccccagatgaacaaagagctcttaaccagttactgagaatgagtgatgttcttcttctaacttctgaggaggctgaggaattaaccggcataaacgatccaatattagcagggcaggagtttctcaaaagagggattcgcacaaaatgggtgattgtaaaaatgggttctaagggttcaattcttataacagcatcgagtgtagcttgtgcacctgcattcaaggtgaatgttattgacactgttggatgtggagacagttttgttgctgctattgtctatggttttatacataatatgccactggttaatacattggcaattgcaaatgcagtgggtgctgcaacagccatgggctgtggtgctggtaggaatgtagcaacactggagaatgtagtacatatattaagatcatcaaacctcagcgaagatgatgaattttggattgaaatacttgaaaagaatgtggttactcaggaaataacatacctgtcaaatgttatgaacggaaacaaaaaccgtctcaaccttgtctcatttgacaaggttgcctctgagctcttgcctaagcttgaacttccacaaacagtggggaatgcgccaacttgataggttgtggaaaaatagattgaagtgcattcatgcgaaagaacacttctgattcttgggttcttggctttatcctgtaaaagtaaaaatttaagcattaagactgcagagttttatctctcttgggttacataaattgccgtagctaaattgctttgagcaagtacatgaaaggtagctagcttctcatcaagcactttaacc

SEQ ID NO: 8973 - protein, 472 aa, Glycine max
  peptide (1)..(472): Ceres Seq. ID no. 15170351
  misc_feature (70)..(397): Pfam Name: Pfam Description:  pfkB family carbohydrate kinase
  misc_feature (68)..(463): NCBI GI NO: 15222179 NR Description: expressed protein [Arabidopsis thaliana]
  misc_feature (1)..(462): NCBI GI NO: 34902576 NR Description: Putative sugar kinase
  misc_feature (68)..(294): NCBI GI NO: 25373383 NR Description: hypothetical protein
  misc_feature (117)..(402): NCBI GI NO: 23100153 NR Description: 2-keto-3-deoxygluconate kinase
  misc_feature (104)..(409): NCBI GI NO: 34907582 NR Description: putative fructokinase I
  misc_feature (65)..(410): NCBI GI NO: 16081025 NR Description: alternate gene name: yxdC~myo-inositol catabolism
  misc_feature (220)..(402): NCBI GI NO: 29833692 NR Description: putative carbohydrate kinase
  misc_feature (64)..(157): NCBI GI NO: 29833692 NR Description: putative carbohydrate kinase
  misc_feature (245)..(406): NCBI GI NO: 17988433 NR Description: RIBOKINASE [Brucella melitensis]
  misc_feature (245)..(406): NCBI GI NO: 23499772 NR Description: ribokinase, putative [Brucella suis 1330]
MPLSVPARARIHHLHGPSFFPSISKPKQKPIWPTLLPLNRAFGCRSLEIAVPSPSSSLPSNVGPNSWKHVDVATLSNLCVDIVLNVPQLPPPSPLQRKAFMDRLAQSPPDKKYWEAGGNCNMAIAAARLGLNCISIGHVGNEIYGKFLSDVLRDEGIGLVGMITNDDIVNSSSGSASCETLLCWVLVDPLQRHGFCSRADFCEEPILHWMSKLSSEVKMAIKNSKVLFCNGYGFDELSPGALLSAMEYAVEVGTSIFFDPGPRGKSLSTGTPDEQRALNQLLRMSDVLLLTSEEAEELTGINDPILAGQEFLKRGIRTKWVIVKMGSKGSILITASSVACAPAFKVNVIDTVGCGDSFVAAIVYGFIHNMPLVNTLAIANAVGAATAMGCGAGRNVATLENVVHILRSSNLSEDDEFWIEILEKNVVTQEITYLSNVMNGNKNRLNLVSFDKVASELLPKLELPQTVGNAPT

SEQ ID NO: 8974 - protein, 372 aa, Glycine max
  peptide (1)..(372): Ceres Seq. ID no. 15170352
  misc_feature (1)..(297): Pfam Name: Pfam Description:  pfkB family carbohydrate kinase
  misc_feature (1)..(363): NCBI GI NO: 15222179 NR Description: expressed protein [Arabidopsis thaliana]
  misc_feature (1)..(362): NCBI GI NO: 34902576 NR Description: Putative sugar kinase
  misc_feature (1)..(194): NCBI GI NO: 25373383 NR Description: hypothetical protein
  misc_feature (17)..(302): NCBI GI NO: 23100153 NR Description: 2-keto-3-deoxygluconate kinase
  misc_feature (4)..(309): NCBI GI NO: 34907582 NR Description: putative fructokinase I
  misc_feature (1)..(310): NCBI GI NO: 16081025 NR Description: alternate gene name: yxdC~myo-inositol catabolism
  misc_feature (120)..(302): NCBI GI NO: 29833692 NR Description: putative carbohydrate kinase
  misc_feature (1)..(57): NCBI GI NO: 29833692 NR Description: putative carbohydrate kinase
  misc_feature (145)..(306): NCBI GI NO: 17988433 NR Description: RIBOKINASE [Brucella melitensis]
  misc_feature (145)..(306): NCBI GI NO: 23499772 NR Description: ribokinase, putative [Brucella suis 1330]
MDRLAQSPPDKKYWEAGGNCNMAIAAARLGLNCISIGHVGNEIYGKFLSDVLRDEGIGLVGMITNDDIVNSSSGSASCETLLCWVLVDPLQRHGFCSRADFCEEPILHWMSKLSSEVKMAIKNSKVLFCNGYGFDELSPGALLSAMEYAVEVGTSIFFDPGPRGKSLSTGTPDEQRALNQLLRMSDVLLLTSEEAEELTGINDPILAGQEFLKRGIRTKWVIVKMGSKGSILITASSVACAPAFKVNVIDTVGCGDSFVAAIVYGFIHNMPLVNTLAIANAVGAATAMGCGAGRNVATLENVVHILRSSNLSEDDEFWIEILEKNVVTQEITYLSNVMNGNKNRLNLVSFDKVASELLPKLELPQTVGNAPT

SEQ ID NO: 8975 - protein, 351 aa, Glycine max
  peptide (1)..(351): Ceres Seq. ID no. 15170353
  misc_feature (1)..(276): Pfam Name: Pfam Description:  pfkB family carbohydrate kinase
  misc_feature (1)..(342): NCBI GI NO: 15222179 NR Description: expressed protein [Arabidopsis thaliana]
  misc_feature (1)..(341): NCBI GI NO: 34902576 NR Description: Putative sugar kinase
  misc_feature (1)..(173): NCBI GI NO: 25373383 NR Description: hypothetical protein
  misc_feature (1)..(281): NCBI GI NO: 23100153 NR Description: 2-keto-3-deoxygluconate kinase
  misc_feature (1)..(288): NCBI GI NO: 34907582 NR Description: putative fructokinase I
  misc_feature (1)..(289): NCBI GI NO: 16081025 NR Description: alternate gene name: yxdC~myo-inositol catabolism
  misc_feature (99)..(281): NCBI GI NO: 29833692 NR Description: putative carbohydrate kinase
  misc_feature (1)..(36): NCBI GI NO: 29833692 NR Description: putative carbohydrate kinase
  misc_feature (124)..(285): NCBI GI NO: 17988433 NR Description: RIBOKINASE [Brucella melitensis]
  misc_feature (124)..(285): NCBI GI NO: 23499772 NR Description: ribokinase, putative [Brucella suis 1330]
MAIAAARLGLNCISIGHVGNEIYGKFLSDVLRDEGIGLVGMITNDDIVNSSSGSASCETLLCWVLVDPLQRHGFCSRADFCEEPILHWMSKLSSEVKMAIKNSKVLFCNGYGFDELSPGALLSAMEYAVEVGTSIFFDPGPRGKSLSTGTPDEQRALNQLLRMSDVLLLTSEEAEELTGINDPILAGQEFLKRGIRTKWVIVKMGSKGSILITASSVACAPAFKVNVIDTVGCGDSFVAAIVYGFIHNMPLVNTLAIANAVGAATAMGCGAGRNVATLENVVHILRSSNLSEDDEFWIEILEKNVVTQEITYLSNVMNGNKNRLNLVSFDKVASELLPKLELPQTVGNAPT

SEQ ID NO: 8976 - DNA, 983 bp, Glycine max
  misc_feature (1)..(983): Ceres Seq. ID no. 15168530
actttgggatttaaatacttttccatatgggtacttcgaaagttctcagcattgttttcttcgtgctattgggcgtaggcatatgctccgctgcaagaacactcctcaccattggtggaggtgtgcatggtgagataggtgttggtgttggtgtaggaggttatggtggtggtggaggttcaggtggaggtggaggatatggaggcgcgggagggcatggtgtaggtagtgacgaaggttcaaccactccaacgataaccgaatgctacgagccgagcgaggcgagcatcgagtggagcgtgaccaccgcggagggacacgacgacgccgtttccaacggcgtcgtcgtcgaagaaaagtggaagcggaaaggtggaaacggtttgttggtgagctgtcggagccagaaggcggttagcgtggggccgcaaccggtgaaatgtggatcagagggacaaagaaatgccacgtcatcgttatcatcacatgtgaacgtgattgggagtgtaaataagccaccacttgctcatgctaggggtcaccgcaacgcacctcgcgtgtcgcttgctttcgcgacatagccatttgcgttgcgcgcgcgcgcattcatgcaccttctcttcttctctcccaaacaaacaagaccccgagaataacgtccgcgcgcgctttttccgttttgtttgttccttcctccgttttgaattattctgtcgccttttgttttcctgttccatttatatatatccgttggggtcacgttcttttctggatagaatgtcgttgtttatgagatatgatgtttttttttttatgttgcaaacaattttaatttgagagttatgcttataaagtgtaaacagccattccttgaactaccataggtgatttgtgattgatcagatgattatctaagatccttgtattataagtagataattttttctctctcggctaaaatataattttcatttcattccact

SEQ ID NO: 8977 - protein, 184 aa, Glycine max
  peptide (1)..(184): Ceres Seq. ID no. 15168531
  misc_feature (1)..(72): NCBI GI NO: 121628 NR Description: GLYCINE-RICH CELL WALL STRUCTURAL PROTEIN 1
  misc_feature (1)..(71): NCBI GI NO: 32479346 NR Description: glycine-rich protein TomR2
  misc_feature (1)..(72): NCBI GI NO: 15228967 NR Description: glycine-rich protein [Arabidopsis thaliana]
  misc_feature (1)..(71): NCBI GI NO: 24417424 NR Description: unknown [Arabidopsis thaliana]
  misc_feature (1)..(71): NCBI GI NO: 37534902 NR Description: putative glycine-rich protein
  misc_feature (1)..(71): NCBI GI NO: 232183 NR Description: Glycine-rich cell wall structural protein 2precursor
  misc_feature (1)..(71): NCBI GI NO: 37534900 NR Description: putative glycine-rich protein
  misc_feature (8)..(72): NCBI GI NO: 121632 NR Description: GLYCINE-RICH CELL WALL STRUCTURAL PROTEIN 1
  misc_feature (1)..(71): NCBI GI NO: 9758509 NR Description: gene_id:MZA15.15~unknown protein
  misc_feature (1)..(71): NCBI GI NO: 30695026 NR Description: glycine-rich protein [Arabidopsis thaliana]
MGTSKVLSIVFFVLLGVGICSAARTLLTIGGGVHGEIGVGVGVGGYGGGGGSGGGGGYGGAGGHGVGSDEGSTTPTITECYEPSEASIEWSVTTAEGHDDAVSNGVVVEEKWKRKGGNGLLVSCRSQKAVSVGPQPVKCGSEGQRNATSSLSSHVNVIGSVNKPPLAHARGHRNAPRVSLAFAT

SEQ ID NO: 8978 - protein, 102 aa, Glycine max
  peptide (1)..(102): Ceres Seq. ID no. 15168532
MLGVTATHLACRLLSRHSHLRCARAHSCTFSSSLPNKQDPENNVRARFFRFVCSFLRFELFCRLLFSCSIYIYPLGSRSFLDRMSLFMRYDVFFFMLQTILI

SEQ ID NO: 8979 - DNA, 874 bp, Glycine max
  misc_feature (1)..(874): Ceres Seq. ID no. 14316176
actcacaaccacaacacaacgcggcagagcgaagagaaggggcaaaagagaaagaagcgcttatcgaactcggacggaagcactgagttgactcggagggagtggaaagtgttgttgcgtaatgtctggtggtatcgctcgtggacgcctcaccgaggagcgcaagtcgtggcggaagaaccatccccatggttttgttgcgaagccggagacgctgcccgatggaaccgtgaatttgatggtgtggcattgcactattcccgggaagactgggactgattgggagggtggctacttcccacttacgctgcactttagtgaagactaccctagcaagcctccaaagtgtaaattcccacaaggtttcttccaccctaatgtttatccttctgggactgtttgcttgtctatacttaacgaggatagtgggtggaggccagccataacagttaagcaaattctcgtgggcatccaagacttacttgaccagccaaatcctgctgaccctgcccagacagaaggctatcatctattcatccaggatgcagcagagtacaagagaagggtccgccagcaggcaaagcaatatccacctcttctctagggttgcatcagctaaatttatgaactatttttactatggcagatgtttcttcttttgtcccgtgttaaaactgtgttgtcattgtgattaatggctgccataacattaaacatgaatgttttagctatttatgattactcccagatctggaagaagtgttaatatataaaaaaaatgtgaaagtcaaccaatgaatacttgttggtgacatgtttctgatgtttgctgctacatttttatatgaatggatcattactataagtctataac

SEQ ID NO: 8980 - protein, 160 aa, Glycine max
  peptide (1)..(160): Ceres Seq. ID no. 14316177
  misc_feature (1)..(160): NCBI GI NO: 20975734 NR Description: putative ubiquitin-conjugating enzyme
  misc_feature (1)..(160): NCBI GI NO: 25446690 NR Description: Putative ubiquitin-conjugating enzyme
  misc_feature (1)..(160): NCBI GI NO: 37536440 NR Description: putative ubiquitin-conjugating enzyme
  misc_feature (1)..(160): NCBI GI NO: 15230881 NR Description: ubiquitin-conjugating enzyme, putative
  misc_feature (35)..(160): NCBI GI NO: 11272348 NR Description: ubiquitin-conjugating enzyme
  misc_feature (3)..(160): NCBI GI NO: 38345867 NR Description: OSJNBa0064M23.9
  misc_feature (4)..(158): NCBI GI NO: 7621708 NR Description: putative E2 enzyme Ubc9 [Dictyostelium discoideum]
  misc_feature (4)..(160): NCBI GI NO: 30584109 NR Description: Homo sapiens ubiquitin-conjugating enzyme E2I
  misc_feature (4)..(158): NCBI GI NO: 2194010 NR Description: Chain A, Human Ubiquitin-Conjugating Enzyme Ubc9
  misc_feature (4)..(158): NCBI GI NO: 4507785 NR Description: ubiquitin-conjugating enzyme E2I
MSGGIARGRLTEERKSWRKNHPHGFVAKPETLPDGTVNLMVWHCTIPGKTGTDWEGGYFPLTLHFSEDYPSKPPKCKFPQGFFHPNVYPSGTVCLSILNEDSGWRPAITVKQILVGIQDLLDQPNPADPAQTEGYHLFIQDAAEYKRRVRQQAKQYPPLL

SEQ ID NO: 8981 - protein, 121 aa, Glycine max
  peptide (1)..(121): Ceres Seq. ID no. 14316178
  misc_feature (1)..(121): NCBI GI NO: 20975734 NR Description: putative ubiquitin-conjugating enzyme
  misc_feature (1)..(121): NCBI GI NO: 25446690 NR Description: Putative ubiquitin-conjugating enzyme
  misc_feature (1)..(121): NCBI GI NO: 37536440 NR Description: putative ubiquitin-conjugating enzyme
  misc_feature (1)..(121): NCBI GI NO: 15230881 NR Description: ubiquitin-conjugating enzyme, putative
  misc_feature (1)..(121): NCBI GI NO: 11272348 NR Description: ubiquitin-conjugating enzyme
  misc_feature (1)..(121): NCBI GI NO: 38345867 NR Description: OSJNBa0064M23.9
  misc_feature (1)..(119): NCBI GI NO: 7621708 NR Description: putative E2 enzyme Ubc9 [Dictyostelium discoideum]
  misc_feature (1)..(121): NCBI GI NO: 30584109 NR Description: Homo sapiens ubiquitin-conjugating enzyme E2I
  misc_feature (1)..(119): NCBI GI NO: 2194010 NR Description: Chain A, Human Ubiquitin-Conjugating Enzyme Ubc9
  misc_feature (1)..(119): NCBI GI NO: 4507785 NR Description: ubiquitin-conjugating enzyme E2I
MVWHCTIPGKTGTDWEGGYFPLTLHFSEDYPSKPPKCKFPQGFFHPNVYPSGTVCLSILNEDSGWRPAITVKQILVGIQDLLDQPNPADPAQTEGYHLFIQDAAEYKRRVRQQAKQYPPLL

SEQ ID NO: 8982 - protein, 92 aa, Glycine max
  peptide (1)..(92): Ceres Seq. ID no. 14316179
THNHNTTRQSEEKGQKRKKRLSNSDGSTELTRREWKVLLRNVWWYRSWTPHRGAQVVAEEPSPWFCCEAGDAARWNREFDGVALHYSREDWD

SEQ ID NO: 8983 - DNA, 1968 bp, Glycine max
  misc_feature (1)..(1968): Ceres Seq. ID no. 15168429
aaaatcacaatcacaagttaagcctcttccacgcgcttcttgagcgactgaatcttaagccagaaacagcaccatctatcacgctctgccactgcatgtggttttaaatactttaacctcactcacatttctctctctctctctctctcactaatctctcgttgataaacacaatcaacaatcttgttcaaacaccccacgagcttctccagcattttcaatcctcttctcttttatcctcatcgctctgcaccaaaacctccccactcctcaattatttatttatctctcccactttttctcacacacattttctcaaacacatggtgtcctcactccttcacttcactctagcttaaataacccaacaaagttcacttcaaacctcaaccatggccctcgaaacgctcctcgtgaaggtcaaaaccgccatatcaaacagcatcgactcggtcccgccgaagctcctgaagaagaagccttctttcaaagcgaagcaaaacgtcggcgttttggcgttcgagatcggcggcgtgatgtcgaagctcctccacctctggcactcgctctccgacgcaaccatcgtgcgcgtccgaaacgacgccgtgaacctcgagggcgttcggaagatcatctccaacgacgagtcgttcctcctcggactcgcctgcgccgagttctccgagtcgctccgagtcgccgctaactcggtgacgcggctcagcgcgcgctgcgaggattccgccctgcgctccttccacctggccttcctcgagttcgcggactcgggccgcgacccgaacgggtgggccctctccggcccaaaagaaaccgattcgaagctcaagaaaatggagcgttacgtgacgttcacggcaacactctaccgcgaaatggaggagctcacggttcttgaaaactccttaagaaaagccctgaatcacgctgacggcaacagcgttgggagcaaagatcagcagaagctctacgagcttcagcagaagatcttttggcagaagcaagaggtgaaggatctaaaagaaagatctttatggagcagaagcttcgacaatgttgttgtactcctcgtaaggttcagcttcaccgttttagcaaggattaaggttgtcttcggaatcggtcaccacatgccttgtctgtctcgtactttgtcggcttccgccactgtttatccgtctgatcaaaaccctaatgggttcgtttatgagtcattggaagaagaagactcgaagcttgaagaagaggccgtgaatgggttttttgaggcaaactcgaagcttttgagaccacccgagagcacgctgggtgctgcgggtttggctttgcattacgcgaatctgatcatagtgatggagaagatgataaagtcaccgcacttggtgggtgtggatgcgagggatgatttgtatgggatgttgccgaggagcataaggtggggtttgaggggaaggttgagaggggtggggttttgtgcgagtgatcctctgctcgctggtgagtggagagatgcgttagggagaatattggggtggttgtcacctttggcacataacatgatcaagtggcaaagtgagagaagctttgagcaacacaatttggtgcccaagaccaatgtgttgttgttgcagactttgtttttcgctaacaaggacaagactgaggctgccatcactgaacttcttgtggggttgaactatatttggaggtttgagagggaaatgactgctaaggctttgtttgaatgcgccaattctaatgggctattgttaaagttgaacaaatccagtcaatgagagaggttcatatatatatatatgatgagtttcttttagtttcttactatttcttcacaggggctcgaattgtgtctctcttgaagtttaattttatgggggttgatcattttagacgatgtattgaaattgaatcgagtgatcgatcgatgat

SEQ ID NO: 8984 - protein, 473 aa, Glycine max
  peptide (1)..(473): Ceres Seq. ID no. 15168430
  misc_feature (310)..(397): Pfam Name: DUF668 Pfam Description: Protein of unknown function
  misc_feature (1)..(462): NCBI GI NO: 15242144 NR Description: expressed protein [Arabidopsis thaliana]
  misc_feature (1)..(451): NCBI GI NO: 30102981 NR Description: hypothetical protein
  misc_feature (27)..(253): NCBI GI NO: 15238198 NR Description: expressed protein [Arabidopsis thaliana]
  misc_feature (284)..(464): NCBI GI NO: 15238198 NR Description: expressed protein [Arabidopsis thaliana]
  misc_feature (171)..(462): NCBI GI NO: 27754455 NR Description: unknown protein [Arabidopsis thaliana]
  misc_feature (1)..(85): NCBI GI NO: 27754455 NR Description: unknown protein [Arabidopsis thaliana]
  misc_feature (1)..(248): NCBI GI NO: 7939524 NR Description: contains similarity to unknownprotein~gb|AAD25764
  misc_feature (309)..(461): NCBI GI NO: 7939524 NR Description: contains similarity to unknownprotein~gb|AAD25764
  misc_feature (29)..(248): NCBI GI NO: 15228977 NR Description: hypothetical protein [Arabidopsis thaliana]
  misc_feature (309)..(461): NCBI GI NO: 15228977 NR Description: hypothetical protein [Arabidopsis thaliana]
MALETLLVKVKTAISNSIDSVPPKLLKKKPSFKAKQNVGVLAFEIGGVMSKLLHLWHSLSDATIVRVRNDAVNLEGVRKIISNDESFLLGLACAEFSESLRVAANSVTRLSARCEDSALRSFHLAFLEFADSGRDPNGWALSGPKETDSKLKKMERYVTFTATLYREMEELTVLENSLRKALNHADGNSVGSKDQQKLYELQQKIFWQKQEVKDLKERSLWSRSFDNVVVLLVRFSFTVLARIKVVFGIGHHMPCLSRTLSASATVYPSDQNPNGFVYESLEEEDSKLEEEAVNGFFEANSKLLRPPESTLGAAGLALHYANLIIVMEKMIKSPHLVGVDARDDLYGMLPRSIRWGLRGRLRGVGFCASDPLLAGEWRDALGRILGWLSPLAHNMIKWQSERSFEQHNLVPKTNVLLLQTLFFANKDKTEAAITELLVGLNYIWRFEREMTAKALFECANSNGLLLKLNKSSQ

SEQ ID NO: 8985 - protein, 425 aa, Glycine max
  peptide (1)..(425): Ceres Seq. ID no. 15168431
  misc_feature (262)..(349): Pfam Name: DUF668 Pfam Description: Protein of unknown function
  misc_feature (1)..(414): NCBI GI NO: 15242144 NR Description: expressed protein [Arabidopsis thaliana]
  misc_feature (1)..(403): NCBI GI NO: 30102981 NR Description: hypothetical protein
  misc_feature (1)..(205): NCBI GI NO: 15238198 NR Description: expressed protein [Arabidopsis thaliana]
  misc_feature (236)..(416): NCBI GI NO: 15238198 NR Description: expressed protein [Arabidopsis thaliana]
  misc_feature (123)..(414): NCBI GI NO: 27754455 NR Description: unknown protein [Arabidopsis thaliana]
  misc_feature (1)..(37): NCBI GI NO: 27754455 NR Description: unknown protein [Arabidopsis thaliana]
  misc_feature (1)..(200): NCBI GI NO: 7939524 NR Description: contains similarity to unknownprotein~gb|AAD25764
  misc_feature (261)..(413): NCBI GI NO: 7939524 NR Description: contains similarity to unknownprotein~gb|AAD25764
  misc_feature (1)..(200): NCBI GI NO: 15228977 NR Description: hypothetical protein [Arabidopsis thaliana]
  misc_feature (261)..(413): NCBI GI NO: 15228977 NR Description: hypothetical protein [Arabidopsis thaliana]
MSKLLHLWHSLSDATIVRVRNDAVNLEGVRKIISNDESFLLGLACAEFSESLRVAANSVTRLSARCEDSALRSFHLAFLEFADSGRDPNGWALSGPKETDSKLKKMERYVTFTATLYREMEELTVLENSLRKALNHADGNSVGSKDQQKLYELQQKIFWQKQEVKDLKERSLWSRSFDNVVVLLVRFSFTVLARIKVVFGIGHHMPCLSRTLSASATVYPSDQNPNGFVYESLEEEDSKLEEEAVNGFFEANSKLLRPPESTLGAAGLALHYANLIIVMEKMIKSPHLVGVDARDDLYGMLPRSIRWGLRGRLRGVGFCASDPLLAGEWRDALGRILGWLSPLAHNMIKWQSERSFEQHNLVPKTNVLLLQTLFFANKDKTEAAITELLVGLNYIWRFEREMTAKALFECANSNGLLLKLNKSSQ

SEQ ID NO: 8986 - protein, 320 aa, Glycine max
  peptide (1)..(320): Ceres Seq. ID no. 15168432
  misc_feature (157)..(244): Pfam Name: DUF668 Pfam Description: Protein of unknown function
  misc_feature (1)..(309): NCBI GI NO: 15242144 NR Description: expressed protein [Arabidopsis thaliana]
  misc_feature (1)..(298): NCBI GI NO: 30102981 NR Description: hypothetical protein
  misc_feature (1)..(100): NCBI GI NO: 15238198 NR Description: expressed protein [Arabidopsis thaliana]
  misc_feature (131)..(311): NCBI GI NO: 15238198 NR Description: expressed protein [Arabidopsis thaliana]
  misc_feature (18)..(309): NCBI GI NO: 27754455 NR Description: unknown protein [Arabidopsis thaliana]
  misc_feature (1)..(95): NCBI GI NO: 7939524 NR Description: contains similarity to unknownprotein~gb|AAD25764
  misc_feature (156)..(308): NCBI GI NO: 7939524 NR Description: contains similarity to unknownprotein~gb|AAD25764
  misc_feature (1)..(95): NCBI GI NO: 15228977 NR Description: hypothetical protein [Arabidopsis thaliana]
  misc_feature (156)..(308): NCBI GI NO: 15228977 NR Description: hypothetical protein [Arabidopsis thaliana]
  misc_feature (1)..(95): NCBI GI NO: 12003396 NR Description: Avr9/Cf-9 rapidly elicited protein 137
MERYVTFTATLYREMEELTVLENSLRKALNHADGNSVGSKDQQKLYELQQKIFWQKQEVKDLKERSLWSRSFDNVVVLLVRFSFTVLARIKVVFGIGHHMPCLSRTLSASATVYPSDQNPNGFVYESLEEEDSKLEEEAVNGFFEANSKLLRPPESTLGAAGLALHYANLIIVMEKMIKSPHLVGVDARDDLYGMLPRSIRWGLRGRLRGVGFCASDPLLAGEWRDALGRILGWLSPLAHNMIKWQSERSFEQHNLVPKTNVLLLQTLFFANKDKTEAAITELLVGLNYIWRFEREMTAKALFECANSNGLLLKLNKSSQ

SEQ ID NO: 8987 - DNA, 1435 bp, Glycine max
  misc_feature (1)..(1435): Ceres Seq. ID no. 13528157
  misc_feature (1094)..(1094): n is a, c, t, g, unknown, or other
  misc_feature (133)..(133): n is a, c, t, g, unknown, or other
  misc_feature (1404)..(1404): n is a, c, t, g, unknown, or other
  misc_feature (112)..(112): n is a, c, t, g, unknown, or other
aaacaacagaagcagcaggttcaaacttcaattcatggaagtgtgattctaatctccacaacaaacctaaccctaaaaagctaacccttttttttttttttttaaatattgnttctttttttacttaccctanatgttagagccatggacataaccccaacaacaacgatcaacaacaacaacactactcccagtgcaacaacaaaatccccagaaaatgaaacagaaacaccgaccaggatcaccacccccatcactcccacaacgacaaaaacctcatctttctcgaatggtgtcctcaaacgcacccaccaccaccaccacctccaccaccctatccctccggtggttacctacaaagaatgcctcaaaaatcacgccgccaacttgggtggccacgccttagatggctgcggcgagttcatgccctctccgaccgccaccgctgccgaccccagctccataaaatgcgccgcctgcggctgccaccgcaacttccaccgccgcgagccggaggagccccccatcgcctccaccaccacgcacgtcatcgagtatcagccccaccaccgccaccaccctcccccgccgctgcacgcggcggcggtagccacccgcagccccaattctgcttccccaccgccgatctcctcgtcgtactacccctccgcgccgcacatgctcctcgccctctccgccggactggcggctccgccggagagcaccgccgcgcctgccgccgcgcccacgagaaagcggttccgcacgaagttcagccaagagcagaaggagaagatgcacaagttcgcggagaaagtagggtggaagattcagaagcgcgacgaggatttgattcacgaaatttgcaacgaagttggcgttgatagaagcgttctcaaggtttggatgcataacaacaaaaacacctttgccaaaaaggataacaataatattgttactagtaatgatattaatattactactaaaaataatatttctactgataatgatgcaaatgggagtgatgtcaaggtttttgaaaaccctaacaatgatggtggtgaagatcgcgctgaagatccgagtagtaatcnctatgatggggtgaacgttgttggtgctaatggatcttctagttcttgatctaagggggaagaaaataataatgtattagataggttaatgatgattatgatgatgatgatgatgctacaaggttaattaatcagctgtttttaatttcttttcttttcttttttttgtttttaattgtttagtttttatattgttaatgagagcatgatgatcaatcagtttaatgggagagaatgttatatccggaagagaatttattttgcttttaatggttttatgctgaattaagttagcttttagttgttaccncttgttatgaatgtatattatgtttatcttt

SEQ ID NO: 8988 - protein, 332 aa, Glycine max
  peptide (1)..(332): Ceres Seq. ID no. 13528158
  misc_feature (69)..(125): Pfam Name: Pfam Description:  ZF-HD protein dimerisation region
  misc_feature (19)..(331): NCBI GI NO: 15228530 NR Description: expressed protein [Arabidopsis thaliana]
  misc_feature (1)..(332): NCBI GI NO: 18421904 NR Description: expressed protein [Arabidopsis thaliana]
  misc_feature (1)..(332): NCBI GI NO: 21592512 NR Description: unknown [Arabidopsis thaliana]
  misc_feature (1)..(271): NCBI GI NO: 15242243 NR Description: expressed protein [Arabidopsis thaliana]
  misc_feature (58)..(292): NCBI GI NO: 13277218 NR Description: ZF-HD homeobox protein [Flaveria bidentis]
  misc_feature (39)..(292): NCBI GI NO: 13277216 NR Description: ZF-HD homeobox protein [Flaveria trinervia]
  misc_feature (1)..(332): NCBI GI NO: 13277220 NR Description: ZF-HD homeobox protein [Flaveria bidentis]
  misc_feature (69)..(293): NCBI GI NO: 15222382 NR Description: hypothetical protein [Arabidopsis thaliana]
  misc_feature (2)..(291): NCBI GI NO: 15226993 NR Description: expressed protein [Arabidopsis thaliana]
  misc_feature (2)..(288): NCBI GI NO: 20148768 NR Description: hypothetical protein At2g02540/T822.16
  misc_feature (317)..(317): Xaa is any aa, unknown or other
MDITPTTTINNNNTTPSATTKSPENETETPTRITTPITPTTTKTSSFSNGVLKRTHHHHHLHHPIPPVVTYKECLKNHAANLGGHALDGCGEFMPSPTATAADPSSIKCAACGCHRNFHRREPEEPPIASTTTHVIEYQPHHRHHPPPPLHAAAVATRSPNSASPPPISSSYYPSAPHMLLALSAGLAAPPESTAAPAAAPTRKRFRTKFSQEQKEKMHKFAEKVGWKIQKRDEDLIHEICNEVGVDRSVLKVWMHNNKNTFAKKDNNNIVTSNDINITTKNNISTDNDANGSDVKVFENPNNDGGEDRAEDPSSNXYDGVNVVGANGSSSS

SEQ ID NO: 8989 - protein, 239 aa, Glycine max
  peptide (1)..(239): Ceres Seq. ID no. 13528159
  misc_feature (1)..(238): NCBI GI NO: 15228530 NR Description: expressed protein [Arabidopsis thaliana]
  misc_feature (1)..(239): NCBI GI NO: 18421904 NR Description: expressed protein [Arabidopsis thaliana]
  misc_feature (1)..(239): NCBI GI NO: 21592512 NR Description: unknown [Arabidopsis thaliana]
  misc_feature (1)..(178): NCBI GI NO: 15242243 NR Description: expressed protein [Arabidopsis thaliana]
  misc_feature (1)..(199): NCBI GI NO: 13277218 NR Description: ZF-HD homeobox protein [Flaveria bidentis]
  misc_feature (1)..(199): NCBI GI NO: 13277216 NR Description: ZF-HD homeobox protein [Flaveria trinervia]
  misc_feature (1)..(239): NCBI GI NO: 13277220 NR Description: ZF-HD homeobox protein [Flaveria bidentis]
  misc_feature (1)..(200): NCBI GI NO: 15222382 NR Description: hypothetical protein [Arabidopsis thaliana]
  misc_feature (1)..(198): NCBI GI NO: 15226993 NR Description: expressed protein [Arabidopsis thaliana]
  misc_feature (1)..(195): NCBI GI NO: 20148768 NR Description: hypothetical protein At2g02540/T822.16
  misc_feature (224)..(224): Xaa is any aa, unknown or other
MPSPTATAADPSSIKCAACGCHRNFHRREPEEPPIASTTTHVIEYQPHHRHHPPPPLHAAAVATRSPNSASPPPISSSYYPSAPHMLLALSAGLAAPPESTAAPAAAPTRKRFRTKFSQEQKEKMHKFAEKVGWKIQKRDEDLIHEICNEVGVDRSVLKVWMHNNKNTFAKKDNNNIVTSNDINITTKNNISTDNDANGSDVKVFENPNNDGGEDRAEDPSSNXYDGVNVVGANGSSSS

SEQ ID NO: 8990 - protein, 173 aa, Glycine max
  peptide (1)..(173): Ceres Seq. ID no. 13528160
MPQKSRRQLGWPRLRWLRRVHALSDRHRCRPQLHKMRRLRLPPQLPPPRAGGAPHRLHHHARHRVSAPPPPPPSPAAARGGGSHPQPQFCFPTADLLVVLPLRAAHAPRPLRRTGGSAGEHRRACRRAHEKAVPHEVQPRAEGEDAQVRGESRVEDSEARRGFDSRNLQRSWR

SEQ ID NO: 8991 - DNA, 881 bp, Glycine max
  misc_feature (1)..(881): Ceres Seq. ID no. 15168573
atttccattagagagaaaatagagatcaagcgcagacatgggaacttaacaaaggaagaaacgcgaattgatgatggaggtcaccaaagacgaagctgcaaccccaggagcaggaggtgctcaacctcgcaatccaaatccaaatccaaatccaactccaaatccaaaccctaaccctaaccctcctcacaccaccagaggatctaaaggaaaatcgtgtaagggatgcacctactactcatcgcttcataaagccaagtccaaaaaccccacatgcgttggtttctccagaacactccagcaagtacccccctttgttgtcggagaatctgagttggaagcttccaaagagggccgcagccttaccaatttcaagtatgcatgtgttggatactctgtctacttagacaacaaagattcttcagctgactcgcaggataaaacagcaaaattgcccttttgcgttggtcttgaggtggtcttagaggagaaagcttcaaattcacatgcaggccatgttcctgctactcataaaactgaagatgaacatgctgctcctcaacctagaagatatatacctccaaatcatacgacagagttcttgaacaggtttcaaagaaatgcaggcctggtggcatctggtgttgccaaaaacttgaacagagtgggtaactatgtgaaagatctcctaaatgacattctaaactaattctacaatgcaccttgcatgggtggtacattcatgctcccttatgttgatttttcatttcaatcctcaccccctaatgtgcaaggcgcattatagaactactccgacattctatttaggcgaacgacggtgacaactgtagttcgtgtacgaaataaattcaattttacac

SEQ ID NO: 8992 - protein, 212 aa, Glycine max
  peptide (1)..(212): Ceres Seq. ID no. 15168574
  misc_feature (38)..(212): NCBI GI NO: 15230397 NR Description: expressed protein [Arabidopsis thaliana]
MMEVTKDEAATPGAGGAQPRNPNPNPNPTPNPNPNPNPPHTTRGSKGKSCKGCTYYSSLHKAKSKNPTCVGFSRTLQQVPPFVVGESELEASKEGRSLTNFKYACVGYSVYLDNKDSSADSQDKTAKLPFCVGLEVVLEEKASNSHAGHVPATHKTEDEHAAPQPRRYIPPNHTTEFLNRFQRNAGLVASGVAKNLNRVGNYVKDLLNDILN

SEQ ID NO: 8993 - protein, 211 aa, Glycine max
  peptide (1)..(211): Ceres Seq. ID no. 15168575
  misc_feature (37)..(211): NCBI GI NO: 15230397 NR Description: expressed protein [Arabidopsis thaliana]
MEVTKDEAATPGAGGAQPRNPNPNPNPTPNPNPNPNPPHTTRGSKGKSCKGCTYYSSLHKAKSKNPTCVGFSRTLQQVPPFVVGESELEASKEGRSLTNFKYACVGYSVYLDNKDSSADSQDKTAKLPFCVGLEVVLEEKASNSHAGHVPATHKTEDEHAAPQPRRYIPPNHTTEFLNRFQRNAGLVASGVAKNLNRVGNYVKDLLNDILN

SEQ ID NO: 8994 - DNA, 945 bp, Glycine max
  misc_feature (1)..(945): Ceres Seq. ID no. 15176643
ataaaatattaattatttagttaaaaggccaatcctttattcacaatggctgaggaacaaactactcaagttgccgaactcggtgaagaacaaaagaacttccaagctcaattcaagcttttcggtaagttcgactactccgaaatcaaggttgaagatgtctgcttcaaggattacatcgccgtcagcaacatcaagtcccaagtcttcatcccccacactgctggtagatggcaaatcaagaaattcagaaaggcccaatgccccatcgtcgaaagactcattggctctatcatgttccacggaagaaacactggtaagaagaacctcgccatcagaatcgtcaagcacgctttcgaaatcatccacatcatgactggcaagaaccccatccaagtcttcatcgaagccgtccaaaacggtggtgccagagaaggctctaccagaatcggtactggtggtgtcgtcagaagacaagccgtcgacgtttccccccttaagagagctaacctctccatctacttcatgaccgtcggtgccagaaaggccgctttcaagagcatgaagtccatcgctgaatgcttggctgatgaaatcatgaactgcgccaagaactcccccaactccactgccatcagaaagagagatgataccgaaagcgtgcttgacgattctgatggcgaggttcttcttaccagtgtttcttccgtggaacatgatagagccaatgagtctttcgacgatggggcattgggcctttctgaatttcttgatttgcctcttctgtgtaggggatggagttttttggattcttatatacttgcagatgtactcgggctttattgattctgatagcagacattttccctccatttttcatccatggttctcgagtgtttgaaccccccttccttttctgctttgaattaaagattcgtgttttat

SEQ ID NO: 8995 - protein, 266 aa, Glycine max
  peptide (1)..(266): Ceres Seq. ID no. 15176644
  misc_feature (58)..(206): Pfam Name: Pfam Description:  Ribosomal protein S7p/S5e
  misc_feature (22)..(206): NCBI GI NO: 32400987 NR Description: 40S ribosome protein S5 [Griffithsia japonica]
  misc_feature (24)..(206): NCBI GI NO: 32399008 NR Description: ribosomal protein S5, probable
  misc_feature (20)..(206): NCBI GI NO: 6831665 NR Description: 40S RIBOSOMAL PROTEIN S5
  misc_feature (21)..(206): NCBI GI NO: 23612587 NR Description: 40S ribosomal protein S5, putative
  misc_feature (10)..(206): NCBI GI NO: 15228111 NR Description: 40S ribosomal protein S5 (RPS5A)
  misc_feature (14)..(206): NCBI GI NO: 15229897 NR Description: 40S ribosomal protein S5 (RPS5B)
  misc_feature (10)..(206): NCBI GI NO: 21617886 NR Description: 40S ribosomal protein S5 [Arabidopsis thaliana]
  misc_feature (21)..(206): NCBI GI NO: 23482155 NR Description: ribosomal protein S7 [Plasmodium yoelii yoelii]
  misc_feature (20)..(206): NCBI GI NO: 34893994 NR Description: putative 40S ribosomal protein S5
  misc_feature (3)..(206): NCBI GI NO: 585948 NR Description: 40S RIBOSOMAL PROTEIN S5
MAEEQTTQVAELGEEQKNFQAQFKLFGKFDYSEIKVEDVCFKDYIAVSNIKSQVFIPHTAGRWQIKKFRKAQCPIVERLIGSIMFHGRNTGKKNLAIRIVKHAFEIIHIMTGKNPIQVFIEAVQNGGAREGSTRIGTGGVVRRQAVDVSPLKRANLSIYFMTVGARKAAFKSMKSIAECLADEIMNCAKNSPNSTAIRKRDDTESVLDDSDGEVLLTSVSSVEHDRANESFDDGALGLSEFLDLPLLCRGWSFLDSYILADVLGLY

SEQ ID NO: 8996 - protein, 183 aa, Glycine max
  peptide (1)..(183): Ceres Seq. ID no. 15176645
  misc_feature (1)..(123): Pfam Name: Pfam Description:  Ribosomal protein S7p/S5e
  misc_feature (1)..(123): NCBI GI NO: 32400987 NR Description: 40S ribosome protein S5 [Griffithsia japonica]
  misc_feature (1)..(123): NCBI GI NO: 32399008 NR Description: ribosomal protein S5, probable
  misc_feature (1)..(123): NCBI GI NO: 6831665 NR Description: 40S RIBOSOMAL PROTEIN S5
  misc_feature (1)..(123): NCBI GI NO: 23612587 NR Description: 40S ribosomal protein S5, putative
  misc_feature (1)..(123): NCBI GI NO: 15228111 NR Description: 40S ribosomal protein S5 (RPS5A)
  misc_feature (1)..(123): NCBI GI NO: 15229897 NR Description: 40S ribosomal protein S5 (RPS5B)
  misc_feature (1)..(123): NCBI GI NO: 21617886 NR Description: 40S ribosomal protein S5 [Arabidopsis thaliana]
  misc_feature (1)..(123): NCBI GI NO: 23482155 NR Description: ribosomal protein S7 [Plasmodium yoelii yoelii]
  misc_feature (1)..(123): NCBI GI NO: 34893994 NR Description: putative 40S ribosomal protein S5
  misc_feature (1)..(123): NCBI GI NO: 585948 NR Description: 40S RIBOSOMAL PROTEIN S5
MFHGRNTGKKNLAIRIVKHAFEIIHIMTGKNPIQVFIEAVQNGGAREGSTRIGTGGVVRRQAVDVSPLKRANLSIYFMTVGARKAAFKSMKSIAECLADEIMNCAKNSPNSTAIRKRDDTESVLDDSDGEVLLTSVSSVEHDRANESFDDGALGLSEFLDLPLLCRGWSFLDSYILADVLGLY

SEQ ID NO: 8997 - protein, 157 aa, Glycine max
  peptide (1)..(157): Ceres Seq. ID no. 15176646
  misc_feature (1)..(97): Pfam Name: Pfam Description:  Ribosomal protein S7p/S5e
  misc_feature (1)..(97): NCBI GI NO: 32400987 NR Description: 40S ribosome protein S5 [Griffithsia japonica]
  misc_feature (1)..(97): NCBI GI NO: 32399008 NR Description: ribosomal protein S5, probable
  misc_feature (1)..(97): NCBI GI NO: 6831665 NR Description: 40S RIBOSOMAL PROTEIN S5
  misc_feature (1)..(97): NCBI GI NO: 23612587 NR Description: 40S ribosomal protein S5, putative
  misc_feature (1)..(97): NCBI GI NO: 15228111 NR Description: 40S ribosomal protein S5 (RPS5A)
  misc_feature (1)..(97): NCBI GI NO: 15229897 NR Description: 40S ribosomal protein S5 (RPS5B)
  misc_feature (1)..(97): NCBI GI NO: 21617886 NR Description: 40S ribosomal protein S5 [Arabidopsis thaliana]
  misc_feature (1)..(97): NCBI GI NO: 23482155 NR Description: ribosomal protein S7 [Plasmodium yoelii yoelii]
  misc_feature (1)..(97): NCBI GI NO: 34893994 NR Description: putative 40S ribosomal protein S5
  misc_feature (1)..(97): NCBI GI NO: 585948 NR Description: 40S RIBOSOMAL PROTEIN S5
MTGKNPIQVFIEAVQNGGAREGSTRIGTGGVVRRQAVDVSPLKRANLSIYFMTVGARKAAFKSMKSIAECLADEIMNCAKNSPNSTAIRKRDDTESVLDDSDGEVLLTSVSSVEHDRANESFDDGALGLSEFLDLPLLCRGWSFLDSYILADVLGLY

SEQ ID NO: 8998 - DNA, 1590 bp, Glycine max
  misc_feature (1)..(1590): Ceres Seq. ID no. 15171614
aattcaatcattagtttcatttcataattcccatctcatggccatctcaaacaataatcatcatgctcttctacttgcttcaccaggaatgggtcacataatccctgccctagaacttgccaagcgtttagtcactcacaaaatcatttccaaactcaccttcttttgtggttcaatcaaaacctctactccatcaaaagctgagacacaaattctccaatcagccataaaggaaaaccttttcgatctaattcaactcccccccattgatctcaccatccatgttagtcctcgtgacaccttagaaaccaaaatagcaattataatgcatgaaatcccactactttttgtgtccacaatatccagcatgaacctcaacccaaccatgatcatcactgacttcttcttcagccaagttatacctctagccaaaaacctaaacctacccacatttgcttttgcaccaaccaatgcatggctcgtcgcacttggtcttcacacccccactttggataaagaaatagaaggagaatatatcaatgaaagcaaaccgatctcaatcccaggttgcaaatccattcacccccttgatatgtttggtatgttgcgtgacaggacacaaaggatctaccatgaatatgttggcgcgtgtgaaggggcagcacttgctgatgggatctttgtgaacacgtttcatgagttggagccaaagacacttgaagcacttggtagtggacacattattaccaaggtgcccgtgtacccggttgggcctattgtaagggatcaaagaagccctaatggtagcaatgaggggaaaataggtgatgtttttgggtggctggacaaacaagaagaagagtcagtggtgtatgtgtcacttgggagtggatacacaatgtcatttgaggaaattaaagagatggctttggggttggagctgagtggaaaaaaatttgtttggtctgtgcgcccacctgccaccaaatctggcactggcaactatctcacagcaggtgaggaaggagaaaccagaactatccttgggtctaataatgaaccatcaaactcttttcctgatgagttctaccgcatacaaaccaatggaattgtgatcacagattgggcaccacaattggatattttgaagcacccatcttttggtggttttgtgtctcattgtgggtggaactcattaatggagagtgtttcatgtggggtgccaataattggattgcctctttatgcagagcaaatgatgaatgctgcgatgctaatggaggaagttggcaatgcaattcgagtagaggtgtcaccatctaccaacatggttggaagggaggagttatcaaaagcaataaggaagataatggataaggatgacaaagaagggtgtgtaatgagggaaagggctaaagagcttaagcacatagcagaaagagcttggtttcatgatggtccttcttatttagcactttcaaaaatcactcactcaaatagggtgtgataactcatttatggtggttaaaataagtactcactttggtacaagaaaattctattctagaataaacaatcattattattgtc

SEQ ID NO: 8999 - protein, 501 aa, Glycine max
  peptide (1)..(501): Ceres Seq. ID no. 15171615
  misc_feature (21)..(495): Pfam Name: Pfam Description:  UDP-glucoronosyl and UDP-glucosyl transferase
  misc_feature (17)..(495): NCBI GI NO: 2501494 NR Description: Flavonol 3-O-glucosyltransferase 5
  misc_feature (21)..(495): NCBI GI NO: 18409172 NR Description: UDP-glycosyltransferase family
  misc_feature (58)..(492): NCBI GI NO: 25286819 NR Description: probable flavonol 3-O-glucosyltransferase
  misc_feature (109)..(492): NCBI GI NO: 25286815 NR Description: probable flavonol 3-O-glucosyltransferase
  misc_feature (21)..(75): NCBI GI NO: 25286815 NR Description: probable flavonol 3-O-glucosyltransferase
  misc_feature (24)..(495): NCBI GI NO: 7433913 NR Description: UTP-glucose glucosyltransferase-like protein -Arabidopsis thaliana
  misc_feature (21)..(496): NCBI GI NO: 15240305 NR Description: UDP-glycosyltransferase family
  misc_feature (21)..(496): NCBI GI NO: 15240051 NR Description: UDP-glycosyltransferase family
  misc_feature (24)..(496): NCBI GI NO: 21553566 NR Description: UTP-glucose glucosyltransferase
  misc_feature (109)..(492): NCBI GI NO: 30680413 NR Description: UDP-glucosyltransferase family
IQSLVSFHNSHLMAISNNNHHALLLASPGMGHIIPALELAKRLVTHKIISKLTFFCGSIKTSTPSKAETQILQSAIKENLFDLIQLPPIDLTIHVSPRDTLETKIAIIMHEIPLLFVSTISSMNLNPTMIITDFFFSQVIPLAKNLNLPTFAFAPTNAWLVALGLHTPTLDKEIEGEYINESKPISIPGCKSIHPLDMFGMLRDRTQRIYHEYVGACEGAALADGIFVNTFHELEPKTLEALGSGHIITKVPVYPVGPIVRDQRSPNGSNEGKIGDVFGWLDKQEEESVVYVSLGSGYTMSFEEIKEMALGLELSGKKFVWSVRPPATKSGTGNYLTAGEEGETRTILGSNNEPSNSFPDEFYRIQTNGIVITDWAPQLDILKHPSFGGFVSHCGWNSLMESVSCGVPIIGLPLYAEQMMNAAMLMEEVGNAIRVEVSPSTNMVGREELSKAIRKIMDKDDKEGCVMRERAKELKHIAERAWFHDGPSYLALSKITHSNRV

SEQ ID NO: 9000 - protein, 489 aa, Glycine max
  peptide (1)..(489): Ceres Seq. ID no. 15171616
  misc_feature (9)..(483): Pfam Name: Pfam Description:  UDP-glucoronosyl and UDP-glucosyl transferase
  misc_feature (5)..(483): NCBI GI NO: 2501494 NR Description: Flavonol 3-O-glucosyltransferase 5
  misc_feature (9)..(483): NCBI GI NO: 18409172 NR Description: UDP-glycosyltransferase family
  misc_feature (46)..(480): NCBI GI NO: 25286819 NR Description: probable flavonol 3-O-glucosyltransferase
  misc_feature (97)..(480): NCBI GI NO: 25286815 NR Description: probable flavonol 3-O-glucosyltransferase
  misc_feature (9)..(63): NCBI GI NO: 25286815 NR Description: probable flavonol 3-O-glucosyltransferase
  misc_feature (12)..(483): NCBI GI NO: 7433913 NR Description: UTP-glucose glucosyltransferase-like protein -Arabidopsis thaliana
  misc_feature (9)..(484): NCBI GI NO: 15240305 NR Description: UDP-glycosyltransferase family
  misc_feature (9)..(484): NCBI GI NO: 15240051 NR Description: UDP-glycosyltransferase family
  misc_feature (12)..(484): NCBI GI NO: 21553566 NR Description: UTP-glucose glucosyltransferase
  misc_feature (97)..(480): NCBI GI NO: 30680413 NR Description: UDP-glucosyltransferase family
MAISNNNHHALLLASPGMGHIIPALELAKRLVTHKIISKLTFFCGSIKTSTPSKAETQILQSAIKENLFDLIQLPPIDLTIHVSPRDTLETKIAIIMHEIPLLFVSTISSMNLNPTMIITDFFFSQVIPLAKNLNLPTFAFAPTNAWLVALGLHTPTLDKEIEGEYINESKPISIPGCKSIHPLDMFGMLRDRTQRIYHEYVGACEGAALADGIFVNTFHELEPKTLEALGSGHIITKVPVYPVGPIVRDQRSPNGSNEGKIGDVFGWLDKQEEESVVYVSLGSGYTMSFEEIKEMALGLELSGKKFVWSVRPPATKSGTGNYLTAGEEGETRTILGSNNEPSNSFPDEFYRIQTNGIVITDWAPQLDILKHPSFGGFVSHCGWNSLMESVSCGVPIIGLPLYAEQMMNAAMLMEEVGNAIRVEVSPSTNMVGREELSKAIRKIMDKDDKEGCVMRERAKELKHIAERAWFHDGPSYLALSKITHSNRV

SEQ ID NO: 9001 - protein, 472 aa, Glycine max
  peptide (1)..(472): Ceres Seq. ID no. 15171617
  misc_feature (1)..(466): Pfam Name: Pfam Description:  UDP-glucoronosyl and UDP-glucosyl transferase
  misc_feature (1)..(466): NCBI GI NO: 2501494 NR Description: Flavonol 3-O-glucosyltransferase 5
  misc_feature (1)..(466): NCBI GI NO: 18409172 NR Description: UDP-glycosyltransferase family
  misc_feature (29)..(463): NCBI GI NO: 25286819 NR Description: probable flavonol 3-O-glucosyltransferase
  misc_feature (80)..(463): NCBI GI NO: 25286815 NR Description: probable flavonol 3-O-glucosyltransferase
  misc_feature (1)..(46): NCBI GI NO: 25286815 NR Description: probable flavonol 3-O-glucosyltransferase
  misc_feature (1)..(466): NCBI GI NO: 7433913 NR Description: UTP-glucose glucosyltransferase-like protein -Arabidopsis thaliana
  misc_feature (1)..(467): NCBI GI NO: 15240305 NR Description: UDP-glycosyltransferase family
  misc_feature (1)..(467): NCBI GI NO: 15240051 NR Description: UDP-glycosyltransferase family
  misc_feature (1)..(467): NCBI GI NO: 21553566 NR Description: UTP-glucose glucosyltransferase
  misc_feature (80)..(463): NCBI GI NO: 30680413 NR Description: UDP-glucosyltransferase family
MGHIIPALELAKRLVTHKIISKLTFFCGSIKTSTPSKAETQILQSAIKENLFDLIQLPPIDLTIHVSPRDTLETKIAIIMHEIPLLFVSTISSMNLNPTMIITDFFFSQVIPLAKNLNLPTFAFAPTNAWLVALGLHTPTLDKEIEGEYINESKPISIPGCKSIHPLDMFGMLRDRTQRIYHEYVGACEGAALADGIFVNTFHELEPKTLEALGSGHIITKVPVYPVGPIVRDQRSPNGSNEGKIGDVFGWLDKQEEESVVYVSLGSGYTMSFEEIKEMALGLELSGKKFVWSVRPPATKSGTGNYLTAGEEGETRTILGSNNEPSNSFPDEFYRIQTNGIVITDWAPQLDILKHPSFGGFVSHCGWNSLMESVSCGVPIIGLPLYAEQMMNAAMLMEEVGNAIRVEVSPSTNMVGREELSKAIRKIMDKDDKEGCVMRERAKELKHIAERAWFHDGPSYLALSKITHSNRV

SEQ ID NO: 9002 - DNA, 1295 bp, Glycine max
  misc_feature (1)..(1295): Ceres Seq. ID no. 15168545
gttggttaacggatctagaatttgttgaagcaggaaccgctccatctcgccccgcgccaaaccatttgatttcaaagcggagatttagggactgcaaattctctgcttctctacacatggagccggtgtcgcgtgctaatttcttttcattccaaagattttggctaccgtttcagggacagggagggatgaggcagcaagttgatccctcggctcacacaatcaagtcccatggagcatcacttgcaagaaaacacgctcgtgattggcttatattgctgcttctcatagtgatagagattgtcctttttgtcattcatccatttaaacgctttgtgggaagggacatgatggaggaccttagatatcctatgaaagaaaacacggtgcctgtatgggctgttcctttatatgcggttctgttgccaatggccgttttccttctcttctatatgcgcaggagagatgtttatgatttgcaccacagtgttctaggtttgttatttgctgttctgataactggggtcttcaccgatgcaataaaaaatgcagttggccggcctcgcccagacttctattggcgttgcttccccgatggggtagagaattatgatagttggggaggtgtggtatgtcatggcaatgctagcgatataaaagaaggacacaagagtttcccaagcggccatacatcatggtcctttgcaggtctaggttttctgtctctgtacctatcggggaagattaaagcttttgatcgcaaagggcacgtggcaaaattatgcattgtgtttcttcctctacttgttgcttgcctagttgcaatctctcgagtggatgactattggcaccattggcaagatgtgtttgccggaggcattctagggcttgttgtggcaaccttttgttatatgcagttcttccctgcgccctataatgatgaaggatggggtccatatgcatatttccgggcaatggaggaatcacgagcgaatgcaaatattaatcgggaattaccagttgggcaggccatggaggatcgggtaacgaatcaagaaccaaggagaaatggtgataccacctttaccccttactcttaccgtagcccaaccttggaagccatggaaatgggacagaagtaatagtcttctatagcactaatcttctccctagctacctagttccttacttttgtgtatacttatgagcttctctacacggcaaccactagatttagctaattgtgcagcttctgtttcttcttgcattattattattattggcactgccactgt

SEQ ID NO: 9003 - protein, 379 aa, Glycine max
  peptide (1)..(379): Ceres Seq. ID no. 15168546
  misc_feature (136)..(311): Pfam Name: Pfam Description:  PAP2 superfamily
  misc_feature (25)..(378): NCBI GI NO: 9621903 NR Description: phosphatidic acid phosphatase alpha
  misc_feature (46)..(360): NCBI GI NO: 15724220 NR Description: At2g01180/F10A8.6 [Arabidopsis thaliana]
  misc_feature (46)..(360): NCBI GI NO: 18379166 NR Description: phosphatidic acid phosphatase (PAP2) family
  misc_feature (46)..(360): NCBI GI NO: 21554001 NR Description: putative phosphatidic acid phosphatase
  misc_feature (72)..(357): NCBI GI NO: 6957723 NR Description: putative phosphatidate phosphohydrolase
  misc_feature (72)..(357): NCBI GI NO: 18396250 NR Description: phosphatidic acid phosphatase (PAP2) family
  misc_feature (65)..(360): NCBI GI NO: 25353094 NR Description: probable phosphatidic acid phosphatase
  misc_feature (66)..(329): NCBI GI NO: 15218051 NR Description: phosphatidic acid phosphatase (PAP2) family
  misc_feature (73)..(373): NCBI GI NO: 34910912 NR Description: putative phosphatidic acid phosphatase beta
  misc_feature (72)..(335): NCBI GI NO: 38637528 NR Description: unknown protein
WLTDLEFVEAGTAPSRPAPNHLISKRRFRDCKFSASLHMEPVSRANFFSFQRFWLPFQGQGGMRQQVDPSAHTIKSHGASLARKHARDWLILLLLIVIEIVLFVIHPFKRFVGRDMMEDLRYPMKENTVPVWAVPLYAVLLPMAVFLLFYMRRRDVYDLHHSVLGLLFAVLITGVFTDAIKNAVGRPRPDFYWRCFPDGVENYDSWGGVVCHGNASDIKEGHKSFPSGHTSWSFAGLGFLSLYLSGKIKAFDRKGHVAKLCIVFLPLLVACLVAISRVDDYWHHWQDVFAGGILGLVVATFCYMQFFPAPYNDEGWGPYAYFRAMEESRANANINRELPVGQAMEDRVTNQEPRRNGDTTFTPYSYRSPTLEAMEMGQK

SEQ ID NO: 9004 - protein, 341 aa, Glycine max
  peptide (1)..(341): Ceres Seq. ID no. 15168547
  misc_feature (98)..(273): Pfam Name: Pfam Description:  PAP2 superfamily
  misc_feature (1)..(340): NCBI GI NO: 9621903 NR Description: phosphatidic acid phosphatase alpha
  misc_feature (8)..(322): NCBI GI NO: 15724220 NR Description: At2g01180/F10A8.6 [Arabidopsis thaliana]
  misc_feature (8)..(322): NCBI GI NO: 18379166 NR Description: phosphatidic acid phosphatase (PAP2) family
  misc_feature (8)..(322): NCBI GI NO: 21554001 NR Description: putative phosphatidic acid phosphatase
  misc_feature (34)..(319): NCBI GI NO: 6957723 NR Description: putative phosphatidate phosphohydrolase
  misc_feature (34)..(319): NCBI GI NO: 18396250 NR Description: phosphatidic acid phosphatase (PAP2) family
  misc_feature (27)..(322): NCBI GI NO: 25353094 NR Description: probable phosphatidic acid phosphatase
  misc_feature (28)..(291): NCBI GI NO: 15218051 NR Description: phosphatidic acid phosphatase (PAP2) family
  misc_feature (35)..(335): NCBI GI NO: 34910912 NR Description: putative phosphatidic acid phosphatase beta
  misc_feature (34)..(297): NCBI GI NO: 38637528 NR Description: unknown protein
MEPVSRANFFSFQRFWLPFQGQGGMRQQVDPSAHTIKSHGASLARKHARDWLILLLLIVIEIVLFVIHPFKRFVGRDMMEDLRYPMKENTVPVWAVPLYAVLLPMAVFLLFYMRRRDVYDLHHSVLGLLFAVLITGVFTDAIKNAVGRPRPDFYWRCFPDGVENYDSWGGVVCHGNASDIKEGHKSFPSGHTSWSFAGLGFLSLYLSGKIKAFDRKGHVAKLCIVFLPLLVACLVAISRVDDYWHHWQDVFAGGILGLVVATFCYMQFFPAPYNDEGWGPYAYFRAMEESRANANINRELPVGQAMEDRVTNQEPRRNGDTTFTPYSYRSPTLEAMEMGQK

SEQ ID NO: 9005 - protein, 317 aa, Glycine max
  peptide (1)..(317): Ceres Seq. ID no. 15168548
  misc_feature (74)..(249): Pfam Name: Pfam Description:  PAP2 superfamily
  misc_feature (1)..(316): NCBI GI NO: 9621903 NR Description: phosphatidic acid phosphatase alpha
  misc_feature (1)..(298): NCBI GI NO: 15724220 NR Description: At2g01180/F10A8.6 [Arabidopsis thaliana]
  misc_feature (1)..(298): NCBI GI NO: 18379166 NR Description: phosphatidic acid phosphatase (PAP2) family
  misc_feature (1)..(298): NCBI GI NO: 21554001 NR Description: putative phosphatidic acid phosphatase
  misc_feature (10)..(295): NCBI GI NO: 6957723 NR Description: putative phosphatidate phosphohydrolase
  misc_feature (10)..(295): NCBI GI NO: 18396250 NR Description: phosphatidic acid phosphatase (PAP2) family
  misc_feature (3)..(298): NCBI GI NO: 25353094 NR Description: probable phosphatidic acid phosphatase
  misc_feature (4)..(267): NCBI GI NO: 15218051 NR Description: phosphatidic acid phosphatase (PAP2) family
  misc_feature (11)..(311): NCBI GI NO: 34910912 NR Description: putative phosphatidic acid phosphatase beta
  misc_feature (10)..(273): NCBI GI NO: 38637528 NR Description: unknown protein
MRQQVDPSAHTIKSHGASLARKHARDWLILLLLIVIEIVLFVIHPFKRFVGRDMMEDLRYPMKENTVPVWAVPLYAVLLPMAVFLLFYMRRRDVYDLHHSVLGLLFAVLITGVFTDAIKNAVGRPRPDFYWRCFPDGVENYDSWGGVVCHGNASDIKEGHKSFPSGHTSWSFAGLGFLSLYLSGKIKAFDRKGHVAKLCIVFLPLLVACLVAISRVDDYWHHWQDVFAGGILGLVVATFCYMQFFPAPYNDEGWGPYAYFRAMEESRANANINRELPVGQAMEDRVTNQEPRRNGDTTFTPYSYRSPTLEAMEMGQK

SEQ ID NO: 9006 - DNA, 1249 bp, Glycine max
  misc_feature (1)..(1249): Ceres Seq. ID no. 15171766
aaaaccataaccgttgttgaacctccgaaaaacaagactccctccaagaagaaaaatgctgaaagccgtggcgccactcttcagccgtagccacaagcagcagtctcggtccttcaaggagtactacgcagagtggttcaacaccctcaagaacaaccacctccccctcctccgccactccatctccggcgactccctcaccattctctccacccacgtcgagatgctccaccagcacttccagtcctactaccacgccctcgacgccgccgccacctccgacgcctcccagctcctctcccaggagtggcgcaactccctcgagaaacccctcctctggctcggcgacctccacccctccctcttcaccaacctcgcccgctccttcctccaagacgaacattcccccgaccacaccgacgacgaagatgattccgatccccaccaccaccaccaccaccaccaccactttcccctccccgaacgcccctggcaggtggcgatggcctggcgcaacccttcggaggctctaactgcccgcatggaccagatcgagtgcggcctccgcgtgattgtaccggccctttcggaccgcctgaaacacgcggaggacgcattcgtgggccgcgtaatggggaactggttccgctgccgtgaccatcatcacaagggcagcggagcctcgtccaaggttgctgtgggggccgatgtgaaggcccacatggaggagctcgtgagcgtgttcctctacgcaaaccgcctcaggaggaacgtgcttgtggacatacttagtgccaccaccgtttaccaggccgcgctgtttcttgaagggttggcccagtttcttattgggttcagggaccatgggttggtgaacgccgttgaacactgcaaggccttgcctctcgcaaacaataaacagtgtcgtcctcgctgccattgatgatgataatgcaacagtgtatgtatctatttcgttcctctcattgtgattgtgtggaacttttcgtggaaaaatactgtggaatggatggttactgtgttttaggtttagcattgatattctttacaattttgttgtttgtatttgataagatttttaggtttggaagatgacactggagacttaatttctgtgtcaatggattaattacgttttgtatttgtggagggaataagtgttagtgaacactgaacagtttcttcaattgagggaaatttctgttaacaatgttgatggatttgcagt

SEQ ID NO: 9007 - protein, 295 aa, Glycine max
  peptide (1)..(295): Ceres Seq. ID no. 15171767
  misc_feature (12)..(277): NCBI GI NO: 15235715 NR Description: hypothetical protein [Arabidopsis thaliana]
MLKAVAPLFSRSHKQQSRSFKEYYAEWFNTLKNNHLPLLRHSISGDSLTILSTHVEMLHQHFQSYYHALDAAATSDASQLLSQEWRNSLEKPLLWLGDLHPSLFTNLARSFLQDEHSPDHTDDEDDSDPHHHHHHHHHFPLPERPWQVAMAWRNPSEALTARMDQIECGLRVIVPALSDRLKHAEDAFVGRVMGNWFRCRDHHHKGSGASSKVAVGADVKAHMEELVSVFLYANRLRRNVLVDILSATTVYQAALFLEGLAQFLIGFRDHGLVNAVEHCKALPLANNKQCRPRCH

SEQ ID NO: 9008 - protein, 239 aa, Glycine max
  peptide (1)..(239): Ceres Seq. ID no. 15171768
  misc_feature (1)..(221): NCBI GI NO: 15235715 NR Description: hypothetical protein [Arabidopsis thaliana]
MLHQHFQSYYHALDAAATSDASQLLSQEWRNSLEKPLLWLGDLHPSLFTNLARSFLQDEHSPDHTDDEDDSDPHHHHHHHHHFPLPERPWQVAMAWRNPSEALTARMDQIECGLRVIVPALSDRLKHAEDAFVGRVMGNWFRCRDHHHKGSGASSKVAVGADVKAHMEELVSVFLYANRLRRNVLVDILSATTVYQAALFLEGLAQFLIGFRDHGLVNAVEHCKALPLANNKQCRPRCH

SEQ ID NO: 9009 - DNA, 1304 bp, Glycine max
  misc_feature (1)..(1304): Ceres Seq. ID no. 13594301
gcaatttttttgtcaatttagctgttgcaactgatactctaacagtgttttattctatgcatctctttaccaaattgcccctgctcaaagttgaaattctatagtcactttttaatttttttttttgttctgggtgtttttcttatctgtgttttgtttcaattgcgcgaggtgggtttttctagggtttggaggctatgccgaaagcgggttgaataagctcaggtgaagaaaatgattctcacaaagcagtaccgatgcatacactcagctagctgtcaatgtactaaagggcatttaagtgaagatgtgatattcttagtatttcataatttgaattggaatcccaagctaattgctactctatcatgtgtgtgcaaatggtttgatgatcttgccaagcgagttctatggaaagagttttgtagaacaagagctccgaaaatgttgtgtgatctgcaatctaatgggagccacattgttgatgggaactggagggccctagggaagcttcttatatactgttcaggatgcacaaaaggtggcttgttcaatagcattcagatccctggtcactttgtttatcagacacgattttctagaacatcaggaaagagctttcttttgccacaatgcagaactgatgttttgtatgtgtctgatccttgtgagcatcttgaccaaggtgaagaaggagatgtaggattcttccgtggcattttcaagtcatttgcaacctcaaaggtcaggaagatgcttattaataaaggtgccaagctccatccaacagaagtctgcccttattgtaaggcaaagttgtggagcatgctgcaagccaaaatgatccctcaaagtgctagttgcaggttgggttcttatgatgattgtattgagtattatgtgtgcctcaacggccacatgcttgggatatgtacactgttaccattgtctgattcagaagaggcatctgaattggagtaatacctaaatgattttcaggttggcagtaaatcttcacaagttggctaaacactgctggtatactccaggctcaattcaactaatcagcacctaaaatatgccattaacttaccctcaagcttgatgctgcaatctcacccaacccaagccacaatttccaaggaaggacggagatgatcaatttttagtatgaatcgttatactgaagtttgttactgtgaactatgtgatatcccatgtagattgatacgcggtgtctctacctgtgacaaatatgcgtgtgtaataattcatacttgttcaatataatcaggattcattct

SEQ ID NO: 9010 - protein, 248 aa, Glycine max
  peptide (1)..(248): Ceres Seq. ID no. 13594302
  misc_feature (1)..(248): NCBI GI NO: 15241717 NR Description: expressed protein [Arabidopsis thaliana]
  misc_feature (1)..(244): NCBI GI NO: 15242296 NR Description: expressed protein [Arabidopsis thaliana]
  misc_feature (1)..(246): NCBI GI NO: 34393587 NR Description: unknown protein
  misc_feature (20)..(246): NCBI GI NO: 14210079 NR Description: circadian clock coupling factor ZGT
  misc_feature (20)..(242): NCBI GI NO: 34908976 NR Description: putative circadian clock coupling factor ZGT
  misc_feature (23)..(243): NCBI GI NO: 11281127 NR Description: hypothetical protein T20O10
  misc_feature (23)..(243): NCBI GI NO: 18412596 NR Description: expressed protein [Arabidopsis thaliana]
MILTKQYRCIHSASCQCTKGHLSEDVIFLVFHNLNWNPKLIATLSCVCKWFDDLAKRVLWKEFCRTRAPKMLCDLQSNGSHIVDGNWRALGKLLIYCSGCTKGGLFNSIQIPGHFVYQTRFSRTSGKSFLLPQCRTDVLYVSDPCEHLDQGEEGDVGFFRGIFKSFATSKVRKMLINKGAKLHPTEVCPYCKAKLWSMLQAKMIPQSASCRLGSYDDCIEYYVCLNGHMLGICTLLPLSDSEEASELE

SEQ ID NO: 9011 - protein, 178 aa, Glycine max
  peptide (1)..(178): Ceres Seq. ID no. 13594303
  misc_feature (1)..(178): NCBI GI NO: 15241717 NR Description: expressed protein [Arabidopsis thaliana]
  misc_feature (1)..(174): NCBI GI NO: 15242296 NR Description: expressed protein [Arabidopsis thaliana]
  misc_feature (1)..(176): NCBI GI NO: 34393587 NR Description: unknown protein
  misc_feature (1)..(176): NCBI GI NO: 14210079 NR Description: circadian clock coupling factor ZGT
  misc_feature (1)..(172): NCBI GI NO: 34908976 NR Description: putative circadian clock coupling factor ZGT
  misc_feature (1)..(173): NCBI GI NO: 11281127 NR Description: hypothetical protein T20O10
  misc_feature (1)..(173): NCBI GI NO: 18412596 NR Description: expressed protein [Arabidopsis thaliana]
MLCDLQSNGSHIVDGNWRALGKLLIYCSGCTKGGLFNSIQIPGHFVYQTRFSRTSGKSFLLPQCRTDVLYVSDPCEHLDQGEEGDVGFFRGIFKSFATSKVRKMLINKGAKLHPTEVCPYCKAKLWSMLQAKMIPQSASCRLGSYDDCIEYYVCLNGHMLGICTLLPLSDSEEASELE

SEQ ID NO: 9012 - DNA, 1300 bp, Glycine max
  misc_feature (1)..(1300): Ceres Seq. ID no. 15168591
gatatattaaaattagtcgattaaaattgaaatttccacaaacgtaacactcgaagaactatcctccttcttcttcgtttctatggtcactacttgtcggcactcatgtccaaaccaaaacacttgtaatttaaatccaacgttgctctctgttaacctataattccccgaagaaatctccgcaaacatgaaaacagagcatcatagaagaccttcaccttcgttaacacctatactcgtcaaaagagcaaaacccgccgcgtattttattctccttttgctaacgtacaccttaggttacttatcccaccacccttcttccacttcattaccactctcaccatcatcgtcgccatcgccatcgtcgttagaacctattattcggttctcaattaacaccaccgaggtgaacccgttccgagtcacaactcgctgcgccgatccaattccgccggagtccgttcgccggacgctcgttgaccgcctcttcaacggcacctcgccgtttgaaaactttccgccgccgcatgcggcggcaaagctccggcgaacgactaaagtcaagggatggggctccaccggcaaggttttcgagaatctcatccgccgggtgcggccgcgaaccgtcgtggaagttggcacgttcctcggcgcgtcggcgatacacatggccgagttgactcggcgactcggcctcgaaactcagatcctctgcgtcgacgactttcgaggctgggccgggttcagggaccggttcagtaaaataccgatgcaaaacggtgacgtttggctcttttaccagttccttcagaatgtggttacttttaaccagaccgggtcggtaatgcccgttccattttcgagcgggtcgaccctgatgttgttttgcgagtggggggtgtttgcggatttgattgagatcgatgctggccacgattttttatcggcctgggccgatattaatcgtggatttcggatcctccaacccggtggggttatattcgggcacgattatttcaccgcagcggataatagaggtgttcggagagccgttgatttgtttgccaaagtcaacaatcttaaggtaaatgttgatggtcaacattgggttatttattcttcctaatgtttagaatttcatgtatcgtgtatagtggaaaacatctgtttattgaataagttgataggattctttgggtgtataaattatacaatttgaaggaaggaaagacttgcggactttttgttatccattgtcctttcagtggtcaataattcaatttgaagcttccgtttcagt

SEQ ID NO: 9013 - protein, 312 aa, Glycine max
  peptide (1)..(312): Ceres Seq. ID no. 15168592
  misc_feature (24)..(311): NCBI GI NO: 15223338 NR Description: hypothetical protein [Arabidopsis thaliana]
MKTEHHRRPSPSLTPILVKRAKPAAYFILLLLTYTLGYLSHHPSSTSLPLSPSSSPSPSSLEPIIRFSINTTEVNPFRVTTRCADPIPPESVRRTLVDRLFNGTSPFENFPPPHAAAKLRRTTKVKGWGSTGKVFENLIRRVRPRTVVEVGTFLGASAIHMAELTRRLGLETQILCVDDFRGWAGFRDRFSKIPMQNGDVWLFYQFLQNVVTFNQTGSVMPVPFSSGSTLMLFCEWGVFADLIEIDAGHDFLSAWADINRGFRILQPGGVIFGHDYFTAADNRGVRRAVDLFAKVNNLKVNVDGQHWVIYSS

SEQ ID NO: 9014 - DNA, 963 bp, Glycine max
  misc_feature (1)..(963): Ceres Seq. ID no. 13594304
agaacacctaatcgaaaaatttttacggcactgagtgaggtggttcactgtctctgcctctttctcttctttgttcctagaaacaaaccatcatcttcttagatctataccaacgtcgaaggaaataatctcttgccaaaagcaaaaccctaaacacttcctccgagtatttaccagaaccatagtttttaaaagctgagagcgtcaaaggcacagctgtcgcgtgggaagatcccaatgtgtgctagaaattaaaaagatcattgacaccattgccgaagaaggggtctgtgacctcactcgcgtccctcttcccagtagaggaggtgcagaaggtggccaagcgcattgaagacaccattgccgacaagcagagcgaaattaaccgcgtacgaggttttgtcgtcgacaaaacagcctcatcaacctcgtccacaagctccttgaacagctctcctacgacatcatggttccgtttgggaaagcaacattcttcccaggtcgtttgattcacaccaatgagttcctggttcttttgggagaaggatattatgctgagagaacttcgaagcaaaccgttgagattttacagcgaagagggaagtccttggattcgcgggttgattctcttgaggccaatatcaaggaccctgaagcagaggcttcatttctcaatgccacggcttcatttttggttgctaggttcttttgggagaagggtattatgttgaatttttaatgctgaaatgctgaatttgttctatgttaattcttccattaaaaatattgggaattttgattttttatctcaaacgtgtagagagactggagagcctgtgaccgtcaatttttatgtgtacaatggaagcaatttttcatgttaattctgcagttcaattcaacttcaaaaaaaaaaaaaaaaaagcttatcgataccgtcgacctcgagggggggcccggtac

SEQ ID NO: 9015 - protein, 90 aa, Glycine max
  peptide (1)..(90): Ceres Seq. ID no. 13594305
  misc_feature (1)..(74): Pfam Name: Pfam Description:  Prefoldin subunit
  misc_feature (1)..(74): NCBI GI NO: 34907082 NR Description: OSJNBa0052O12.6
  misc_feature (1)..(74): NCBI GI NO: 25406740 NR Description: hypothetical protein
  misc_feature (1)..(74): NCBI GI NO: 30678662 NR Description: expressed protein [Arabidopsis thaliana]
  misc_feature (1)..(68): NCBI GI NO: 19924161 NR Description: RPB5-mediating protein isoform b
  misc_feature (1)..(68): NCBI GI NO: 20139325 NR Description: RNA polymerase II subunit 5-mediating protein
  misc_feature (1)..(68): NCBI GI NO: 34191784 NR Description: Unknown (protein for IMAGE:4821488) [Homo sapiens]
  misc_feature (1)..(68): NCBI GI NO: 19924159 NR Description: RPB5-mediating protein isoform a
  misc_feature (1)..(68): NCBI GI NO: 34855762 NR Description: similar to NNX3 [Rattus norvegicus]
  misc_feature (1)..(55): NCBI GI NO: 29841259 NR Description: hypothetical protein, putative prefoldin chaperone
MVPFGKATFFPGRLIHTNEFLVLLGEGYYAERTSKQTVEILQRRGKSLDSRVDSLEANIKDPEAEASFLNATASFLVARFFWEKGIMLNF

SEQ ID NO: 9016 - protein, 70 aa, Glycine max
  peptide (1)..(70): Ceres Seq. ID no. 13594306
MSSWFFWEKDIMLRELRSKPLRFYSEEGSPWIRGLILLRPISRTLKQRLHFSMPRLHFWLLGSFGRRVLC

SEQ ID NO: 9017 - protein, 59 aa, Glycine max
  peptide (1)..(59): Ceres Seq. ID no. 13594307
MLRELRSKPLRFYSEEGSPWIRGLILLRPISRTLKQRLHFSMPRLHFWLLGSFGRRVLC

SEQ ID NO: 9018 - DNA, 1196 bp, Glycine max
  misc_feature (1)..(1196): Ceres Seq. ID no. 14316371
atctaccattggggtttcactgttcagtgtaactctcaagccatgtctccgggtcccgttattgacgcagccaccgaccccggcgccgaccaacaaattccctccgtcgacgacgcaatcctcaagaagaaagctcacccccaggttccccccatttccattcttttttctactttactttatctcttattcgcttccacgatcttttttttctcaggaagatgacgctcccattgtcgaggacgtcaaggacgatgacaaagaggaaaccgaagacgaggatgaggacgatgacgacgatgacaaggaagatgacgcccaaggtggtgctgagggtgggaagcagagcagaagtgagaagaagagccgaaaagcaatgttgaagttgggactgaaacctgttactggcgttagtagggtcacaatcaagaggacaaagaatattctttttttcatctcaaaacctgatgtcttcaagagtccaaattctgagacctacatcatatttggggaggcaaaaatagaggacttgagctctcagttgcagacacaggctgctcaacagttcaggatgccagatgtgggatccgtactggcaaaacaagatcaagatgctgcagctgcagcggcacagcctgaagaagaggaggaggaggttgatgaaactggtgtcgagccccatgacattgatttggtgatgacacaggcaggagtgtcaagaagcaaggctgtcaaggcccttaagactcacaatggggacattgtcggtgccattatggagctcactacttagtttcggtttatgttccatttgtagtttttgatttttggggatgattttggaactagtgccatcgtttttgtggtagtcaaaccatatatttggtccatatggttgtgcttaccttataatttcttgtggtacgatgtgatgatcaatgatcatattattttgttgtctttacttatagtagccttcttttagctctatatctttttgcccttaagttaacgtctagccctaaaattcgttggtttaaactttaggtatatatggttggtttgttgtatctgtacctgcaacactaaaggttcatgtcccgtggcctttggaaaatgggggccattgagctaggaatttttgtatcttaggctatattgatgattggattaaattgaattaattttaaaatttg

SEQ ID NO: 9019 - protein, 263 aa, Glycine max
  peptide (1)..(263): Ceres Seq. ID no. 14316372
  misc_feature (117)..(176): Pfam Name: Pfam Description:  NAC domain
  misc_feature (73)..(263): NCBI GI NO: 15229149 NR Description: alpha NAC-related protein [Arabidopsis thaliana]
  misc_feature (73)..(262): NCBI GI NO: 34902238 NR Description: Putative nascent polypeptide associated complexalpha chain
  misc_feature (73)..(263): NCBI GI NO: 13899101 NR Description: alpha NAC-like protein [Arabidopsis thaliana]
  misc_feature (72)..(263): NCBI GI NO: 15235122 NR Description: alpha NAC -related [Arabidopsis thaliana]
  misc_feature (72)..(263): NCBI GI NO: 18398710 NR Description: expressed protein [Arabidopsis thaliana]
  misc_feature (72)..(263): NCBI GI NO: 21536597 NR Description: putative alpha NAC [Arabidopsis thaliana]
  misc_feature (73)..(263): NCBI GI NO: 32352154 NR Description: nascent polypeptide associated complex alpha chain
  misc_feature (73)..(262): NCBI GI NO: 34907258 NR Description: putative nascent polypeptide associated complexalpha chain
  misc_feature (75)..(263): NCBI GI NO: 15230476 NR Description: nascent polypeptide associated complex alpha chain-related
  misc_feature (72)..(263): NCBI GI NO: 6752882 NR Description: nascent polypeptide associated complex alpha chain
STIGVSLFSVTLKPCLRVPLLTQPPTPAPTNKFPPSTTQSSRRKLTPRFPPFPFFFLLYFISYSLPRSFFSQEDDAPIVEDVKDDDKEETEDEDEDDDDDDKEDDAQGGAEGGKQSRSEKKSRKAMLKLGLKPVTGVSRVTIKRTKNILFFISKPDVFKSPNSETYIIFGEAKIEDLSSQLQTQAAQQFRMPDVGSVLAKQDQDAAAAAAQPEEEEEEVDETGVEPHDIDLVMTQAGVSRSKAVKALKTHNGDIVGAIMELTT

SEQ ID NO: 9020 - protein, 138 aa, Glycine max
  peptide (1)..(138): Ceres Seq. ID no. 14316373
  misc_feature (1)..(51): Pfam Name: Pfam Description:  NAC domain
  misc_feature (1)..(138): NCBI GI NO: 15229149 NR Description: alpha NAC-related protein [Arabidopsis thaliana]
  misc_feature (1)..(137): NCBI GI NO: 34902238 NR Description: Putative nascent polypeptide associated complexalpha chain
  misc_feature (1)..(138): NCBI GI NO: 13899101 NR Description: alpha NAC-like protein [Arabidopsis thaliana]
  misc_feature (1)..(138): NCBI GI NO: 15235122 NR Description: alpha NAC -related [Arabidopsis thaliana]
  misc_feature (1)..(138): NCBI GI NO: 18398710 NR Description: expressed protein [Arabidopsis thaliana]
  misc_feature (1)..(138): NCBI GI NO: 21536597 NR Description: putative alpha NAC [Arabidopsis thaliana]
  misc_feature (1)..(138): NCBI GI NO: 32352154 NR Description: nascent polypeptide associated complex alpha chain
  misc_feature (1)..(137): NCBI GI NO: 34907258 NR Description: putative nascent polypeptide associated complexalpha chain
  misc_feature (1)..(138): NCBI GI NO: 15230476 NR Description: nascent polypeptide associated complex alpha chain-related
  misc_feature (1)..(138): NCBI GI NO: 6752882 NR Description: nascent polypeptide associated complex alpha chain
MLKLGLKPVTGVSRVTIKRTKNILFFISKPDVFKSPNSETYIIFGEAKIEDLSSQLQTQAAQQFRMPDVGSVLAKQDQDAAAAAAQPEEEEEEVDETGVEPHDIDLVMTQAGVSRSKAVKALKTHNGDIVGAIMELTT

SEQ ID NO: 9021 - DNA, 1095 bp, Glycine max
  misc_feature (1)..(1095): Ceres Seq. ID no. 14313959
acaaactcacttcacctgtttcgtgcaaaaacaattcctgttgtctctccacagtccctccctcacattctctctctagctttttagagagagagagagagaagaagaagaagacatggagatcaagaagaggtttggggtgttgatgtgtgcagaggattcggagtacgtgaaaaaagtgtacggagggtattctggggttttcgtgagaatgctggcggaggagggagagacatgggacgtgtacaaggtggcgcgtggggagtttcctgacgaagatgatttgggtctctatgatgggtttgtgatcactggcagctgcagtgacgcacatggcaacgacacatgggtcagtgatcttctcaacttgcttcgcaaactcgattccatcaacaccaagatcctcggcatttgctttggccaccagatacttgggcgtgcattgggagggaaggtgactcgttctactactggatgggatcttggtgtcagaaccataacattgtcaccatctttgcgatttgctttgtcttctcttgatcttccatcaagactttccattatcgaatgccacagggatgagatccgagagctaccagccaaggcagaggttattgcttggtcggataagactggaattgaaatgttcaggtatggagatcacattatgggaatccaaggtcaccctgagtactccaaagacattcttttgcaccttattgaccgtctcattcaacgcaattacatcatagatgcttttggtaaacaagcaagggagagggctgcgttgtgggagccagatagggaggcttggaagaaactctgtgtcacttttttgaagggtagattgtgacataaaaatggcattgaaaagaggaatttcagttctgtaaagaagcgataatatttaaaagtagtcgtatgggaggggtctatgcatagaagttataggttggtagcactaatgtggtgtgttaattagttggctttgttaggttgccagccattaatgttgataggtgctttctatgtaagctcaactatatcaatggtcaaataattagagcaataaaaagtttcagtgttctcccgttt

SEQ ID NO: 9022 - protein, 245 aa, Glycine max
  peptide (1)..(245): Ceres Seq. ID no. 14313960
  misc_feature (34)..(213): Pfam Name: Pfam Description:  Glutamine amidotransferase class-I
  misc_feature (7)..(245): NCBI GI NO: 13174241 NR Description: putative glutamine synthetase [Oryza sativa]
  misc_feature (4)..(244): NCBI GI NO: 15224079 NR Description: defense-related protein, putative
  misc_feature (1)..(243): NCBI GI NO: 15234767 NR Description: glutamine amidotransferase class-I domain-containing
  misc_feature (1)..(243): NCBI GI NO: 17381294 NR Description: AT4g30550/F17I23_110 [Arabidopsis thaliana]
  misc_feature (1)..(243): NCBI GI NO: 21555885 NR Description: unknown [Arabidopsis thaliana]
  misc_feature (5)..(245): NCBI GI NO: 15234765 NR Description: glutamine amidotransferase class-I domain-containing
  misc_feature (4)..(245): NCBI GI NO: 15234763 NR Description: glutamine amidotransferase class-I domain-containing
  misc_feature (4)..(245): NCBI GI NO: 21593315 NR Description: defense-related protein [Arabidopsis thaliana]
  misc_feature (4)..(245): NCBI GI NO: 14009290 NR Description: defense-related protein [Brassica carinata]
  misc_feature (1)..(211): NCBI GI NO: 15224078 NR Description: defense-related protein, putative
MEIKKRFGVLMCAEDSEYVKKVYGGYSGVFVRMLAEEGETWDVYKVARGEFPDEDDLGLYDGFVITGSCSDAHGNDTWVSDLLNLLRKLDSINTKILGICFGHQILGRALGGKVTRSTTGWDLGVRTITLSPSLRFALSSLDLPSRLSIIECHRDEIRELPAKAEVIAWSDKTGIEMFRYGDHIMGIQGHPEYSKDILLHLIDRLIQRNYIIDAFGKQARERAALWEPDREAWKKLCVTFLKGRL

SEQ ID NO: 9023 - protein, 235 aa, Glycine max
  peptide (1)..(235): Ceres Seq. ID no. 14313961
  misc_feature (24)..(203): Pfam Name: Pfam Description:  Glutamine amidotransferase class-I
  misc_feature (1)..(235): NCBI GI NO: 13174241 NR Description: putative glutamine synthetase [Oryza sativa]
  misc_feature (1)..(234): NCBI GI NO: 15224079 NR Description: defense-related protein, putative
  misc_feature (1)..(233): NCBI GI NO: 15234767 NR Description: glutamine amidotransferase class-I domain-containing
  misc_feature (1)..(233): NCBI GI NO: 17381294 NR Description: AT4g30550/F17I23_110 [Arabidopsis thaliana]
  misc_feature (1)..(233): NCBI GI NO: 21555885 NR Description: unknown [Arabidopsis thaliana]
  misc_feature (1)..(235): NCBI GI NO: 15234765 NR Description: glutamine amidotransferase class-I domain-containing
  misc_feature (1)..(235): NCBI GI NO: 15234763 NR Description: glutamine amidotransferase class-I domain-containing
  misc_feature (1)..(235): NCBI GI NO: 21593315 NR Description: defense-related protein [Arabidopsis thaliana]
  misc_feature (1)..(235): NCBI GI NO: 14009290 NR Description: defense-related protein [Brassica carinata]
  misc_feature (1)..(201): NCBI GI NO: 15224078 NR Description: defense-related protein, putative
MCAEDSEYVKKVYGGYSGVFVRMLAEEGETWDVYKVARGEFPDEDDLGLYDGFVITGSCSDAHGNDTWVSDLLNLLRKLDSINTKILGICFGHQILGRALGGKVTRSTTGWDLGVRTITLSPSLRFALSSLDLPSRLSIIECHRDEIRELPAKAEVIAWSDKTGIEMFRYGDHIMGIQGHPEYSKDILLHLIDRLIQRNYIIDAFGKQARERAALWEPDREAWKKLCVTFLKGRL

SEQ ID NO: 9024 - protein, 213 aa, Glycine max
  peptide (1)..(213): Ceres Seq. ID no. 14313962
  misc_feature (2)..(181): Pfam Name: Pfam Description:  Glutamine amidotransferase class-I
  misc_feature (1)..(213): NCBI GI NO: 13174241 NR Description: putative glutamine synthetase [Oryza sativa]
  misc_feature (1)..(212): NCBI GI NO: 15224079 NR Description: defense-related protein, putative
  misc_feature (1)..(211): NCBI GI NO: 15234767 NR Description: glutamine amidotransferase class-I domain-containing
  misc_feature (1)..(211): NCBI GI NO: 17381294 NR Description: AT4g30550/F17I23_110 [Arabidopsis thaliana]
  misc_feature (1)..(211): NCBI GI NO: 21555885 NR Description: unknown [Arabidopsis thaliana]
  misc_feature (1)..(213): NCBI GI NO: 15234765 NR Description: glutamine amidotransferase class-I domain-containing
  misc_feature (1)..(213): NCBI GI NO: 15234763 NR Description: glutamine amidotransferase class-I domain-containing
  misc_feature (1)..(213): NCBI GI NO: 21593315 NR Description: defense-related protein [Arabidopsis thaliana]
  misc_feature (1)..(213): NCBI GI NO: 14009290 NR Description: defense-related protein [Brassica carinata]
  misc_feature (1)..(179): NCBI GI NO: 15224078 NR Description: defense-related protein, putative
MLAEEGETWDVYKVARGEFPDEDDLGLYDGFVITGSCSDAHGNDTWVSDLLNLLRKLDSINTKILGICFGHQILGRALGGKVTRSTTGWDLGVRTITLSPSLRFALSSLDLPSRLSIIECHRDEIRELPAKAEVIAWSDKTGIEMFRYGDHIMGIQGHPEYSKDILLHLIDRLIQRNYIIDAFGKQARERAALWEPDREAWKKLCVTFLKGRL

SEQ ID NO: 9025 - DNA, 2105 bp, Glycine max
  misc_feature (1)..(2105): Ceres Seq. ID no. 15171762
attcaaaaactcgcaaaagaaacccaaaatctcttcggctctctctcttttccatatccatatatatccccaaaccctaccgttaggttccccaattcaacaccccgtggaccggtgcgctgcttctttgttcgtacggtttccgtcgattgcctccgaaacgatgtcgtatcgcccaagcgggaactccaggaccgaggtccgccgcaaccggtacaaggtggcggtggacgcggacgaaggtcggagacgacgagaggacacgatggtggagatccgcaagaaccgcagagaagagagtttgcagaagaagaggcgcgaaggattccaacctcagcagatacctgcgtccgttcactctagtttggtagagaagaagttggaacacctaccatctatggttactggtgtttggactgatgataataacctgcagctcgaggcgacgacgcagttccggaagctgctttcgattgaacgtagtccgccgattgaggaggttatacagactggtgtggtttctcgctttgttgagtttctcatgagggaagactttccacagttgcagtttgaggcagcctgggctttgacaaatatagcttctgggacgtctgaaaacaccaaggttgtcattgatcacggggctgtcccaattttcgtgaagctacttgcttctcctagtgatgatgtccgtgaacaggcagtgtgggcattaggcaatgtcgcgggggattcacctagatgtcgtgatcttgttctcagtcatggggctttgcttcctttgttggcacaattaaatgaacatgccaagctttctatgcttagaaatgctacctggacactttcaaacttctgcaggggcaagccacagcctccttttgatcaggttaaacctgcacttcctgctcttgcccgtcttatccattcaaacgatgaagaagtattgactgatgcatgttgggcactgtcatatctttctgatggcacaaatgataaaattcaagctgtaattgaagctggtgtttgtccccgacttgttgagctgctgctgcacccatccccttcagtgctaattcctgctcttcgaactgttggaaatattgtcactggagatgatatgcagactcaggttatcatcaatcaccaggctcttccttgccttcttaatctgttgaccaataattataaaaaaagcatcaagaaggaagcttgttggaccatatccaatatcacagctggtaataagcagcagattcaggctgtgattgaggctaatctaattgctcctttggtcaatctgcttcaaaatgctgagtttgatatcaagaaagaagctgcttgggctatctcaaatgctacatccggtggttctcatgaacaaatcaagttcctagtaagccaagggtgtattaagcccttgtgtgatcttctcatctgtcctgatcctagaattgttacagtttgtctggaaggccttgaaaacatcttgaaggtgggagaagctgataaaaacataggaaatactggtgatgtgaatctatatgcccaaatgattgatgaagctgagggattggagaaaattgagaacctccagagtcatgacaacacagagatttacgaaaaggcggtcaagattcttgagacatactggttggaggaggaagatgagactatgcctccaggggatgcttctcagtcagggttcaactttggtagcagtgacgctcctgctgtgccgtccggtggattcaactttaattagaagatattcatgctctactggggagttttggttggtctatctgtgaagtcctcctttatgacacgacagcagttgggggacaagtcaacgtcttgtcattgtcctaatgtccttgggttgtacgaggtccagcaagtaaatacatggttgctggactgccttgggtttttgcaatgcctgatatttcatatctcatggtgtaaaatgctttgtggctatatttttttgccaccgtagagaatactagagtcttctttctgccaagtgatcatttcatagaattaatgaatgctcagtctcgtgattttttttttcctttgttatatatgtcctagattggagc

SEQ ID NO: 9026 - protein, 586 aa, Glycine max
  peptide (1)..(586): Ceres Seq. ID no. 15171763
  misc_feature (58)..(151): Pfam Name: Pfam Description:  Importin beta binding domain
  misc_feature (55)..(585): NCBI GI NO: 13752562 NR Description: importin alpha 2 [Capsicum annuum]
  misc_feature (55)..(585): NCBI GI NO: 13605661 NR Description: AT3g06720/F3E22_14 [Arabidopsis thaliana]
  misc_feature (55)..(585): NCBI GI NO: 25314870 NR Description: probable nuclear transport factor importin alpha
  misc_feature (55)..(586): NCBI GI NO: 15230778 NR Description: importin alpha subunit [Arabidopsis thaliana]
  misc_feature (55)..(586): NCBI GI NO: 25314876 NR Description: probable nuclear transport factor importin alpha-like protein
  misc_feature (55)..(586): NCBI GI NO: 15809794 NR Description: AT3g06720/F3E22_14 [Arabidopsis thaliana]
  misc_feature (55)..(586): NCBI GI NO: 13699777 NR Description: AtKAP alpha [Arabidopsis thaliana]
  misc_feature (55)..(585): NCBI GI NO: 34897636 NR Description: putative impotin alpha 1b [Oryza sativa]
  misc_feature (55)..(585): NCBI GI NO: 6682927 NR Description: importin alpha 1b
  misc_feature (53)..(576): NCBI GI NO: 26338017 NR Description: unnamed protein product [Mus musculus]
FKNSQKKPKISSALSLFHIHIYPQTLPLGSPIQHPVDRCAASLFVRFPSIASETMSYRPSGNSRTEVRRNRYKVAVDADEGRRRREDTMVEIRKNRREESLQKKRREGFQPQQIPASVHSSLVEKKLEHLPSMVTGVWTDDNNLQLEATTQFRKLLSIERSPPIEEVIQTGVVSRFVEFLMREDFPQLQFEAAWALTNIASGTSENTKVVIDHGAVPIFVKLLASPSDDVREQAVWALGNVAGDSPRCRDLVLSHGALLPLLAQLNEHAKLSMLRNATWTLSNFCRGKPQPPFDQVKPALPALARLIHSNDEEVLTDACWALSYLSDGTNDKIQAVIEAGVCPRLVELLLHPSPSVLIPALRTVGNIVTGDDMQTQVIINHQALPCLLNLLTNNYKKSIKKEACWTISNITAGNKQQIQAVIEANLIAPLVNLLQNAEFDIKKEAAWAISNATSGGSHEQIKFLVSQGCIKPLCDLLICPDPRIVTVCLEGLENILKVGEADKNIGNTGDVNLYAQMIDEAEGLEKIENLQSHDNTEIYEKAVKILETYWLEEEDETMPPGDASQSGFNFGSSDAPAVPSGGFNFN

SEQ ID NO: 9027 - protein, 532 aa, Glycine max
  peptide (1)..(532): Ceres Seq. ID no. 15171764
  misc_feature (4)..(97): Pfam Name: Pfam Description:  Importin beta binding domain
  misc_feature (1)..(531): NCBI GI NO: 13752562 NR Description: importin alpha 2 [Capsicum annuum]
  misc_feature (1)..(531): NCBI GI NO: 13605661 NR Description: AT3g06720/F3E22_14 [Arabidopsis thaliana]
  misc_feature (1)..(531): NCBI GI NO: 25314870 NR Description: probable nuclear transport factor importin alpha
  misc_feature (1)..(532): NCBI GI NO: 15230778 NR Description: importin alpha subunit [Arabidopsis thaliana]
  misc_feature (1)..(532): NCBI GI NO: 25314876 NR Description: probable nuclear transport factor importin alpha-like protein
  misc_feature (1)..(532): NCBI GI NO: 15809794 NR Description: AT3g06720/F3E22_14 [Arabidopsis thaliana]
  misc_feature (1)..(532): NCBI GI NO: 13699777 NR Description: AtKAP alpha [Arabidopsis thaliana]
  misc_feature (1)..(531): NCBI GI NO: 34897636 NR Description: putative impotin alpha 1b [Oryza sativa]
  misc_feature (1)..(531): NCBI GI NO: 6682927 NR Description: importin alpha 1b
  misc_feature (1)..(522): NCBI GI NO: 26338017 NR Description: unnamed protein product [Mus musculus]
MSYRPSGNSRTEVRRNRYKVAVDADEGRRRREDTMVEIRKNRREESLQKKRREGFQPQQIPASVHSSLVEKKLEHLPSMVTGVWTDDNNLQLEATTQFRKLLSIERSPPIEEVIQTGVVSRFVEFLMREDFPQLQFEAAWALTNIASGTSENTKVVIDHGAVPIFVKLLASPSDDVREQAVWALGNVAGDSPRCRDLVLSHGALLPLLAQLNEHAKLSMLRNATWTLSNFCRGKPQPPFDQVKPALPALARLIHSNDEEVLTDACWALSYLSDGTNDKIQAVIEAGVCPRLVELLLHPSPSVLIPALRTVGNIVTGDDMQTQVIINHQALPCLLNLLTNNYKKSIKKEACWTISNITAGNKQQIQAVIEANLIAPLVNLLQNAEFDIKKEAAWAISNATSGGSHEQIKFLVSQGCIKPLCDLLICPDPRIVTVCLEGLENILKVGEADKNIGNTGDVNLYAQMIDEAEGLEKIENLQSHDNTEIYEKAVKILETYWLEEEDETMPPGDASQSGFNFGSSDAPAVPSGGFNFN

SEQ ID NO: 9028 - protein, 498 aa, Glycine max
  peptide (1)..(498): Ceres Seq. ID no. 15171765
  misc_feature (1)..(63): Pfam Name: Pfam Description:  Importin beta binding domain
  misc_feature (1)..(497): NCBI GI NO: 13752562 NR Description: importin alpha 2 [Capsicum annuum]
  misc_feature (1)..(497): NCBI GI NO: 13605661 NR Description: AT3g06720/F3E22_14 [Arabidopsis thaliana]
  misc_feature (1)..(497): NCBI GI NO: 25314870 NR Description: probable nuclear transport factor importin alpha
  misc_feature (1)..(498): NCBI GI NO: 15230778 NR Description: importin alpha subunit [Arabidopsis thaliana]
  misc_feature (1)..(498): NCBI GI NO: 25314876 NR Description: probable nuclear transport factor importin alpha-like protein
  misc_feature (1)..(498): NCBI GI NO: 15809794 NR Description: AT3g06720/F3E22_14 [Arabidopsis thaliana]
  misc_feature (1)..(498): NCBI GI NO: 13699777 NR Description: AtKAP alpha [Arabidopsis thaliana]
  misc_feature (1)..(497): NCBI GI NO: 34897636 NR Description: putative impotin alpha 1b [Oryza sativa]
  misc_feature (1)..(497): NCBI GI NO: 6682927 NR Description: importin alpha 1b
  misc_feature (1)..(488): NCBI GI NO: 26338017 NR Description: unnamed protein product [Mus musculus]
MVEIRKNRREESLQKKRREGFQPQQIPASVHSSLVEKKLEHLPSMVTGVWTDDNNLQLEATTQFRKLLSIERSPPIEEVIQTGVVSRFVEFLMREDFPQLQFEAAWALTNIASGTSENTKVVIDHGAVPIFVKLLASPSDDVREQAVWALGNVAGDSPRCRDLVLSHGALLPLLAQLNEHAKLSMLRNATWTLSNFCRGKPQPPFDQVKPALPALARLIHSNDEEVLTDACWALSYLSDGTNDKIQAVIEAGVCPRLVELLLHPSPSVLIPALRTVGNIVTGDDMQTQVIINHQALPCLLNLLTNNYKKSIKKEACWTISNITAGNKQQIQAVIEANLIAPLVNLLQNAEFDIKKEAAWAISNATSGGSHEQIKFLVSQGCIKPLCDLLICPDPRIVTVCLEGLENILKVGEADKNIGNTGDVNLYAQMIDEAEGLEKIENLQSHDNTEIYEKAVKILETYWLEEEDETMPPGDASQSGFNFGSSDAPAVPSGGFNFN

SEQ ID NO: 9029 - DNA, 1259 bp, Glycine max
  misc_feature (1)..(1259): Ceres Seq. ID no. 14316390
aaagaggtgtccgaatcgaacaggagcaagcaaagtcaaagaaaaagagagaggagagagagaaacaacaatcatcatcggccagaagcgaacacgacagacacatctgagaaaccaaacctgatagagatgtcgagtggaggaaaccttagttgcgtgttggtagctgtggatggcagcgaggaaagcatgaacgcgctgcgttgggcactgaacaacctcaagctccgatcccctgcacccgattccaccgatgctccttccttcaccgtcttccacgtccaatccccgccctccatcgccactggcctcaatcccggtgccatccccttcggtggccccagtgatctcgaagttcctgctttcactgcagccattgaagcgcaccaaaagcgcatcaccaacgccgtactcgatcacgccctcggaatttgctccgaattcaacctcaccagtaaggtcagaacccatgttcttgtaggagatccaaaggagaagatttgtgaagcagttcaggatttgaatgctgatgtgcttgtgatggggtctcgtgcttttggccccattaagaggatgttcctgggaagtgtaagcaactactgcgcccaccattctccatgccctgtcattattatcaaggaaaaggacattgtcaataagagaaactgatgcacttctactatgctaccatgattcttgtctcttgatcagtaggttctttaggtgggttgtcagtgccatatttcagttgctgacgctgcatccttgcttgccaaattaattatgtcgaaggctttttcgtcttgcaatttgcttgctttgttagaccagtgttgtacctcagctttgaagcttgtgtcttttgttgagccaatgctagccagaccctgcttcaagtacgtgttttcactttctgtggacaattctgctgtgtgtgtgaaattcttggagttaaagagtgctttataactgtgctgtcacaacgtcaattgttgtcccaaatggttcaaagagatatttgcctccaggtttgtattcgttctgaatttatacaatgttgtacagaaatgttgcattactattgctccttggtcagagccagttctagttgtgattgtgatatgcaacaaactggccatttgacatttgtcatgtacaaattttcaaattgagaatccagctagtgttggctgcagtgtgtcttactgttgcattattgacagtgtcctgcttaaataaatatttatatgatttatgac

SEQ ID NO: 9030 - protein, 222 aa, Glycine max
  peptide (1)..(222): Ceres Seq. ID no. 14316391
  misc_feature (50)..(213): Pfam Name: Pfam Description:  Universal stress protein family
  misc_feature (50)..(213): NCBI GI NO: 5669654 NR Description: ER6 protein [Lycopersicon esculentum]
  misc_feature (44)..(216): NCBI GI NO: 25402571 NR Description: hypothetical protein
  misc_feature (44)..(216): NCBI GI NO: 30681321 NR Description: ER6 protein -related [Arabidopsis thaliana]
  misc_feature (47)..(216): NCBI GI NO: 34914610 NR Description: P0520B06.18
  misc_feature (27)..(213): NCBI GI NO: 18399413 NR Description: ethylene-responsive protein -related
  misc_feature (27)..(213): NCBI GI NO: 30681955 NR Description: ethylene-responsive protein -related
  misc_feature (45)..(213): NCBI GI NO: 40539010 NR Description: putative stress-related protein
  misc_feature (27)..(213): NCBI GI NO: 21594903 NR Description: ethylene-responsive protein, putative
  misc_feature (27)..(200): NCBI GI NO: 30681959 NR Description: ethylene-responsive protein -related
  misc_feature (191)..(213): NCBI GI NO: 30681959 NR Description: ethylene-responsive protein -related
KEVSESNRSKQSQRKRERRERNNNHHRPEANTTDTSEKPNLIEMSSGGNLSCVLVAVDGSEESMNALRWALNNLKLRSPAPDSTDAPSFTVFHVQSPPSIATGLNPGAIPFGGPSDLEVPAFTAAIEAHQKRITNAVLDHALGICSEFNLTSKVRTHVLVGDPKEKICEAVQDLNADVLVMGSRAFGPIKRMFLGSVSNYCAHHSPCPVIIIKEKDIVNKRN

SEQ ID NO: 9031 - protein, 179 aa, Glycine max
  peptide (1)..(179): Ceres Seq. ID no. 14316392
  misc_feature (7)..(170): Pfam Name: Pfam Description:  Universal stress protein family
  misc_feature (7)..(170): NCBI GI NO: 5669654 NR Description: ER6 protein [Lycopersicon esculentum]
  misc_feature (1)..(173): NCBI GI NO: 25402571 NR Description: hypothetical protein
  misc_feature (1)..(173): NCBI GI NO: 30681321 NR Description: ER6 protein -related [Arabidopsis thaliana]
  misc_feature (4)..(173): NCBI GI NO: 34914610 NR Description: P0520B06.18
  misc_feature (1)..(170): NCBI GI NO: 18399413 NR Description: ethylene-responsive protein -related
  misc_feature (1)..(170): NCBI GI NO: 30681955 NR Description: ethylene-responsive protein -related
  misc_feature (2)..(170): NCBI GI NO: 40539010 NR Description: putative stress-related protein
  misc_feature (1)..(170): NCBI GI NO: 21594903 NR Description: ethylene-responsive protein, putative
  misc_feature (1)..(157): NCBI GI NO: 30681959 NR Description: ethylene-responsive protein -related
  misc_feature (148)..(170): NCBI GI NO: 30681959 NR Description: ethylene-responsive protein -related
MSSGGNLSCVLVAVDGSEESMNALRWALNNLKLRSPAPDSTDAPSFTVFHVQSPPSIATGLNPGAIPFGGPSDLEVPAFTAAIEAHQKRITNAVLDHALGICSEFNLTSKVRTHVLVGDPKEKICEAVQDLNADVLVMGSRAFGPIKRMFLGSVSNYCAHHSPCPVIIIKEKDIVNKRN

SEQ ID NO: 9032 - protein, 159 aa, Glycine max
  peptide (1)..(159): Ceres Seq. ID no. 14316393
  misc_feature (1)..(150): Pfam Name: Pfam Description:  Universal stress protein family
  misc_feature (1)..(150): NCBI GI NO: 5669654 NR Description: ER6 protein [Lycopersicon esculentum]
  misc_feature (1)..(153): NCBI GI NO: 25402571 NR Description: hypothetical protein
  misc_feature (1)..(153): NCBI GI NO: 30681321 NR Description: ER6 protein -related [Arabidopsis thaliana]
  misc_feature (1)..(153): NCBI GI NO: 34914610 NR Description: P0520B06.18
  misc_feature (1)..(150): NCBI GI NO: 18399413 NR Description: ethylene-responsive protein -related
  misc_feature (1)..(150): NCBI GI NO: 30681955 NR Description: ethylene-responsive protein -related
  misc_feature (1)..(150): NCBI GI NO: 40539010 NR Description: putative stress-related protein
  misc_feature (1)..(150): NCBI GI NO: 21594903 NR Description: ethylene-responsive protein, putative
  misc_feature (1)..(137): NCBI GI NO: 30681959 NR Description: ethylene-responsive protein -related
  misc_feature (128)..(150): NCBI GI NO: 30681959 NR Description: ethylene-responsive protein -related
MNALRWALNNLKLRSPAPDSTDAPSFTVFHVQSPPSIATGLNPGAIPFGGPSDLEVPAFTAAIEAHQKRITNAVLDHALGICSEFNLTSKVRTHVLVGDPKEKICEAVQDLNADVLVMGSRAFGPIKRMFLGSVSNYCAHHSPCPVIIIKEKDIVNKRN

SEQ ID NO: 9033 - DNA, 1553 bp, Glycine max
  misc_feature (1)..(1553): Ceres Seq. ID no. 13639663
gaatcagaatcacctggcttggcctagcgcttattctctcgcattccgtggagatctagtgcttctgctgcaagacctcgctgaaaattagggtttcgattcggaggtagacgaagatgttcggaagggctccgaagaaaagcgacagcaccaggtactacgaaatcctcggcgtttccaagaacgcttcgccggatgacttaaagaaggcttacaagaaagccgccattaagaaccatcctgacaaaggcggggatcccgagaagtttaaagagcttgctcaagcctatgaggttctgagtgaccctgagaagcgcgagatttatgatacatatggagaagatgctcttaaggaaggaatgggtggtggtggcggtggccatgatccatttgatatcttcagttcattctttggtggaagtccgtttgggtcaggtggtagcagtagaggacggaggcagaggcggggagaagatgtggttcatcccctgaaggtctctctggaggatctttacctcggaacttcaaagaaactctctctttcacgaaacgtgttgtgctcaaaatgcaatgggaagggctcaaagtctggggcttcaatgacctgtgctggttgccagggtactggcatgaaggtgtctattaggcaccttggtccttctatgattcagcaaatgcagcatccttgcaatgagtgtaagggtactggagagacaatcaatgacagagacaggtgccaacagtgcaagggagagaaggttgttcaggagaagaaagtacttgaagttgttgtggagaagggaatgcagaatggacagaagattacattccctggtgaagctgatgaagcgcctgatacagtcacaggggatattgtctttgtcctacaacagaaggaacacccaaagttcaaacgaaaggcagatgacctttttgtagaacacacattgtctcttactgaggctctatgtggcttccagtttgtgctgactcacctggatagcaggcagcttctgatcaaatcaaaccctggggaggttgttaagcctgagtcattcaaggcaataaatgatgagggaatgccaaactaccagaggcacttcctgaagggaaagctttacattcatttctcagtggaatttcctgataccctgagtcttgatcaggtgaaggctttggaggctgttctgccatcaaagccaacatcacagttgtcagacatggagctggatgagtgtgaggagaccacactccatgatgtgaacatggaggaagagacaaggaggaggcaacaagctcagcaggaggcatatgatgaggatgaggatatgcatggtggtgctcagagagtgcagtgcgctcagcagtaatgagccacaggagcgctagagtagacatgtgatgatctcgatcatcttattttttagccgtttgtgcgggtctaaacatatttagtgtttgatatctcagacgattttagcaaccaaacactgtagcattattgtccaagaaattatttcacaagacatcctaatacaattttttttccttct

SEQ ID NO: 9034 - protein, 417 aa, Glycine max
  peptide (1)..(417): Ceres Seq. ID no. 13639664
  misc_feature (234)..(358): Pfam Name: Pfam Description:  DnaJ C terminal region
  misc_feature (1)..(417): NCBI GI NO: 5802244 NR Description: seed maturation protein PM37 [Glycine max]
  misc_feature (1)..(417): NCBI GI NO: 10945669 NR Description: J1P [Daucus carota]
  misc_feature (1)..(417): NCBI GI NO: 7441930 NR Description: dnaJ protein homolog - potato
  misc_feature (1)..(417): NCBI GI NO: 461944 NR Description: DnaJ protein homolog (DNAJ-1)
  misc_feature (1)..(417): NCBI GI NO: 4008159 NR Description: DnaJ homolog [Salix gilgiana]
  misc_feature (1)..(417): NCBI GI NO: 1169384 NR Description: DNAJ PROTEIN HOMOLOG ANJ1
  misc_feature (1)..(417): NCBI GI NO: 4210948 NR Description: DnaJ protein [Hevea brasiliensis]
  misc_feature (1)..(417): NCBI GI NO: 421809 NR Description: dnaJ protein homolog DnaJ-1 - cucumber
  misc_feature (1)..(417): NCBI GI NO: 1169382 NR Description: DnaJ protein homolog 2
  misc_feature (1)..(417): NCBI GI NO: 6782421 NR Description: DnaJ-like protein [Lycopersicon esculentum]
MFGRAPKKSDSTRYYEILGVSKNASPDDLKKAYKKAAIKNHPDKGGDPEKFKELAQAYEVLSDPEKREIYDTYGEDALKEGMGGGGGGHDPFDIFSSFFGGSPFGSGGSSRGRRQRRGEDVVHPLKVSLEDLYLGTSKKLSLSRNVLCSKCNGKGSKSGASMTCAGCQGTGMKVSIRHLGPSMIQQMQHPCNECKGTGETINDRDRCQQCKGEKVVQEKKVLEVVVEKGMQNGQKITFPGEADEAPDTVTGDIVFVLQQKEHPKFKRKADDLFVEHTLSLTEALCGFQFVLTHLDSRQLLIKSNPGEVVKPESFKAINDEGMPNYQRHFLKGKLYIHFSVEFPDTLSLDQVKALEAVLPSKPTSQLSDMELDECEETTLHDVNMEEETRRRQQAQQEAYDEDEDMHGGAQRVQCAQQ

SEQ ID NO: 9035 - protein, 336 aa, Glycine max
  peptide (1)..(336): Ceres Seq. ID no. 13639665
  misc_feature (153)..(277): Pfam Name: Pfam Description:  DnaJ C terminal region
  misc_feature (1)..(336): NCBI GI NO: 5802244 NR Description: seed maturation protein PM37 [Glycine max]
  misc_feature (1)..(336): NCBI GI NO: 10945669 NR Description: J1P [Daucus carota]
  misc_feature (1)..(336): NCBI GI NO: 7441930 NR Description: dnaJ protein homolog - potato
  misc_feature (1)..(336): NCBI GI NO: 461944 NR Description: DnaJ protein homolog (DNAJ-1)
  misc_feature (1)..(336): NCBI GI NO: 4008159 NR Description: DnaJ homolog [Salix gilgiana]
  misc_feature (1)..(336): NCBI GI NO: 1169384 NR Description: DNAJ PROTEIN HOMOLOG ANJ1
  misc_feature (1)..(336): NCBI GI NO: 4210948 NR Description: DnaJ protein [Hevea brasiliensis]
  misc_feature (1)..(336): NCBI GI NO: 421809 NR Description: dnaJ protein homolog DnaJ-1 - cucumber
  misc_feature (1)..(336): NCBI GI NO: 1169382 NR Description: DnaJ protein homolog 2
  misc_feature (1)..(336): NCBI GI NO: 6782421 NR Description: DnaJ-like protein [Lycopersicon esculentum]
MGGGGGGHDPFDIFSSFFGGSPFGSGGSSRGRRQRRGEDVVHPLKVSLEDLYLGTSKKLSLSRNVLCSKCNGKGSKSGASMTCAGCQGTGMKVSIRHLGPSMIQQMQHPCNECKGTGETINDRDRCQQCKGEKVVQEKKVLEVVVEKGMQNGQKITFPGEADEAPDTVTGDIVFVLQQKEHPKFKRKADDLFVEHTLSLTEALCGFQFVLTHLDSRQLLIKSNPGEVVKPESFKAINDEGMPNYQRHFLKGKLYIHFSVEFPDTLSLDQVKALEAVLPSKPTSQLSDMELDECEETTLHDVNMEEETRRRQQAQQEAYDEDEDMHGGAQRVQCAQQ

SEQ ID NO: 9036 - protein, 256 aa, Glycine max
  peptide (1)..(256): Ceres Seq. ID no. 13639666
  misc_feature (73)..(197): Pfam Name: Pfam Description:  DnaJ C terminal region
  misc_feature (1)..(256): NCBI GI NO: 5802244 NR Description: seed maturation protein PM37 [Glycine max]
  misc_feature (1)..(256): NCBI GI NO: 10945669 NR Description: J1P [Daucus carota]
  misc_feature (1)..(256): NCBI GI NO: 7441930 NR Description: dnaJ protein homolog - potato
  misc_feature (1)..(256): NCBI GI NO: 461944 NR Description: DnaJ protein homolog (DNAJ-1)
  misc_feature (1)..(256): NCBI GI NO: 4008159 NR Description: DnaJ homolog [Salix gilgiana]
  misc_feature (1)..(256): NCBI GI NO: 1169384 NR Description: DNAJ PROTEIN HOMOLOG ANJ1
  misc_feature (1)..(256): NCBI GI NO: 4210948 NR Description: DnaJ protein [Hevea brasiliensis]
  misc_feature (1)..(256): NCBI GI NO: 421809 NR Description: dnaJ protein homolog DnaJ-1 - cucumber
  misc_feature (1)..(256): NCBI GI NO: 1169382 NR Description: DnaJ protein homolog 2
  misc_feature (1)..(256): NCBI GI NO: 6782421 NR Description: DnaJ-like protein [Lycopersicon esculentum]
MTCAGCQGTGMKVSIRHLGPSMIQQMQHPCNECKGTGETINDRDRCQQCKGEKVVQEKKVLEVVVEKGMQNGQKITFPGEADEAPDTVTGDIVFVLQQKEHPKFKRKADDLFVEHTLSLTEALCGFQFVLTHLDSRQLLIKSNPGEVVKPESFKAINDEGMPNYQRHFLKGKLYIHFSVEFPDTLSLDQVKALEAVLPSKPTSQLSDMELDECEETTLHDVNMEEETRRRQQAQQEAYDEDEDMHGGAQRVQCAQQ

SEQ ID NO: 9037 - DNA, 1277 bp, Glycine max
  misc_feature (1)..(1277): Ceres Seq. ID no. 14316261
agcctcatcactcactctaatctaacgatgaatctgaataccaagctttctcactcataagttcccactccctctcttatcatttatcaaacaaatttttcatctttccccacttgttggattaatggctgcctcagctttgtcactaacatccccattccatttcagaaaaccccacaacagggtttcacctctcaatgctcatcctctcattctcatccaaaagggtaaacaatctcttaaatcaaacttctcattctcaaccctgaatgcttccccccacttcagaccccctattgccattgctccttccacactgaccctaacaagagcttcttcctctgatgaatgctttgaccctgctggtgaagcccaaaggttgctgctttctgaggaaaaaccagttaattttgctttctgggtcatattttgggcctctttgtccctggcttggtttgctgtttcaagggatgctaatgctgctgttgaatcctccatcaaagcctctggctttggcttcaacattgccaattcgttgaggaaattgggttggcctgattgggttgtggtgttcacccttgccactcttcctgtgcttgagcttcgtggggctatacctgttggttactggatgcaacttaaccctgtaactttaacagtgttatctattctggggaacatggtccctgtgccattcatcgtgctctaccttaaaaaaattgcgtctttcgttgctgcgaggagcccttctgcgtctcgattccttgacatgctgttcgagaatgccaaagagaaggctggtccagtggaggagtttcagtggcttggtctgatgctctttgtggctgttccttttcctggaacaggagcatggaccggagcctttatagcatccattcttgatatgccattttgggctgctgtgtctgctaatttctttggtgttgtatttgctgggttgctagtaaatttgttagtgaaccttggtctgaagtatgccatcattactggtgtcatccttttctttgtttccacattcatgtggagtgtccttagaaatcttaaaaaaggtttgagctcgtcaaattgacgtgaaatgtctgattttcctttaccaacatgatgacaattgttagttttgttgttcattctcttggttttcattttcttatattttcataattgagcatcctagttcagtgatatgtaaaaatgaaaaggcttatgtcttgtatataccctttttctgatgttttaaaaatcatgggctgactgac

SEQ ID NO: 9038 - protein, 321 aa, Glycine max
  peptide (1)..(321): Ceres Seq. ID no. 14316262
  misc_feature (93)..(320): NCBI GI NO: 15227004 NR Description: transport protein -related [Arabidopsis thaliana]
  misc_feature (117)..(319): NCBI GI NO: 34897152 NR Description: unknown protein
  misc_feature (155)..(289): NCBI GI NO: 11499286 NR Description: small multidrug export protein (qacE)
  misc_feature (144)..(296): NCBI GI NO: 21227925 NR Description: putative small multi-drug export protein
  misc_feature (149)..(285): NCBI GI NO: 28212098 NR Description: putative small multi-drug export protein
  misc_feature (145)..(288): NCBI GI NO: 22537969 NR Description: conserved hypothetical protein
  misc_feature (144)..(296): NCBI GI NO: 23052254 NR Description: hypothetical protein [Methanosarcina barkeri]
  misc_feature (155)..(283): NCBI GI NO: 15613797 NR Description: small multidrug export related protein
  misc_feature (149)..(289): NCBI GI NO: 18978147 NR Description: putative small multidrug export protein
  misc_feature (146)..(273): NCBI GI NO: 14591427 NR Description: hypothetical protein PH1658
MAASALSLTSPFHFRKPHNRVSPLNAHPLILIQKGKQSLKSNFSFSTLNASPHFRPPIAIAPSTLTLTRASSSDECFDPAGEAQRLLLSEEKPVNFAFWVIFWASLSLAWFAVSRDANAAVESSIKASGFGFNIANSLRKLGWPDWVVVFTLATLPVLELRGAIPVGYWMQLNPVTLTVLSILGNMVPVPFIVLYLKKIASFVAARSPSASRFLDMLFENAKEKAGPVEEFQWLGLMLFVAVPFPGTGAWTGAFIASILDMPFWAAVSANFFGVVFAGLLVNLLVNLGLKYAIITGVILFFVSTFMWSVLRNLKKGLSSSN

SEQ ID NO: 9039 - DNA, 2318 bp, Glycine max
  misc_feature (1)..(2318): Ceres Seq. ID no. 14316344
ctcttctctctttctgtgtctcaaacccaaagaacacggagttggcggcgaccctttctctctctgatttcgatcatggcagctgttgctccttcttctgacaaaactgcagatttattgcagaatttgaccctggactctgagtccaaacccattggagttgctgagcctgcgaagaagaatggacccactttttccagtggtgcagctaaagggagggccaagccattcaatccaaattcatgctttgttccaaatggatacccttctgcgtattattatggaggttatgatgggcaaggtgattggaatgcttattccagatatatgaaccttgatggagggatggctcaaggtgtttatggggataactgctcttatatgtaccatcaaggttatggttatgcaccatatggaacatatgcatctcccaattcctcttctccaatgattcaacaggatggtcagcagtacgggctgcaacagtaccagtatccatgttcttattacaaatctccagcttctgctgatgtgtcatttactaccaacaaaatcagtcttccacaaggagaaatatcaactactgttgatgttgctgattgtgtttcttcaacaaatgctatgaataaaggaaacaatgttaacgtgggcaatagtaatttcactgataaaaatgggttaaatccatttttaactagttcacagcacacatctttgaatacaaatgattcttatcaaggggctagcttgccagcttatgctcctttgtcaggatatcagggtccaagaagcacccatggtacacaactgccagtcccttcggatgcgtccttagtatctgacggacaggccaaacatggagccaaggttggattatcttcatcagtagtgcctgtcaaagatttttcatctcaaagaaatcaaagacttcctcagccacttccccaatactcaaacatgagtggttccagacatccttctggacttgacctggtttctggattcatgaacgggatgtatccgagcaacaggatgtacagccaatatggaaacacattcaggcctaattctcatttcggatctgctgcgtatggatctagaatgggctctttcgatagcaaacataatggtgcagggtatggctgcggtcttaaccattttaaaaaaagtatggatggtttcagcgagctaaataagggacccagagctgccaagagttctgataataaaaacatcaaaagtcttggacctgtcacattattacacaagggacagaacctttcagtgaagagtgacaacaaagaagttcctttggttcccgacaaggaacagtacaatgggaaagatttggctgagaattattctgatgccaagttttttgtcatcaaatcctatagtgaggatgatattcataaaagcataaaatacagcgcttgggcaagcacccctaacggcaacaaaaagctggattcggcatatcaggaagccaaggagaagcccggtggctgtcccatatttttgttattttcggtcaacactagtgggcaatttgttggtttagccgagatgttgggtcctgttgattttggtaaaaccgtagattattggcagcaggacaggtggactggttgcttttctgtgaagtggcatgtcatcaaggatatcccaaatagcgtgttgaggcacataacgcttgaaaacaatgaaaacaaacctgtaacaaatagtagggatactcaggaggttaagtttgagaagggtgttcaacttgtcaaaatattcaaggagcattcaagccaaacatgcatcttggatgattttgggttctacgaggatcgtgaaaaggtgactcaggagaaaaagtctaaggaacagcagttaccaaaacagatcagcaagcccagtgatttcacatttgggacggttacatttccgaagtctcttgatgcaaccttgatcaatgaatctgctacagcaaatgcagcagagggaagaatgaatgcagaagggctgttagaagggaatggatcgactacagcacttgaagatgcttctaagagctgttaaagcaatgatagtcattggctgatttttgttttggtttgtttattccctattgctttagtcatctagtgagtggtggtgtttttcagtttcaaattatctgttatgtgatcttggtcttggtttggagtggagcatctaattttagcatttttctttggtctcgttcaataaaatgtgattgtttttagtagttataagtttcatggtaggtcaaaggaagttttaatcaaaatatattgtgttattgtagt

SEQ ID NO: 9040 - protein, 688 aa, Glycine max
  peptide (1)..(688): Ceres Seq. ID no. 14316345
  misc_feature (507)..(597): Pfam Name: Pfam Description:  YT521-B-like family
  misc_feature (26)..(677): NCBI GI NO: 25084169 NR Description: Unknown protein [Arabidopsis thaliana]
  misc_feature (26)..(677): NCBI GI NO: 30682679 NR Description: expressed protein [Arabidopsis thaliana]
  misc_feature (26)..(677): NCBI GI NO: 30682683 NR Description: expressed protein [Arabidopsis thaliana]
  misc_feature (27)..(686): NCBI GI NO: 22773231 NR Description: Putative RNA-binding protein
  misc_feature (35)..(630): NCBI GI NO: 18087662 NR Description: putative RNA-binding protein [Oryza sativa]
  misc_feature (85)..(630): NCBI GI NO: 25372787 NR Description: Rubisco subunit binding-protein beta subunit
  misc_feature (128)..(642): NCBI GI NO: 18405397 NR Description: expressed protein [Arabidopsis thaliana]
  misc_feature (311)..(628): NCBI GI NO: 30682438 NR Description: expressed protein [Arabidopsis thaliana]
  misc_feature (7)..(198): NCBI GI NO: 30682438 NR Description: expressed protein [Arabidopsis thaliana]
  misc_feature (316)..(669): NCBI GI NO: 15912287 NR Description: AT5g61020/maf19_20 [Arabidopsis thaliana]
LFSLSVSQTQRTRSWRRPFLSLISIMAAVAPSSDKTADLLQNLTLDSESKPIGVAEPAKKNGPTFSSGAAKGRAKPFNPNSCFVPNGYPSAYYYGGYDGQGDWNAYSRYMNLDGGMAQGVYGDNCSYMYHQGYGYAPYGTYASPNSSSPMIQQDGQQYGLQQYQYPCSYYKSPASADVSFTTNKISLPQGEISTTVDVADCVSSTNAMNKGNNVNVGNSNFTDKNGLNPFLTSSQHTSLNTNDSYQGASLPAYAPLSGYQGPRSTHGTQLPVPSDASLVSDGQAKHGAKVGLSSSVVPVKDFSSQRNQRLPQPLPQYSNMSGSRHPSGLDLVSGFMNGMYPSNRMYSQYGNTFRPNSHFGSAAYGSRMGSFDSKHNGAGYGCGLNHFKKSMDGFSELNKGPRAAKSSDNKNIKSLGPVTLLHKGQNLSVKSDNKEVPLVPDKEQYNGKDLAENYSDAKFFVIKSYSEDDIHKSIKYSAWASTPNGNKKLDSAYQEAKEKPGGCPIFLLFSVNTSGQFVGLAEMLGPVDFGKTVDYWQQDRWTGCFSVKWHVIKDIPNSVLRHITLENNENKPVTNSRDTQEVKFEKGVQLVKIFKEHSSQTCILDDFGFYEDREKVTQEKKSKEQQLPKQISKPSDFTFGTVTFPKSLDATLINESATANAAEGRMNAEGLLEGNGSTTALEDASKSC

SEQ ID NO: 9041 - protein, 663 aa, Glycine max
  peptide (1)..(663): Ceres Seq. ID no. 14316346
  misc_feature (482)..(572): Pfam Name: Pfam Description:  YT521-B-like family
  misc_feature (1)..(652): NCBI GI NO: 25084169 NR Description: Unknown protein [Arabidopsis thaliana]
  misc_feature (1)..(652): NCBI GI NO: 30682679 NR Description: expressed protein [Arabidopsis thaliana]
  misc_feature (1)..(652): NCBI GI NO: 30682683 NR Description: expressed protein [Arabidopsis thaliana]
  misc_feature (2)..(661): NCBI GI NO: 22773231 NR Description: Putative RNA-binding protein
  misc_feature (10)..(605): NCBI GI NO: 18087662 NR Description: putative RNA-binding protein [Oryza sativa]
  misc_feature (60)..(605): NCBI GI NO: 25372787 NR Description: Rubisco subunit binding-protein beta subunit
  misc_feature (103)..(617): NCBI GI NO: 18405397 NR Description: expressed protein [Arabidopsis thaliana]
  misc_feature (286)..(603): NCBI GI NO: 30682438 NR Description: expressed protein [Arabidopsis thaliana]
  misc_feature (1)..(173): NCBI GI NO: 30682438 NR Description: expressed protein [Arabidopsis thaliana]
  misc_feature (291)..(644): NCBI GI NO: 15912287 NR Description: AT5g61020/maf19_20 [Arabidopsis thaliana]
MAAVAPSSDKTADLLQNLTLDSESKPIGVAEPAKKNGPTFSSGAAKGRAKPFNPNSCFVPNGYPSAYYYGGYDGQGDWNAYSRYMNLDGGMAQGVYGDNCSYMYHQGYGYAPYGTYASPNSSSPMIQQDGQQYGLQQYQYPCSYYKSPASADVSFTTNKISLPQGEISTTVDVADCVSSTNAMNKGNNVNVGNSNFTDKNGLNPFLTSSQHTSLNTNDSYQGASLPAYAPLSGYQGPRSTHGTQLPVPSDASLVSDGQAKHGAKVGLSSSVVPVKDFSSQRNQRLPQPLPQYSNMSGSRHPSGLDLVSGFMNGMYPSNRMYSQYGNTFRPNSHFGSAAYGSRMGSFDSKHNGAGYGCGLNHFKKSMDGFSELNKGPRAAKSSDNKNIKSLGPVTLLHKGQNLSVKSDNKEVPLVPDKEQYNGKDLAENYSDAKFFVIKSYSEDDIHKSIKYSAWASTPNGNKKLDSAYQEAKEKPGGCPIFLLFSVNTSGQFVGLAEMLGPVDFGKTVDYWQQDRWTGCFSVKWHVIKDIPNSVLRHITLENNENKPVTNSRDTQEVKFEKGVQLVKIFKEHSSQTCILDDFGFYEDREKVTQEKKSKEQQLPKQISKPSDFTFGTVTFPKSLDATLINESATANAAEGRMNAEGLLEGNGSTTALEDASKSC

SEQ ID NO: 9042 - protein, 579 aa, Glycine max
  peptide (1)..(579): Ceres Seq. ID no. 14316347
  misc_feature (398)..(488): Pfam Name: Pfam Description:  YT521-B-like family
  misc_feature (1)..(568): NCBI GI NO: 25084169 NR Description: Unknown protein [Arabidopsis thaliana]
  misc_feature (1)..(568): NCBI GI NO: 30682679 NR Description: expressed protein [Arabidopsis thaliana]
  misc_feature (1)..(568): NCBI GI NO: 30682683 NR Description: expressed protein [Arabidopsis thaliana]
  misc_feature (1)..(577): NCBI GI NO: 22773231 NR Description: Putative RNA-binding protein
  misc_feature (1)..(521): NCBI GI NO: 18087662 NR Description: putative RNA-binding protein [Oryza sativa]
  misc_feature (1)..(521): NCBI GI NO: 25372787 NR Description: Rubisco subunit binding-protein beta subunit
  misc_feature (19)..(533): NCBI GI NO: 18405397 NR Description: expressed protein [Arabidopsis thaliana]
  misc_feature (202)..(519): NCBI GI NO: 30682438 NR Description: expressed protein [Arabidopsis thaliana]
  misc_feature (1)..(89): NCBI GI NO: 30682438 NR Description: expressed protein [Arabidopsis thaliana]
  misc_feature (207)..(560): NCBI GI NO: 15912287 NR Description: AT5g61020/maf19_20 [Arabidopsis thaliana]
MNLDGGMAQGVYGDNCSYMYHQGYGYAPYGTYASPNSSSPMIQQDGQQYGLQQYQYPCSYYKSPASADVSFTTNKISLPQGEISTTVDVADCVSSTNAMNKGNNVNVGNSNFTDKNGLNPFLTSSQHTSLNTNDSYQGASLPAYAPLSGYQGPRSTHGTQLPVPSDASLVSDGQAKHGAKVGLSSSVVPVKDFSSQRNQRLPQPLPQYSNMSGSRHPSGLDLVSGFMNGMYPSNRMYSQYGNTFRPNSHFGSAAYGSRMGSFDSKHNGAGYGCGLNHFKKSMDGFSELNKGPRAAKSSDNKNIKSLGPVTLLHKGQNLSVKSDNKEVPLVPDKEQYNGKDLAENYSDAKFFVIKSYSEDDIHKSIKYSAWASTPNGNKKLDSAYQEAKEKPGGCPIFLLFSVNTSGQFVGLAEMLGPVDFGKTVDYWQQDRWTGCFSVKWHVIKDIPNSVLRHITLENNENKPVTNSRDTQEVKFEKGVQLVKIFKEHSSQTCILDDFGFYEDREKVTQEKKSKEQQLPKQISKPSDFTFGTVTFPKSLDATLINESATANAAEGRMNAEGLLEGNGSTTALEDASKSC

SEQ ID NO: 9043 - DNA, 1179 bp, Glycine max
  misc_feature (1)..(1179): Ceres Seq. ID no. 14316328
attttcatttccccactctgtttactccgtgtccgcagaagatggaaagtggattacctttgcttaattatctcttgcagcagactctcagaaccatttgcacttctcccaattcttccactccttctaagtgggtatatgctgtcttctggaggatattacctcgcaactttcctccaccaaggtgggaatttggaggaactgctcttgatctctccaaaggaaataaaaggaactggatccttgtctgggaagatgggttctgcgattttaacgaatgcgagcaaaggaagagtggtagtggttacttgaacggtagatttggagctgacgtattcttcaaaatgtcgcatgaggtttacaattatggagagggactcgtgggaaaagttgccgcagataatagtcacaaatgggtttacaatgagagtcacaatgagtgtgaatctagctatattgcttcatggaatgcttcagtcgaacctcaaccaaaggcgtgggagtttcagttcaattcaggcattcagagtatagtcataatcgccgtcagagaaggcgtagtgcaattgggttcttttaacaagatatcagaggacctgaatctggtgatcagcatacagaggcaattcagctaccttcagagcatacctggtgtgtttggtattcaaagaccatacctacctcttcaacatccatacattgtgaagccaagtttcatagaaaacaatgcaatgactctatatgatatggggtggaacaccaaccctcagaatggagcaccaggcccatctctttgttcaggttctccttctctaccactaccaaccatgccctgtagttttggagctttgctatcaaagttaccatctggaatcccaccctataattccactcaagtccttgatgcagggacacaaagcaccattgagagagtgaagatagaggattgtgaatttcatcctacccttgatgacgatcacaaaggaagaaaggtcggttccctgaacaagtagcatggatttggaattggaagattaattaattaagagacaggaaccactttgaccataatgactcctaaatcatagtcagtatgttaagaaatggttagttatttattttctttcacttggccacaatgtgtattgtggtatgtttattggtggccgacaacctatc

SEQ ID NO: 9044 - protein, 336 aa, Glycine max
  peptide (1)..(336): Ceres Seq. ID no. 14316329
  misc_feature (14)..(293): NCBI GI NO: 18406603 NR Description: expressed protein [Arabidopsis thaliana]
  misc_feature (25)..(209): NCBI GI NO: 30696395 NR Description: expressed protein [Arabidopsis thaliana]
  misc_feature (112)..(279): NCBI GI NO: 38454108 NR Description: At3g15240 [Arabidopsis thaliana]
  misc_feature (115)..(279): NCBI GI NO: 15232532 NR Description: expressed protein [Arabidopsis thaliana]
  misc_feature (114)..(213): NCBI GI NO: 22651858 NR Description: hypothetical protein [Arabidopsis thaliana]
  misc_feature (114)..(213): NCBI GI NO: 30684893 NR Description: expressed protein [Arabidopsis thaliana]
  misc_feature (114)..(213): NCBI GI NO: 29649495 NR Description: hypothetical protein [Arabidopsis thaliana]
  misc_feature (127)..(209): NCBI GI NO: 30696393 NR Description: expressed protein [Arabidopsis thaliana]
  misc_feature (80)..(209): NCBI GI NO: 25406897 NR Description: hypothetical protein
FHFPTLFTPCPQKMESGLPLLNYLLQQTLRTICTSPNSSTPSKWVYAVFWRILPRNFPPPRWEFGGTALDLSKGNKRNWILVWEDGFCDFNECEQRKSGSGYLNGRFGADVFFKMSHEVYNYGEGLVGKVAADNSHKWVYNESHNECESSYIASWNASVEPQPKAWEFQFNSGIQSIVIIAVREGVVQLGSFNKISEDLNLVISIQRQFSYLQSIPGVFGIQRPYLPLQHPYIVKPSFIENNAMTLYDMGWNTNPQNGAPGPSLCSGSPSLPLPTMPCSFGALLSKLPSGIPPYNSTQVLDAGTQSTIERVKIEDCEFHPTLDDDHKGRKVGSLNK

SEQ ID NO: 9045 - protein, 323 aa, Glycine max
  peptide (1)..(323): Ceres Seq. ID no. 14316330
  misc_feature (1)..(280): NCBI GI NO: 18406603 NR Description: expressed protein [Arabidopsis thaliana]
  misc_feature (12)..(196): NCBI GI NO: 30696395 NR Description: expressed protein [Arabidopsis thaliana]
  misc_feature (99)..(266): NCBI GI NO: 38454108 NR Description: At3g15240 [Arabidopsis thaliana]
  misc_feature (102)..(266): NCBI GI NO: 15232532 NR Description: expressed protein [Arabidopsis thaliana]
  misc_feature (101)..(200): NCBI GI NO: 22651858 NR Description: hypothetical protein [Arabidopsis thaliana]
  misc_feature (101)..(200): NCBI GI NO: 29649495 NR Description: hypothetical protein [Arabidopsis thaliana]
  misc_feature (101)..(200): NCBI GI NO: 30684893 NR Description: expressed protein [Arabidopsis thaliana]
  misc_feature (114)..(196): NCBI GI NO: 30696393 NR Description: expressed protein [Arabidopsis thaliana]
  misc_feature (67)..(196): NCBI GI NO: 25406897 NR Description: hypothetical protein
MESGLPLLNYLLQQTLRTICTSPNSSTPSKWVYAVFWRILPRNFPPPRWEFGGTALDLSKGNKRNWILVWEDGFCDFNECEQRKSGSGYLNGRFGADVFFKMSHEVYNYGEGLVGKVAADNSHKWVYNESHNECESSYIASWNASVEPQPKAWEFQFNSGIQSIVIIAVREGVVQLGSFNKISEDLNLVISIQRQFSYLQSIPGVFGIQRPYLPLQHPYIVKPSFIENNAMTLYDMGWNTNPQNGAPGPSLCSGSPSLPLPTMPCSFGALLSKLPSGIPPYNSTQVLDAGTQSTIERVKIEDCEFHPTLDDDHKGRKVGSLNK

SEQ ID NO: 9046 - protein, 222 aa, Glycine max
  peptide (1)..(222): Ceres Seq. ID no. 14316331
  misc_feature (1)..(179): NCBI GI NO: 18406603 NR Description: expressed protein [Arabidopsis thaliana]
  misc_feature (1)..(95): NCBI GI NO: 30696395 NR Description: expressed protein [Arabidopsis thaliana]
  misc_feature (1)..(165): NCBI GI NO: 38454108 NR Description: At3g15240 [Arabidopsis thaliana]
  misc_feature (1)..(165): NCBI GI NO: 15232532 NR Description: expressed protein [Arabidopsis thaliana]
  misc_feature (1)..(99): NCBI GI NO: 22651858 NR Description: hypothetical protein [Arabidopsis thaliana]
  misc_feature (1)..(99): NCBI GI NO: 29649495 NR Description: hypothetical protein [Arabidopsis thaliana]
  misc_feature (1)..(99): NCBI GI NO: 30684893 NR Description: expressed protein [Arabidopsis thaliana]
  misc_feature (13)..(95): NCBI GI NO: 30696393 NR Description: expressed protein [Arabidopsis thaliana]
  misc_feature (1)..(95): NCBI GI NO: 25406897 NR Description: hypothetical protein
MSHEVYNYGEGLVGKVAADNSHKWVYNESHNECESSYIASWNASVEPQPKAWEFQFNSGIQSIVIIAVREGVVQLGSFNKISEDLNLVISIQRQFSYLQSIPGVFGIQRPYLPLQHPYIVKPSFIENNAMTLYDMGWNTNPQNGAPGPSLCSGSPSLPLPTMPCSFGALLSKLPSGIPPYNSTQVLDAGTQSTIERVKIEDCEFHPTLDDDHKGRKVGSLNK

SEQ ID NO: 9047 - DNA, 1411 bp, Glycine max
  misc_feature (1)..(1411): Ceres Seq. ID no. 15170324
acacagtaacggaacacaacaatggctctgtcttcgccacttcagaacctctctgcactcatctccgccaaaggcaatgccaccgccgtcgccacaccccggccgccgagagggcggccctgggcggttcacgcggcggcgtccgacaccaccgcctctgcgtcggtgcaaatgggtgagtacgaagaagggaagctggagcgaccaaagtgggttggggagacccctctttcacgtctcgttcaagctctcatctccttcaagcctttctactctgttctcaagcttggtgctagaagggctttgataagtacagctgagaagaacaacataccttggaggcaaatggcgaaagagattttagagtcagaagtttatagggagctggacaacattcaaaaccagtctttagtgtaccctgattattatttgaatccattccatgcatatgatgagggcaatcttacatggctggcggcagcagaagcagaggctgctacattgtcaatagctaaacgagcaattccagatgcttcttcaacgcaggaagcaaatcagatactgcgtggcaattggcttcgtgcaattgaacaacaccatatgcagtattcagaatcatctgtgatcaatgacattctagatattggatgctctgtaggtataagcacaagatatcttgcagacaagttccccacagccaaagtcaccgggctagatctgtcaccctattttcttgctgtggctcagcataaggaaaagaatgcaccgcctagaaaatttcctataagatggatacatgcaaatggagaagacacgggcctgccttctaaatcattcaaccttgtttctattgcttttgtggttcatgaatgtcctgcaagagctatagtgaatttagtgagggaagcattccgtctccttcggcctggaggcacactagctttggtagattctacgacaaagtcaaaggtccttcaggaattgtctcctgtcctgtttacattgcttaagagcacagaaccctttctggatgagtattacttgactgatatggatgaaacactgagggaagctggttttgggaacataacatcaatccttacggaccccagacacgtgacaattactgcaacagtgccttaatgaaacatcacatcttgagattattttatttttattttacttggtacatgaacatcttcttgggtttggcttcaagctagtcagtccgtggttgatgtatgtccaatagaatagcgtgtcaaaaattgattaaattatgtatccacgtgccacgatcttttattattagttattggttttgtagattatcccaagatctggtgcaacaataattagacatggcaatggggtgggatagagatgaatattatttttctaatcttcgatc

SEQ ID NO: 9048 - protein, 373 aa, Glycine max
  peptide (1)..(373): Ceres Seq. ID no. 15170325
  misc_feature (12)..(280): NCBI GI NO: 37531718 NR Description: unknown protein
  misc_feature (314)..(373): NCBI GI NO: 37531718 NR Description: unknown protein
  misc_feature (58)..(373): NCBI GI NO: 17230530 NR Description: hypothetical protein [Nostoc sp. PCC 7120]
  misc_feature (71)..(372): NCBI GI NO: 23039316 NR Description: hypothetical protein
  misc_feature (65)..(372): NCBI GI NO: 23129131 NR Description: hypothetical protein [Nostoc punctiforme]
  misc_feature (71)..(372): NCBI GI NO: 17229577 NR Description: hypothetical protein [Nostoc sp. PCC 7120]
  misc_feature (70)..(370): NCBI GI NO: 37523046 NR Description: hypothetical protein gll3477
  misc_feature (68)..(372): NCBI GI NO: 16332323 NR Description: unknown protein [Synechocystis sp. PCC 6803]
  misc_feature (205)..(353): NCBI GI NO: 17231019 NR Description: similar to ubiquinone/menaquinone biosynthesismethyltransferase
  misc_feature (205)..(356): NCBI GI NO: 37523940 NR Description: hypothetical protein glr4371
MALSSPLQNLSALISAKGNATAVATPRPPRGRPWAVHAAASDTTASASVQMGEYEEGKLERPKWVGETPLSRLVQALISFKPFYSVLKLGARRALISTAEKNNIPWRQMAKEILESEVYRELDNIQNQSLVYPDYYLNPFHAYDEGNLTWLAAAEAEAATLSIAKRAIPDASSTQEANQILRGNWLRAIEQHHMQYSESSVINDILDIGCSVGISTRYLADKFPTAKVTGLDLSPYFLAVAQHKEKNAPPRKFPIRWIHANGEDTGLPSKSFNLVSIAFVVHECPARAIVNLVREAFRLLRPGGTLALVDSTTKSKVLQELSPVLFTLLKSTEPFLDEYYLTDMDETLREAGFGNITSILTDPRHVTITATVP

SEQ ID NO: 9049 - protein, 323 aa, Glycine max
  peptide (1)..(323): Ceres Seq. ID no. 15170326
  misc_feature (1)..(230): NCBI GI NO: 37531718 NR Description: unknown protein
  misc_feature (264)..(323): NCBI GI NO: 37531718 NR Description: unknown protein
  misc_feature (8)..(323): NCBI GI NO: 17230530 NR Description: hypothetical protein [Nostoc sp. PCC 7120]
  misc_feature (21)..(322): NCBI GI NO: 23039316 NR Description: hypothetical protein
  misc_feature (15)..(322): NCBI GI NO: 23129131 NR Description: hypothetical protein [Nostoc punctiforme]
  misc_feature (21)..(322): NCBI GI NO: 17229577 NR Description: hypothetical protein [Nostoc sp. PCC 7120]
  misc_feature (20)..(320): NCBI GI NO: 37523046 NR Description: hypothetical protein gll3477
  misc_feature (18)..(322): NCBI GI NO: 16332323 NR Description: unknown protein [Synechocystis sp. PCC 6803]
  misc_feature (155)..(303): NCBI GI NO: 17231019 NR Description: similar to ubiquinone/menaquinone biosynthesismethyltransferase
  misc_feature (155)..(306): NCBI GI NO: 37523940 NR Description: hypothetical protein glr4371
MGEYEEGKLERPKWVGETPLSRLVQALISFKPFYSVLKLGARRALISTAEKNNIPWRQMAKEILESEVYRELDNIQNQSLVYPDYYLNPFHAYDEGNLTWLAAAEAEAATLSIAKRAIPDASSTQEANQILRGNWLRAIEQHHMQYSESSVINDILDIGCSVGISTRYLADKFPTAKVTGLDLSPYFLAVAQHKEKNAPPRKFPIRWIHANGEDTGLPSKSFNLVSIAFVVHECPARAIVNLVREAFRLLRPGGTLALVDSTTKSKVLQELSPVLFTLLKSTEPFLDEYYLTDMDETLREAGFGNITSILTDPRHVTITATVP

SEQ ID NO: 9050 - protein, 265 aa, Glycine max
  peptide (1)..(265): Ceres Seq. ID no. 15170327
  misc_feature (1)..(172): NCBI GI NO: 37531718 NR Description: unknown protein
  misc_feature (206)..(265): NCBI GI NO: 37531718 NR Description: unknown protein
  misc_feature (1)..(265): NCBI GI NO: 17230530 NR Description: hypothetical protein [Nostoc sp. PCC 7120]
  misc_feature (1)..(264): NCBI GI NO: 23039316 NR Description: hypothetical protein
  misc_feature (1)..(264): NCBI GI NO: 23129131 NR Description: hypothetical protein [Nostoc punctiforme]
  misc_feature (1)..(264): NCBI GI NO: 17229577 NR Description: hypothetical protein [Nostoc sp. PCC 7120]
  misc_feature (1)..(262): NCBI GI NO: 37523046 NR Description: hypothetical protein gll3477
  misc_feature (1)..(264): NCBI GI NO: 16332323 NR Description: unknown protein [Synechocystis sp. PCC 6803]
  misc_feature (97)..(245): NCBI GI NO: 17231019 NR Description: similar to ubiquinone/menaquinone biosynthesismethyltransferase
  misc_feature (97)..(248): NCBI GI NO: 37523940 NR Description: hypothetical protein glr4371
MAKEILESEVYRELDNIQNQSLVYPDYYLNPFHAYDEGNLTWLAAAEAEAATLSIAKRAIPDASSTQEANQILRGNWLRAIEQHHMQYSESSVINDILDIGCSVGISTRYLADKFPTAKVTGLDLSPYFLAVAQHKEKNAPPRKFPIRWIHANGEDTGLPSKSFNLVSIAFVVHECPARAIVNLVREAFRLLRPGGTLALVDSTTKSKVLQELSPVLFTLLKSTEPFLDEYYLTDMDETLREAGFGNITSILTDPRHVTITATVP

SEQ ID NO: 9051 - DNA, 829 bp, Glycine max
  misc_feature (1)..(829): Ceres Seq. ID no. 13595763
actttgtctacttaattaataaaggtttcaactttgaggataaacctcaccggttgtcacagggtttatcgtttaacggttgaaacgaagcgaaacttccaacttcatcttcaaccctgcgcttcttttgaactggtaaaaacttcgatcattttttgctctttagtcggtgttcatttcaactcagaagtcagaacatcggagctcatcaagcatggcaagctctttgacaacattagccattacctattctcctgtcaacaatggttccaggggtttcagaaagtctgttaatgcttctaaaggaaggggttgcataaaagcaatgaggatagagaaatccttggaggaattgtacaatgtgaaggtggaaagaaaagttcctcctgagagactagccgagcttggagtttcaaaatggtcagtgtggaagactgggaaaagcaggttaccttgggactggcaggtagaccaactggtgtacgtagaagaaggggaagtgagagttgtgcctgaaggaagcaagcgtttcatgcaatttgtggccggagacttggtccggtacccaaagtggtttgaagctgacctatggttcaatggtccatatcaagaacgttatagtttcagagcatatggtgatgatcattgatgagaagatgatgcttggtaaccacataaaagtcacatgcacatcttatttggatgttttatgtaatggatgtttttcaaaagttatagttttccagttctaaatgtattaccaatatttttgaatgtttgtgatactttgccatcatttaaaagaaatagtcctaaatgcttctgttgt

SEQ ID NO: 9052 - protein, 144 aa, Glycine max
  peptide (1)..(144): Ceres Seq. ID no. 13595764
  misc_feature (59)..(134): Pfam Name: DUF861 Pfam Description: Protein of unknown function
  misc_feature (5)..(143): NCBI GI NO: 21592432 NR Description: unknown [Arabidopsis thaliana]
  misc_feature (5)..(143): NCBI GI NO: 18403036 NR Description: expressed protein [Arabidopsis thaliana]
  misc_feature (5)..(143): NCBI GI NO: 15225202 NR Description: expressed protein [Arabidopsis thaliana]
  misc_feature (1)..(119): NCBI GI NO: 38344542 NR Description: OSJNBa0027P08.10
  misc_feature (19)..(119): NCBI GI NO: 21553516 NR Description: unknown [Arabidopsis thaliana]
  misc_feature (19)..(119): NCBI GI NO: 15235021 NR Description: expressed protein [Arabidopsis thaliana]
  misc_feature (50)..(137): NCBI GI NO: 17229206 NR Description: hypothetical protein [Nostoc sp. PCC 7120]
  misc_feature (50)..(137): NCBI GI NO: 23127631 NR Description: hypothetical protein [Nostoc punctiforme]
  misc_feature (50)..(136): NCBI GI NO: 15643869 NR Description: hypothetical protein [Thermotoga maritima]
  misc_feature (50)..(136): NCBI GI NO: 39654289 NR Description: Chain A, Crystal Structure Of Hypothetical Protein
MASSLTTLAITYSPVNNGSRGFRKSVNASKGRGCIKAMRIEKSLEELYNVKVERKVPPERLAELGVSKWSVWKTGKSRLPWDWQVDQLVYVEEGEVRVVPEGSKRFMQFVAGDLVRYPKWFEADLWFNGPYQERYSFRAYGDDH

SEQ ID NO: 9053 - protein, 107 aa, Glycine max
  peptide (1)..(107): Ceres Seq. ID no. 13595765
  misc_feature (22)..(97): Pfam Name: DUF861 Pfam Description: Protein of unknown function
  misc_feature (1)..(106): NCBI GI NO: 21592432 NR Description: unknown [Arabidopsis thaliana]
  misc_feature (1)..(106): NCBI GI NO: 18403036 NR Description: expressed protein [Arabidopsis thaliana]
  misc_feature (1)..(106): NCBI GI NO: 15225202 NR Description: expressed protein [Arabidopsis thaliana]
  misc_feature (1)..(82): NCBI GI NO: 38344542 NR Description: OSJNBa0027P08.10
  misc_feature (1)..(82): NCBI GI NO: 21553516 NR Description: unknown [Arabidopsis thaliana]
  misc_feature (1)..(82): NCBI GI NO: 15235021 NR Description: expressed protein [Arabidopsis thaliana]
  misc_feature (13)..(100): NCBI GI NO: 17229206 NR Description: hypothetical protein [Nostoc sp. PCC 7120]
  misc_feature (13)..(100): NCBI GI NO: 23127631 NR Description: hypothetical protein [Nostoc punctiforme]
  misc_feature (13)..(99): NCBI GI NO: 15643869 NR Description: hypothetical protein [Thermotoga maritima]
  misc_feature (13)..(99): NCBI GI NO: 39654289 NR Description: Chain A, Crystal Structure Of Hypothetical Protein
MRIEKSLEELYNVKVERKVPPERLAELGVSKWSVWKTGKSRLPWDWQVDQLVYVEEGEVRVVPEGSKRFMQFVAGDLVRYPKWFEADLWFNGPYQERYSFRAYGDDH

SEQ ID NO: 9054 - DNA, 1385 bp, Glycine max
  misc_feature (1)..(1385): Ceres Seq. ID no. 15177766
gattacctattatgatggaaagagaaaaaggtttacctttgatgatctctaacacaaatctcagcagcagcagcagcagtgtgatgagggtcaacaaaaacctcccagatgagatcatgttgttcaagatcctccctttgctcccatcaaagacccttattcgattcaggtgcgtgtgcaagttatgggactgtttcatacgcgacccttcattccttcatcttcgaaaactcactaataaccccacccaccactttctcttcctctcacccaaccaaaactcttcacatcccttcctttatggtgctcctcaccccaacaatagcattgtcacaacaccccttcgtccttcgatcctctttgccctcccaaacaaccttcaaatctccgaaacaaatgtccaatgtgtcaatggtttgctctgtttctacccgagaagccatgttagcttttattctcatgccgatgctttcactctcatagcaaaccccaccaccagagagattattactctccccagtgataactattactctgtaaaagcaaattcagagtttttcgcttcaactcattttggatatgaccctgttcgagaccagttcaaggttcttcgctttcttaagtatcaagcaactctccaagtcaaggtttttactcttggtcgcgacacttcatggaggcttgttactgctgaaacaccctttgctatgttgcatcttgaaaaccttttgtcttctcatggtaatagtagtagcctttgtgtcaatggtgctatttattggagacatttagatggtcttcttatgttcgatgtggcagccgaacagttcagggagatactcgttccttcaggagatggaagcgtccttggattctcgctatacccggatctcagggaaattgatgggtgtttgtgtttggttggattcagtaaccatggtttgaagttgtggattctgagggactaccaggctcagctgtgggaacatgaaaccggtgacctcagagccggcccaaaggcctcactcgctgttggaccaatcctgggtgacctccctcctctttatccgctttgcagagttcccacgggtgagatcctacttctgccacattatgttcctacaggtgttgaaagagtcaattttagagcgatttactatgacatggacacaaagagctctaggagtgctgttatcatggaaatgccattgacatggacaacaacattcagagaagttggcattgtcttttgtcaagaaagctttaggttactaaagtagcagcatcataactagagaaatacctttctatttgcttgcatggggccttaaattgtgttggaatggttatgacctattgatatggatttcttttttgccctactg

SEQ ID NO: 9055 - protein, 425 aa, Glycine max
  peptide (1)..(425): Ceres Seq. ID no. 15177767
  misc_feature (13)..(327): NCBI GI NO: 15220834 NR Description: F-box protein family [Arabidopsis thaliana]
  misc_feature (19)..(371): NCBI GI NO: 15225089 NR Description: F-box protein family [Arabidopsis thaliana]
  misc_feature (30)..(397): NCBI GI NO: 15234860 NR Description: F-box protein family [Arabidopsis thaliana]
  misc_feature (33)..(394): NCBI GI NO: 15221502 NR Description: F-box protein family [Arabidopsis thaliana]
  misc_feature (13)..(276): NCBI GI NO: 8671872 NR Description: Contains similarity to a hypothetical proteinT28P16
  misc_feature (33)..(394): NCBI GI NO: 4926821 NR Description: T17H7.6 [Arabidopsis thaliana]
  misc_feature (39)..(331): NCBI GI NO: 15241905 NR Description: F-box protein family [Arabidopsis thaliana]
  misc_feature (34)..(412): NCBI GI NO: 15235230 NR Description: F-box protein family [Arabidopsis thaliana]
  misc_feature (34)..(371): NCBI GI NO: 15220968 NR Description: F-box protein family [Arabidopsis thaliana]
  misc_feature (37)..(328): NCBI GI NO: 29420819 NR Description: F-box [Prunus mume]
LPIMMEREKGLPLMISNTNLSSSSSSVMRVNKNLPDEIMLFKILPLLPSKTLIRFRCVCKLWDCFIRDPSFLHLRKLTNNPTHHFLFLSPNQNSSHPFLYGAPHPNNSIVTTPLRPSILFALPNNLQISETNVQCVNGLLCFYPRSHVSFYSHADAFTLIANPTTREIITLPSDNYYSVKANSEFFASTHFGYDPVRDQFKVLRFLKYQATLQVKVFTLGRDTSWRLVTAETPFAMLHLENLLSSHGNSSSLCVNGAIYWRHLDGLLMFDVAAEQFREILVPSGDGSVLGFSLYPDLREIDGCLCLVGFSNHGLKLWILRDYQAQLWEHETGDLRAGPKASLAVGPILGDLPPLYPLCRVPTGEILLLPHYVPTGVERVNFRAIYYDMDTKSSRSAVIMEMPLTWTTTFREVGIVFCQESFRLLK

SEQ ID NO: 9056 - protein, 422 aa, Glycine max
  peptide (1)..(422): Ceres Seq. ID no. 15177768
  misc_feature (10)..(324): NCBI GI NO: 15220834 NR Description: F-box protein family [Arabidopsis thaliana]
  misc_feature (16)..(368): NCBI GI NO: 15225089 NR Description: F-box protein family [Arabidopsis thaliana]
  misc_feature (27)..(394): NCBI GI NO: 15234860 NR Description: F-box protein family [Arabidopsis thaliana]
  misc_feature (30)..(391): NCBI GI NO: 15221502 NR Description: F-box protein family [Arabidopsis thaliana]
  misc_feature (10)..(273): NCBI GI NO: 8671872 NR Description: Contains similarity to a hypothetical proteinT28P16
  misc_feature (30)..(391): NCBI GI NO: 4926821 NR Description: T17H7.6 [Arabidopsis thaliana]
  misc_feature (36)..(328): NCBI GI NO: 15241905 NR Description: F-box protein family [Arabidopsis thaliana]
  misc_feature (31)..(409): NCBI GI NO: 15235230 NR Description: F-box protein family [Arabidopsis thaliana]
  misc_feature (31)..(368): NCBI GI NO: 15220968 NR Description: F-box protein family [Arabidopsis thaliana]
  misc_feature (34)..(325): NCBI GI NO: 29420819 NR Description: F-box [Prunus mume]
MMEREKGLPLMISNTNLSSSSSSVMRVNKNLPDEIMLFKILPLLPSKTLIRFRCVCKLWDCFIRDPSFLHLRKLTNNPTHHFLFLSPNQNSSHPFLYGAPHPNNSIVTTPLRPSILFALPNNLQISETNVQCVNGLLCFYPRSHVSFYSHADAFTLIANPTTREIITLPSDNYYSVKANSEFFASTHFGYDPVRDQFKVLRFLKYQATLQVKVFTLGRDTSWRLVTAETPFAMLHLENLLSSHGNSSSLCVNGAIYWRHLDGLLMFDVAAEQFREILVPSGDGSVLGFSLYPDLREIDGCLCLVGFSNHGLKLWILRDYQAQLWEHETGDLRAGPKASLAVGPILGDLPPLYPLCRVPTGEILLLPHYVPTGVERVNFRAIYYDMDTKSSRSAVIMEMPLTWTTTFREVGIVFCQESFRLLK

SEQ ID NO: 9057 - protein, 421 aa, Glycine max
  peptide (1)..(421): Ceres Seq. ID no. 15177769
  misc_feature (9)..(323): NCBI GI NO: 15220834 NR Description: F-box protein family [Arabidopsis thaliana]
  misc_feature (15)..(367): NCBI GI NO: 15225089 NR Description: F-box protein family [Arabidopsis thaliana]
  misc_feature (26)..(393): NCBI GI NO: 15234860 NR Description: F-box protein family [Arabidopsis thaliana]
  misc_feature (29)..(390): NCBI GI NO: 15221502 NR Description: F-box protein family [Arabidopsis thaliana]
  misc_feature (9)..(272): NCBI GI NO: 8671872 NR Description: Contains similarity to a hypothetical proteinT28P16
  misc_feature (29)..(390): NCBI GI NO: 4926821 NR Description: T17H7.6 [Arabidopsis thaliana]
  misc_feature (35)..(327): NCBI GI NO: 15241905 NR Description: F-box protein family [Arabidopsis thaliana]
  misc_feature (30)..(408): NCBI GI NO: 15235230 NR Description: F-box protein family [Arabidopsis thaliana]
  misc_feature (30)..(367): NCBI GI NO: 15220968 NR Description: F-box protein family [Arabidopsis thaliana]
  misc_feature (33)..(324): NCBI GI NO: 29420819 NR Description: F-box [Prunus mume]
MEREKGLPLMISNTNLSSSSSSVMRVNKNLPDEIMLFKILPLLPSKTLIRFRCVCKLWDCFIRDPSFLHLRKLTNNPTHHFLFLSPNQNSSHPFLYGAPHPNNSIVTTPLRPSILFALPNNLQISETNVQCVNGLLCFYPRSHVSFYSHADAFTLIANPTTREIITLPSDNYYSVKANSEFFASTHFGYDPVRDQFKVLRFLKYQATLQVKVFTLGRDTSWRLVTAETPFAMLHLENLLSSHGNSSSLCVNGAIYWRHLDGLLMFDVAAEQFREILVPSGDGSVLGFSLYPDLREIDGCLCLVGFSNHGLKLWILRDYQAQLWEHETGDLRAGPKASLAVGPILGDLPPLYPLCRVPTGEILLLPHYVPTGVERVNFRAIYYDMDTKSSRSAVIMEMPLTWTTTFREVGIVFCQESFRLLK
